United States Patent Application Publication US 2009/0181380 A1 - sequence listing, part 2

SEQ ID NO: 1385 - DNA, 4108 bp, Homo sapiens
gtgacccagggagacaaacacttggagatacttggggctgagtttgagcaagactccctaacctgtgtctggacaggtctgatgtcctgtgtggcccaagaagaactgaccccgtgtctggagctcccaccgttattgcatccctgctgtggctcacctgctgctgtctccaggagcccctgagaagatttgcttcctctcccctgctaagctccaggtcctgagattaaattaggggctggagctcactgcactccagcagtcatgggacccaggatagggccagcgggtgaggtaccccaggtaccagacaaggaaaccaaagccacaatgggcacagaaaacacacctggaggcaaagccagcccagaccctcaggacgtgcggccaagtgtgttccataacatcaagctgttcgttctgtgccacagcctgctgcagctggcgcagctcatgatctccggctacctaaagagctccatctccacagtggagaagcgcttcggcctctccagccagacgtcggggctgctggcctccttcaacgaggtggggaacacagccttgattgtgtttgtgagctattttggcagccgggtgcaccgaccccgaatgattggctatggggctatccttgtggccctggcgggcctgctcatgactctcccgcacttcatctcggagccataccgctacgacaacaccagccctgaggatatgccacaggacttcaaggcttccctgtgcctgcccacaacctcggccccagcctcggccccctccaatggcaactgctcaagctacacagaaacccagcatctgagtgtggtggggatcatgttcgtggcacagaccctgctgggcgtgggcggggtgcccattcagccctttggcatctcctacatcgatgactttgcccacaacagcaactcgcccctctacctcgggatcctgtttgcagtgaccatgatggggccaggcctggcctttgggctgggcagcctcatgctgcgcctttatgtggacattaaccagatgccagaaggtggtatcagcctgaccataaaggacccccgatgggtgggtgcctggtggctgggtttcctcatcgctgccggtgcagtggccctggctgccatcccctacttcttcttccccaaggaaatgcccaaggaaaaacgtgagcttcagtttcggcgaaaggtcttagcagtcacagactcacctgccaggaagggcaaggactctccctctaagcagagccctggggagtccacgaagaagcaggatggcctagtccagattgcaccaaacctgactgtgatccagttcattaaagtcttccccagggtgctgctgcagaccctacgccaccccatcttcctgctggtggtcctgtcccaggtatgcttgtcatccatggctgcgggcatggccaccttcctgcccaagttcctggagcgccagttttccatcacagcctcctacgccaacctgctcatcggctgcctctccttcccttcggtcatcgtgggcatcgtggtgggtggcgtcctggtcaagcggctccacctgggccctgtgggatgcggtgccctttgcctgctggggatgctgctgtgcctcttcttcagcctgccgctcttctttatcggctgctccagccaccagattgcgggcatcacacaccagaccagtgcccaccctgggctggagctgtctccaagctgcatggaggcctgctcctgcccattggacggctttaaccctgtctgcgaccccagcactcgtgtggaatacatcacaccctgccacgcaggctgctcaagctgggtggtccaggatgctctggacaacagccaggttttctacaccaactgcagctgcgtggtggagggcaaccccgtgctggcaggatcctgcgactcaacgtgcagccatctggtggtgcccttcctgctcctggtcagcctgggctcggccctggcctgtctcacccacacaccctccttcatgctcatcctaagaggagtgaagaaagaagacaagactttggctgtgggcatccagttcatgttcctgaggattttggcctggatgcccagccccgtgatccacggcagcgccatcgacaccacctgtgtgcactgggccctgagctgtgggcgtcgagctgtctgtcgctactacaataatgacctgctccgaaaccggttcatcggcctccagttcttcttcaaaacaggttctgtgatctgcttcgccttagttttggctgtcctgaggcagcaggacaaagaggcaaggaccaaagagagcagatccagccctgccgtagagcagcaattgctagtgtcggggccagggaagaagccagaggattcccgagtgtgagctgtcttggggccccacctggccaagagtagcagccacagcagtacctcctctgagtcctttgcccaagattgggtgtcaagagccctgtgttccattctggctcctccactaaattgctgtgtgacttcaggcaagacattgatcctctctcagcctttgcttgctagtctgaaccaaagagttgtttgggcatttgctgtgttggccatttctggagcaagagggtcttcttcctccttcccccagccagccagctgtcctggggccaggctttcctgggtggaaagaagtatacctttccctggggccctaggatagcaaagtgagccatagtgggccaggctgccctccatgctgggccccagcccaggtctgcactcgcctggatcaccttctttgagccttagccatctcctgtcaggtaggaatgaacttgccagccttcaggctcgttcagctatgaccatctgtgcggtcagggtacactcagctctcctccccaactccagcagcctttaagaagtgtccctttggcgccccctggaggcagagcactgagctggaccctgggtagactcccacagggaggacggagctggcctcaggagtgggacacccagacttggcagggccttcaagaggcctgtgtgggggccccaggaatccttagctgaagcggggagactcactctccatctcaggaaattctagcccttgccctcagggagccacggttgagggtgaggcccaacacctgccttagggccctgggtgggcaagtctgggccctggggtagggagggagactcaggcccacacttgggtattttctaatttcagacaaacacacactcagcgcgcactcactgattcctacacattgccaagatttcacacatgtgaccaggggccaccaaagtccctgtgacctttgtgactaggatcctaatttctctattttctcctgggtgcctgggtctgtgtcacctggggcagtgtggataatgtttagttctgtgacactgttttttgggggtggcacctggttctccgatgcctgggctggtgtcaggcccaggactgtagtgctgggagcagtaaagctcagctctgtgtaatgagtgatgctatggcttgctcgtgtcttatgatccaatccttttctacatcagcccttgttttgttttatggctagtcttatctggcctggttatttccttgcggggaggagagggtttgctaatctgctcccagcccaacctattaccaccccacctcgctgggacctactgctcgggaggcagcagacagggagccaccagcagtggcttcctggccctgtgctgggggtggggggaagctgggggcacatgtggcccttgccttctgagcagctcccagtgccagggctttgagactttcccacatgataaaagaaaagggaggtacagaagttccaattccctttttattttgctggttggtatctgtaaatgtttaataaatatctgagcatgtatctatcaacgccaagaatttcaaagtctccttcaacaatatgaggcttttaggatgtttatattccttcatccctcttgtttcccaggttttgcagggaaaaaaagtctggaattatagatacagcttattattaaatttgttcttgcataaaaaaaaaaaaaaaaaaaaaaaaaaaaaaaaaaaaaaaaaa

SEQ ID NO: 1386 - protein, 709 aa, Homo sapiens
MGPRIGPAGEVPQVPDKETKATMGTENTPGGKASPDPQDVRPSVFHNIKLFVLCHSLLQLAQLMISGYLKSSISTVEKRFGLSSQTSGLLASFNEVGNTALIVFVSYFGSRVHRPRMIGYGAILVALAGLLMTLPHFISEPYRYDNTSPEDMPQDFKASLCLPTTSAPASAPSNGNCSSYTETQHLSVVGIMFVAQTLLGVGGVPIQPFGISYIDDFAHNSNSPLYLGILFAVTMMGPGLAFGLGSLMLRLYVDINQMPEGGISLTIKDPRWVGAWWLGFLIAAGAVALAAIPYFFFPKEMPKEKRELQFRRKVLAVTDSPARKGKDSPSKQSPGESTKKQDGLVQIAPNLTVIQFIKVFPRVLLQTLRHPIFLLVVLSQVCLSSMAAGMATFLPKFLERQFSITASYANLLIGCLSFPSVIVGIVVGGVLVKRLHLGPVGCGALCLLGMLLCLFFSLPLFFIGCSSHQIAGITHQTSAHPGLELSPSCMEACSCPLDGFNPVCDPSTRVEYITPCHAGCSSWVVQDALDNSQVFYTNCSCVVEGNPVLAGSCDSTCSHLVVPFLLLVSLGSALACLTHTPSFMLILRGVKKEDKTLAVGIQFMFLRILAWMPSPVIHGSAIDTTCVHWALSCGRRAVCRYYNNDLLRNRFIGLQFFFKTGSVICFALVLAVLRQQDKEARTKESRSSPAVEQQLLVSGPGKKPEDSRV

SEQ ID NO: 1387 - DNA, 1737 bp, Homo sapiens
atgagtaactttctcagcccacccctcatcccttcctccggtagtaggagcagctctaaagtcctccccaacccccgaattctccctggtggtgacccacctgcctgctctccgcagtcgggccccgccccacacgtgctggagaaggaggaggaaggacccagcttaaatgttgggggtggaggaggaggaaaaccaagtcggagcctccaggagccaaacttctcggcagcccggaggggcgggggcggagaggatgaagagaaagcgcagcagccgacagccctgattctcgggagcctcccaccccgcctcccacggcgaggagggcgcggagactccgctgggggcggaggacgagaccgggaggcggggaggggggaggcaaaccctgcccactcggctcggagcccggagcggccgcggaagccggaggccggcgcgcaggactttcgagacagcgaacggaccgaccgggactgccagccgctccgggtcaaggactcgccccacccgtgccccccaccaggcgctcccaactcactggtgagcgcggcggcccgggcgctggatgcgggggcggccgcgatggccccgcgcgcgggacagccggggctccaggggctgctgctcgtggcggcggcgctgagccagcccgcggcaccctgccccttccagtgctactgcttcggcggccccaagctgctgctgcgctgcgcgtcgggagccgagctccgccagcctccgcgggacgtgccgcccgacgcgcgcaacctcaccatcgtaggcgccaacctgacggtgctgcgcgcggccgccttcgccggcggggacggggacggcgaccaggcggcgggcgtgcgcctgccgctcctgagcgcgctgcgcctcacgcacaaccacatcgaggtggtggaggacggcgccttcgacgggctgcccagcctggcggcgctcgacctcagccacaacccgctgcgcgccctgggcggcggcgccttccgcgggctgcccgcgctgcgctcgctgcagctcaaccacgcgctggtgcgcggcggccccgcgctgctggccgcgctggacgctgcgctggcaccgctggccgagcttcgcctgctgggcctagcgggcaacgcgctgagccgtctgccgccagccgccctgcgcctggcgcgcctggagcagctggacgtgcgcctcaacgcgctggccggcctggaccccgacgagctgcgcgcgctggagcgcgatggcggcctccccgggccgcgcctgctgctcgccgacaaccccctgcgctgcggctgtgccgcacgccccctgctggcctggctgcgcaacgccacggagcgcgtgcccgactcgcggcgcctgcgctgcgccgccccgcgggcgctgctagaccggccgctactggacctggacggggcgcggcttcgctgcgcggacagcggcgccgacgctcgcggagaggaggcggaggccgccggcccggagctggaagcctcctacgtgttcttcgggctggtgctggcactcatcggcctcatcttcctcatggtgctctacctaaaccgccgcggcatccagcgctggatgcgcaacctgcgcgaggcgtgccgggaccagatggagggctaccactaccgctacgagcaggacgccgacccgcgccgcgcgcccgcgcccgccgcgcccgcgggctcccgcgccacctccccgggctcggggctctga

SEQ ID NO: 1388 - protein, 578 aa, Homo sapiens
MSNFLSPPLIPSSGSRSSSKVLPNPRILPGGDPPACSPQSGPAPHVLEKEEEGPSLNVGGGGGGKPSRSLQEPNFSAARRGGGGEDEEKAQQPTALILGSLPPRLPRRGGRGDSAGGGGRDREAGRGEANPAHSARSPERPRKPEAGAQDFRDSERTDRDCQPLRVKDSPHPCPPPGAPNSLVSAAARALDAGAAAMAPRAGQPGLQGLLLVAAALSQPAAPCPFQCYCFGGPKLLLRCASGAELRQPPRDVPPDARNLTIVGANLTVLRAAAFAGGDGDGDQAAGVRLPLLSALRLTHNHIEVVEDGAFDGLPSLAALDLSHNPLRALGGGAFRGLPALRSLQLNHALVRGGPALLAALDAALAPLAELRLLGLAGNALSRLPPAALRLARLEQLDVRLNALAGLDPDELRALERDGGLPGPRLLLADNPLRCGCAARPLLAWLRNATERVPDSRRLRCAAPRALLDRPLLDLDGARLRCADSGADARGEEAEAAGPELEASYVFFGLVLALIGLIFLMVLYLNRRGIQRWMRNLREACRDQMEGYHYRYEQDADPRRAPAPAAPAGSRATSPGSGL

SEQ ID NO: 1389 - DNA, 2204 bp, Homo sapiens
accccgcgcggttccacgcccctggccgcggcccgggcgctgcgctgctcgacgcggcgggcggcgggcggggaccgggggcgggggcggcggcggcggccgggagagcggaggaggcggagcagggagccgggagcgggctggcccgcgctcctcctgctggctggggattttccagcctgggcgctgacgccgcggacctccctgcgaccgtcgcggaccatgggcgacaaagggacccgagtgttcaagaaggccagtccaaatggaaagctcaccgtctacctgggaaagcgggactttgtggaccacatcgacctcgtggaccctgtggatggtgtggtcctggtggatcctgagtatctcaaagagcggagagtctatgtgacgctgacctgcgccttccgctatggccgggaggacctggatgtcctgggcctgacctttcgcaaggacctgtttgtggccaacgtacagtcgttcccaccggcccccgaggacaagaagcccctgacgcggctgcaggaacgcctcatcaagaagctgggcgagcacgcttaccctttcacctttgagatccctccaaaccttccatgttctgtgacactgcagccggggcccgaagacacggggaaggcttgcggtgtggactatgaagtcaaagccttctgcgcggagaatttggaggagaagatccacaagcggaattctgtgcgtctggtcatccggaaggttcagtatgccccagagaggcctggcccccagcccacagccgagaccaccaggcagttcctcatgtcggacaagcccttgcacctagaagcctctctggataaggagatctattaccatggagaacccatcagcgtcaacgtccacgtcaccaacaacaccaacaagacggtgaagaagatcaagatctcagtgcgccagtatgcagacatctgccttttcaacacagctcagtacaagtgccctgttgccatggaagaggctgatgacactgtggcacccagctcgacgttctgcaaggtctacacactgacccccttcctagccaataaccgagagaagcggggcctcgccttggacgggaagctcaagcacgaagacacgaacttggcctctagcaccctgttgagggaaggtgccaaccgtgagatcctggggatcattgtttcctacaaagtgaaagtgaagctggtggtgtctcggggcggcctgttgggagatcttgcatccagcgacgtggccgtggaactgcccttcaccctaatgcaccccaagcccaaagaggaacccccgcatcgggaagttccagagaacgagacgccagtagataccaatctcatagaacttgacacaaatgatgacgacattgtatttgaggactttgctcgccagagactgaaaggcatgaaggatgacaaggaggaagaggaggatggtaccggctctccacagctcaacaacagatagacgggccggccctgcctccacgtggctccggctccactctcgtgcactcggatgcttactcgtcttcttcctgttctggtttcttttcccctttgttcttccagtttctaccagggggccccgtgggcttccagatcacggtgatgaacctctggcctcaggattggccccacatcaccacgccaacaggaccacagcgcactggctccaccccatctctgccatctccactcccctccttttcatgctgtctcccagaaaagctgccagggctctggccttggaattggacttgagatggggagcagacaggggaggatggggaatgtgggacacggtgtggtgggcatgagggcttggaggggtggggatgagggctcaagacacgagagaagatgtccacggtcccaggtggttaacaaagttctggcagctaaaagatgaccgcgttgaaggccacctccttctggctgggaggggcagaactgtggacagattctcaatgcctttttgaagttctgacccaccaaagaccttctgccttcaccctcctccccacctgatgtccctctgtgtctgatagtgatgttggtgaaagttcgtagaccccaggagtagagaaaagcaactggactgactttcttaccagcagttacctagactgaggcaagctgtgtggactcacccaagtatatttcagtactgtcaggctgtgacatcttagc

SEQ ID NO: 1390 - protein, 418 aa, Homo sapiens
MGDKGTRVFKKASPNGKLTVYLGKRDFVDHIDLVDPVDGVVLVDPEYLKERRVYVTLTCAFRYGREDLDVLGLTFRKDLFVANVQSFPPAPEDKKPLTRLQERLIKKLGEHAYPFTFEIPPNLPCSVTLQPGPEDTGKACGVDYEVKAFCAENLEEKIHKRNSVRLVIRKVQYAPERPGPQPTAETTRQFLMSDKPLHLEASLDKEIYYHGEPISVNVHVTNNTNKTVKKIKISVRQYADICLFNTAQYKCPVAMEEADDTVAPSSTFCKVYTLTPFLANNREKRGLALDGKLKHEDTNLASSTLLREGANREILGIIVSYKVKVKLVVSRGGLLGDLASSDVAVELPFTLMHPKPKEEPPHREVPENETPVDTNLIELDTNDDDIVFEDFARQRLKGMKDDKEEEEDGTGSPQLNNR

SEQ ID NO: 1391 - DNA, 2180 bp, Homo sapiens
accccgcgcggttccacgcccctggccgcggcccgggcgctgcgctgctcgacgcggcgggcggcgggcggggaccgggggcgggggcggcggcggcggccgggagagcggaggaggcggagcagggagccgggagcgggctggcccgcgctcctcctgctggctggggattttccagcctgggcgctgacgccgcggacctccctgcgaccgtcgcggaccatgggcgacaaagggacccgagtgttcaagaaggccagtccaaatggaaagctcaccgtctacctgggaaagcgggactttgtggaccacatcgacctcgtggaccctgtggatggtgtggtcctggtggatcctgagtatctcaaagagcggagagtctatgtgacgctgacctgcgccttccgctatggccgggaggacctggatgtcctgggcctgacctttcgcaaggacctgtttgtggccaacgtacagtcgttcccaccggcccccgaggacaagaagcccctgacgcggctgcaggaacgcctcatcaagaagctgggcgagcacgcttaccctttcacctttgagatccctccaaaccttccatgttctgtgacactgcagccggggcccgaagacacggggaaggcttgcggtgtggactatgaagtcaaagccttctgcgcggagaatttggaggagaagatccacaagcggaattctgtgcgtctggtcatccggaaggttcagtatgccccagagaggcctggcccccagcccacagccgagaccaccaggcagttcctcatgtcggacaagcccttgcacctagaagcctctctggataaggagatctattaccatggagaacccatcagcgtcaacgtccacgtcaccaacaacaccaacaagacggtgaagaagatcaagatctcagtgcgccagtatgcagacatctgccttttcaacacagctcagtacaagtgccctgttgccatggaagaggctgatgacactgtggcacccagctcgacgttctgcaaggtctacacactgacccccttcctagccaataaccgagagaagcggggcctcgccttggacgggaagctcaagcacgaagacacgaacttggcctctagcaccctgttgagggaaggtgccaaccgtgagatcctggggatcattgtttcctacaaagtgaaagtgaagctggtggtgtctcggggcggcgacgtggccgtggaactgcccttcaccctaatgcaccccaagcccaaagaggaacccccgcatcgggaagttccagagaacgagacgccagtagataccaatctcatagaacttgacacaaatgatgacgacattgtatttgaggactttgctcgccagagactgaaaggcatgaaggatgacaaggaggaagaggaggatggtaccggctctccacagctcaacaacagatagacgggccggccctgcctccacgtggctccggctccactctcgtgcactcggatgcttactcgtcttcttcctgttctggtttcttttcccctttgttcttccagtttctaccagggggccccgtgggcttccagatcacggtgatgaacctctggcctcaggattggccccacatcaccacgccaacaggaccacagcgcactggctccaccccatctctgccatctccactcccctccttttcatgctgtctcccagaaaagctgccagggctctggccttggaattggacttgagatggggagcagacaggggaggatggggaatgtgggacacggtgtggtgggcatgagggcttggaggggtggggatgagggctcaagacacgagagaagatgtccacggtcccaggtggttaacaaagttctggcagctaaaagatgaccgcgttgaaggccacctccttctggctgggaggggcagaactgtggacagattctcaatgcctttttgaagttctgacccaccaaagaccttctgccttcaccctcctccccacctgatgtccctctgtgtctgatagtgatgttggtgaaagttcgtagaccccaggagtagagaaaagcaactggactgactttcttaccagcagttacctagactgaggcaagctgtgtggactcacccaagtatatttcagtactgtcaggctgtgacatcttagc

SEQ ID NO: 1392 - protein, 410 aa, Homo sapiens
MGDKGTRVFKKASPNGKLTVYLGKRDFVDHIDLVDPVDGVVLVDPEYLKERRVYVTLTCAFRYGREDLDVLGLTFRKDLFVANVQSFPPAPEDKKPLTRLQERLIKKLGEHAYPFTFEIPPNLPCSVTLQPGPEDTGKACGVDYEVKAFCAENLEEKIHKRNSVRLVIRKVQYAPERPGPQPTAETTRQFLMSDKPLHLEASLDKEIYYHGEPISVNVHVTNNTNKTVKKIKISVRQYADICLFNTAQYKCPVAMEEADDTVAPSSTFCKVYTLTPFLANNREKRGLALDGKLKHEDTNLASSTLLREGANREILGIIVSYKVKVKLVVSRGGDVAVELPFTLMHPKPKEEPPHREVPENETPVDTNLIELDTNDDDIVFEDFARQRLKGMKDDKEEEEDGTGSPQLNNR

SEQ ID NO: 1393 - DNA, 1419 bp, Homo sapiens
atggaggggcagatgtatgagatcacggaggacacagccagcagttggcctgtgccaaccgacgtctccctatacccctcagggggcactggcttagagacccctgacaggaaaggcaaaggaaccacagaaggaaagcccagtagtttctttccagaggacagtttcatagattctggagaaattgatgtgggaaggcgagcttcccagaagattcctcctggcactttctggagatctcaagtgttcatagaccatcctgtgcatctgaaattcaatgtgtctctgggaaaggcagccctggttggcatttatggcagaaaaggcctccctccttcacatacacagtttgactttgtggagctgctggatggcaggaggctcctaacccaggaggcgcggagcctagaggggaccccgcgccagtctcggggaactgtgcccccctccagccatgagacaggcttcatccagtatttggattcaggaatctggcacttggctttttacaatgacggaaaggagtcagaagtggtttcctttctcaccactgccattgagtcggtggataactgccccagcaactgctatggcaatggtgactgcatctctgggacctgccactgcttcctgggtttcctgggccccgactgtggcagagcctcctgccccgtgctctgtagcggaaatggccaatacatgaaaggcagatgcttgtgccacagtggctggaaaggcgctgagtgcgatgtgcccaccaaccagtgtatcgatgtggcctgcagcaaccatggcacctgcatcacgggcacctgcatctgcaaccctggctacaagggcgagagctgtgaggaagtggactgcatggaccccacatgttcaggccggggtgtctgcgtgagaggcgaatgccactgctctgtgggatggggaggcaccaactgcgagacccccagggccacatgcttagaccagtgttcaggccacggaaccttcctcccggacaccgggctttgcagctgtgacccaagctggactggacacgactgttctatcgagatctgtgctgccgactgtggtggccatggcgtgtgcgtagggggcacctgccgctgcgaggatggctggatgggggcagcctgcgaccagcgggcctgccacccgcgctgtgccgagcatgggacctgccgcgacggcaagtgcgagtgcagccctggctggaatggcgaacactgcaccatcgggccagcctgggccctcatcgcatgtggggatggggaagaaagtcctttcatctggagctgcttactctgcagcccttgcacgataaagtcctggttttccactgaggcatctgctcctgtccctcctggagactgtgccctgtcgtggcagctgcactcagagtccctcacctaa

SEQ ID NO: 1394 - protein, 472 aa, Homo sapiens
MEGQMYEITEDTASSWPVPTDVSLYPSGGTGLETPDRKGKGTTEGKPSSFFPEDSFIDSGEIDVGRRASQKIPPGTFWRSQVFIDHPVHLKFNVSLGKAALVGIYGRKGLPPSHTQFDFVELLDGRRLLTQEARSLEGTPRQSRGTVPPSSHETGFIQYLDSGIWHLAFYNDGKESEVVSFLTTAIESVDNCPSNCYGNGDCISGTCHCFLGFLGPDCGRASCPVLCSGNGQYMKGRCLCHSGWKGAECDVPTNQCIDVACSNHGTCITGTCICNPGYKGESCEEVDCMDPTCSGRGVCVRGECHCSVGWGGTNCETPRATCLDQCSGHGTFLPDTGLCSCDPSWTGHDCSIEICAADCGGHGVCVGGTCRCEDGWMGAACDQRACHPRCAEHGTCRDGKCECSPGWNGEHCTIGPAWALIACGDGEESPFIWSCLLCSPCTIKSWFSTEASAPVPPGDCALSWQLHSESLT

SEQ ID NO: 1395 - DNA, 1273 bp, Homo sapiens
acgatggctactggggagctcggggacttgggtggctactacttcaggttcttgcctcagaaaaccttccagtctctgagctctaaggagatcaccagccggctccgccagtggtgaggaaccgaggcgcagggagagaagaggcccttggtcttcgcggctgtggaggcgcaggccgggcgtcgaggggcccgcgcgggtcggcgccattctgagtgaaccctgaggcttcctgagtgaaccccgaaccacccgggaagggcggatgctgtgggtgggatcggttatcggtgcgctctgagagggtgccagcccccagatgatttctttttcctcctctgccccaggtccatgctgggcagaatcaaggcgcaggcgttcggctttgaccagacctttcagtcctatcggaaggatgatttcgttatggcttttttcaaagacccaaatgttattcccaatttgaagttactttcagattcttctggacaatggatcatattaggaactgaagtgaaaaaaattgaagctataaatgttccttgcacacagctttcaatgtcattttttcatcggttatatgatgaagatattgtacgagacagtggacatattgttaaatgtttagattctttttgtgatccatttctcatttctgatgagttacgaagagttttgctagtggaagactcagaaaaatatgaaatattcagccaaccagatagagaagagttcctgttttgtcttttcaaacatctttgccttggtggagccctttgtcaatatgaggatgtgattagcccatatctggaaacaacaaagcttatctataaggatctggtgagtgttcgaaagaatcctcaaaccaagaaaatacagattacctcttctgtctttaaagtttcagcttatgattctgctggtatgtgctatccttcagcaaagaatcatgaacagacattttcttactttattgtggatcctatcaggcgtcaccttcatgttttataccactgttatggtgtgggagacatgtcttaatgttctttcagattatgtacctctactattttgtatttatcatttttctatcttaatactaacttatagataaacatatactttgcaaattaattcaagaaaaatgtaaggagcctacttagagcagaagaaagcaaacaccaagatgcctttttaaaaatttgtgtggaatactaaccggggatcaaatttcatccataataaaatctataccaaaaaaaaaaaaaaaaaa

SEQ ID NO: 1396 - protein, 229 aa, Homo sapiens
MLGRIKAQAFGFDQTFQSYRKDDFVMAFFKDPNVIPNLKLLSDSSGQWIILGTEVKKIEAINVPCTQLSMSFFHRLYDEDIVRDSGHIVKCLDSFCDPFLISDELRRVLLVEDSEKYEIFSQPDREEFLFCLFKHLCLGGALCQYEDVISPYLETTKLIYKDLVSVRKNPQTKKIQITSSVFKVSAYDSAGMCYPSAKNHEQTFSYFIVDPIRRHLHVLYHCYGVGDMS

SEQ ID NO: 1397 - DNA, 5128 bp, Homo sapiens
ccgagtgcctcgcagcccctcccgaggcgcagccgccagaccagtggagccggggcgcagggcgggggcggaggcgccggggcgggggatgcggggccgcggcgcagccccccggccctgagagcgaggacagcgccgcccggcccgcagccgtcgccgcttctccacctcggcccgtggagccggggcgtccgggcgtagccctcgctcgcctgggtcagggggtgcgcgtcgggggaggcagaagccatggatcccgggcagcagccgccgcctcaaccggccccccagggccaagggcagccgccttcgcagcccccgcaggggcagggcccgccgtccggacccgggcaaccggcacccgcggcgacccaggcggcgccgcaggcaccccccgccgggcatcagatcgtgcacgtccgcggggactcggagaccgacctggaggcgctcttcaacgccgtcatgaaccccaagacggccaacgtgccccagaccgtgcccatgaggctccggaagctgcccgactccttcttcaagccgccggagcccaaatcccactcccgacaggccagtactgatgcaggcactgcaggagccctgactccacagcatgttcgagctcattcctctccagcttctctgcagttgggagctgtttctcctgggacactgacccccactggagtagtctctggcccagcagctacacccacagctcagcatcttcgacagtcttcttttgagatacctgatgatgtacctctgccagcaggttgggagatggcaaagacatcttctggtcagagatacttcttaaatcacatcgatcagacaacaacatggcaggaccccaggaaggccatgctgtcccagatgaacgtcacagcccccaccagtccaccagtgcagcagaatatgatgaactcggcttcagccatgaaccagagaatcagtcagagtgctccagtgaaacagccaccacccctggctccccagagcccacagggaggcgtcatgggtggcagcaactccaaccagcagcaacagatgcgactgcagcaactgcagatggagaaggagaggctgcggctgaaacagcaagaactgcttcggcaggtgaggccacaggagttagccctgcgtagccagttaccaacactggagcaggatggtgggactcaaaatccagtgtcttctcccgggatgtctcaggaattgagaacaatgacgaccaatagctcagatcctttccttaacagtggcacctatcactctcgagatgagagtacagacagtggactaagcatgagcagctacagtgtccctcgaaccccagatgacttcctgaacagtgtggatgagatggatacaggtgatactatcaaccaaagcaccctgccctcacagcagaaccgtttcccagactaccttgaagccattcctgggacaaatgtggaccttggaacactggaaggagatggaatgaacatagaaggagaggagctgatgccaagtctgcaggaagctttgagttctgacatccttaatgacatggagtctgttttggctgccaccaagctagataaagaaagctttcttacatggttatagagccctcaggcagactgaattctaaatctgtgaaggatctaaggagacacatgcaccggaaatttccataagccagttgcagttttcaggctaatacagaaaaagatgaacaaacgtccagcaagatactttaatcctctattttgctcttccttgtccattgctgctgttaatgtattgctgacctctttcacagttggctctaaagaatcaaaagaaaaaaactttttatttcttttgctattaaaactactgttcattttgggggctgggggaagtgagcctgtttggatgatggatgccattccttttgcccagttaaatgttcaccaatcattttaactaaatactcagacttagaagtcagatgcttcatgtcacagcatttagtttgttcaacagttgtttcttcagcttcctttgtccagtggaaaaacatgatttactggtctgacaagccaaaaatgttatatctgatattaaatacttaatgctgatttgaagagatagctgaaaccaaggctgaagactgttttactttcagtattttcttttcctcctagtgctatcattagtcacataatgaccttgattttattttaggagcttataaggcatgagacaatttccatataaatatattaattattgccacatactctaatatagattttggtggataattttgtgggtgtgcattttgttctgttttgttgggttttttgttttttttgtttttggcagggtcggtgggggggttggttggttggttggttttgtcggaacctaggcaaatgaccatattagtgaatctgttaatagttgtagcttgggatggttattgtagttgttttggtaaaatcttcatttcctggttttttttaccaccttatttaaatctcgattatctgctctctcttttatatacatacacacacccaaacataacatttataatagtgtggtagtggaatgtatccttttttaggtttccctgctttccagttaatttttaaaatggtagcgctttgtatgcatttagaatacatgactagtagtttatatttcactggtagtttaaatctggttggggcagtctgcagatgtttgaagtagtttagtgttctagaaagagctattactgtggatagtgcctaggggagtgctccacgccctctgggcatacggtagatattatctgatgaattggaaaggagcaaaccagaaatggctttattttctcccttggactaatttttaagtctcgattggaattcagtgagtaggttcataatgtgcatgacagaaataagctttatagtggtttaccttcatttagctttggaagttttctttgccttagttttggaagtaaattctagtttgtagttctcatttgtaatgaacacattaacgactagattaaaatattgccttcaagattgttcttacttacaagacttgctcctacttctatgctgaaaattgaccctggatagaatactataaggttttgagttagctggaaaagtgatcagattaataaatgtatattggtagttgaatttagcaaagaaatagagataatcatgattatacctttatttttacaggaagagatgatgtaactagagtatgtgtctacaggagtaataatggtttccaaagagtattttttaaaggaacaaaacgagcatgaattaactcttcaatataagctatgaagtaatagttggttgtgaattaaagtggcaccagctagcacctctgtgttttaagggtctttcaatgtttctagaataagcccttattttcaagggttcataacaggcataaaatctcttctcctggcaaaagctgctatgaaaagcctcagcttgggaagatagatttttttccccccaattacaaaatctaagtattttggcccttcaatttggaggagggcaaaagttggaagtaagaagttttattttaagtactttcagtgctcaaaaaaatgcaatcactgtgttgtatataatagttcataggttgatcactcataataattgactctaaggcttttattaagaaaacagcagaaagattaaatcttgaattaagtctggggggaaatggccactgcagatggagttttagagtagtaatgaaattctacctagaatgcaaaattgggtatatgaattacatagcatgttgttgggattttttttaatgtgcagaagatcaaagctacttggaaggagtgcctataatttgccagtagccacagattaagattatatcttatatatcagcagattagctttagcttagggggagggtgggaaagtttggggggggggttgtgaagatttagggggaccttgatagagaactttataaacttctttctctttaataaagacttgtcttacaccgtgctgccattaaaggcagctgttctagagtttcagtcacctaagtacacccacaaaacaatatgaatatggagatcttcctttacccctcaactttaatttgcccagttatacctcagtgttgtagcagtactgtgatacctggcacagtgctttgatcttacgatgccctctgtactgacctgaaggagacctaagagtcctttccctttttgagtttgaatcatagccttgatgtggtctcttgttttatgtccttgttcctaatgtaaaagtgcttaactgcttcttggttgtattgggtagcattgggataagattttaactgggtattcttgaattgcttttacaataaaccaattttataatctttaaatttatcaactttttacatttgtgttattttcagtcagggcttcttagatctacttatggttgatggagcacattgatttggagtttcagatcttccaaagcactatttgttgtaataacttttctaaatgtagtgcctttaaaggaaaaatgaacacagggaagtgactttgctacaaataatgttgctgtgttaagtattcatattaaatacatgccttctatatggaacatggcagaaagactgaaaaataacagtaattaattgtgtaattcagaattcataccaatcagtgttgaaactcaaacattgcaaaagtgggtggcaatattcagtgcttaacacttttctagcgttggtacatctgagaaatgagtgctcaggtggattttatcctcgcaagcatgttgttataagaattgtgggtgtgcctatcataacaattgttttctgtatcttgaaaaagtattctccacattttaaatgttttatattagagaattctttaatgcacacttgtcaaatatatatatatagtaccaatgttacctttttattttttgttttagatgtaagagcatgctcatatgttaggtacttacataaattgttacattattttttcttatgtaatacctttttgtttgtttatgtggttcaaatatattctttccttaaaaaaaaaaaaaaaaaaaaaaaaaaaaaaaaaaaaaaa

SEQ ID NO: 1398 - protein, 454 aa, Homo sapiens
MDPGQQPPPQPAPQGQGQPPSQPPQGQGPPSGPGQPAPAATQAAPQAPPAGHQIVHVRGDSETDLEALFNAVMNPKTANVPQTVPMRLRKLPDSFFKPPEPKSHSRQASTDAGTAGALTPQHVRAHSSPASLQLGAVSPGTLTPTGVVSGPAATPTAQHLRQSSFEIPDDVPLPAGWEMAKTSSGQRYFLNHIDQTTTWQDPRKAMLSQMNVTAPTSPPVQQNMMNSASAMNQRISQSAPVKQPPPLAPQSPQGGVMGGSNSNQQQQMRLQQLQMEKERLRLKQQELLRQVRPQELALRSQLPTLEQDGGTQNPVSSPGMSQELRTMTTNSSDPFLNSGTYHSRDESTDSGLSMSSYSVPRTPDDFLNSVDEMDTGDTINQSTLPSQQNRFPDYLEAIPGTNVDLGTLEGDGMNIEGEELMPSLQEALSSDILNDMESVLAATKLDKESFLTWL

SEQ ID NO: 1399 - DNA, 3605 bp, Homo sapiens
aaaggcttccttccgggcaccgcgaagccagcgtgctcagcattcagggaggcagcggcgctcgccttcatccaggacaacaaaactgccatttccgaagagaaaggaaacggctcgcggtttctggggttcccaagcgcgcgcctgcgagggaggccgcgagccgagtcgccacgcccagaaccccgagcccgcccccgcgccacccagcccggccccgccgccccggctgcgcacgcgacgccccctccaggccccgctcctgcgccctatttggtcattcggggggcaagcggcgggaggggaaacgtgcgcggccgaaggggaagcggagccggcgccggctgcgcagaggagccgctctcgccgccgccacctcggctgggagcccacgaggctgccgcatcctgccctcggaacaatgggactcggcgcgcgaggtgcttgggccgcgctgctcctggggacgctgcaggtgctagcgctgctgggggccgcccatgaaagcgcagccatggcggcatctgcaaacatagagaattctgggcttccacacaactccagtgctaactcaacagagactctccaacatgtgccttctgaccatacaaatgaaacttccaacagtactgtgaaaccaccaacttcagttgcctcagactccagtaatacaacggtcaccaccatgaaacctacagcggcatctaatacaacaacaccagggatggtctcaacaaatatgacttctaccaccttaaagtctacacccaaaacaacaagtgtttcacagaacacatctcagatatcaacatccacaatgaccgtaacccacaatagttcagtgacatctgctgcttcatcagtaacaatcacaacaactatgcattctgaagcaaagaaaggatcaaaatttgatactgggagctttgttggtggtattgtattaacgctgggagttttatctattctttacattggatgcaaaatgtattactcaagaagaggcattcggtatcgaaccatagatgaacatgatgccatcatttaaggaaatccatggaccaaggatggaatacagattgatgctgccctatcaattaattttggtttattaatagtttaaaacaatattctctttttgaaaatagtataaacaggccatgcatataatgtacagtgtattacgtaaatatgtaaagattcttcaaggtaacaagggtttgggttttgaaataaacatctggatccttatagaccgttcatacaatggttttagcaagttcatagtaagacaaacaagtcctatctttttttttttggctggggtgggggcattggtcacatatgaccagtaattgaaagacgtcatcactgaaagacagaatgccatctgggcatacaaataagaagtttgtcacagcactcaggattttgggtatcttttgtagctcacataaagaacttcagtgcttttcagagctggatatatcttaattactaatgccacacagaaattatacaatcaaactagatctgaagcataatttaagaaaaacatcaacattttttgtgctttaaactgtagtagttggtctagaaacaaaatactccaagaaaaagaaaattttcaaataaaacccaaaataatagctttgcttagccctgttagggatccattggagcattaaggagcacatatttttattaacttcttttgagctttcaatgttgatgtaatttttgttctctgtgtaatttaggtaaactgcagtgtttaacataataatgttttaaagacttagttgtcagtattaaataatcctggcattatagggaaaaaacctcctagaagttagattatttgctactgtgagaatattgtcaccactggaagttactttagttcatttaattttaattttatattttgtgaatattttaagaactgtagagctgctttcaatatctagaaatttttaattgagtgtaaacacacctaactttaagaaaaagaaccgcttgtatgattttcaaaagaacatttagaattctatagagtcaaaactatagcgtaatgctgtgtttattaagccagggattgtgggacttcccccaggcaactaaacctgcaggatgaaaatgctatattttctttcatgcactgtcgatattactcagatttggggaaatgacatttttatactaaaacaaacaccaaaatattttagaataaattcttagaaagttttgagaggaatttttagagaggacatttcctccttcctgatttggatattccctcaaatccctcctcttactccatgctgaaggagaagtactctcagatgcattatgttaatggagagaaaaagcacagtattgtagagacaccaatattagctaatgtattttggagtgttttccattttacagtttatattccagcactcaaaactcagggtcaagttttaacaaaagaggtatgtagtcacagtaaatactaagatggcatttctatctcagagggccaaagtgaatcacaccagtttctgaaggtcctaaaaatagctcagatgtcctaatgaacatgcacctacatttaataggagtacaataaaactgttgtcagcttttgttttacagagaacgctagatattaagaattttgaaatggatcatttctacttgctgtgcattttaaccaataatctgatgaatatagaaaaaaatgatccaaaatatggatatgattggatgtatgtaacacatacatggagtatggaggaaattttctgaaaaatacatttagattagtttagtttgaaggagaggtgggctgatggctgagttgtatgttactaacttggccctgactggttgtgcaaccattgcttcatttctttgcaaaatgtagttaagatatactttattctaatgaaggccttttaaatttgtccactgcattcttggtatttcactacttcaagtcagtcagaacttcgtagaccgacctgaagtttctttttgaatacttgtttctttagcactttgaagatagaaaaaccactttttaagtactaagtcatcatttgccttgaaagtttcctctgcattgggtttgaagtagtttagttatgtctttttctctgtatgtaagtagtataatttgttactttcaaatacccgtactttgaatgtaggtttttttgttgttgttatctataaaaattgagggaaatggttatgcaaaaaaatattttgctttggaccatatttcttaagcataaaaaaaatgctcagttttgcttgcattccttgagaatgtatttatctgaagatcaaaacaaacaatccagatgtataagtactaggcagaagccaattttaaaatttccttgaataatccatgaaaggaataattcaaatacagataaacagagttggcagtatattatagtgataattttgtattttcacaaaaaaaaagttaaactcttcttttctttttattataatgaccagcttttggtatttcattgttaccaagttctatttttagaataaaattgttctccttctaaaagttttaaaaaaaaaaaaaaaaa

SEQ ID NO: 1400 - protein, 208 aa, Homo sapiens
MGLGARGAWAALLLGTLQVLALLGAAHESAAMAASANIENSGLPHNSSANSTETLQHVPSDHTNETSNSTVKPPTSVASDSSNTTVTTMKPTAASNTTTPGMVSTNMTSTTLKSTPKTTSVSQNTSQISTSTMTVTHNSSVTSAASSVTITTTMHSEAKKGSKFDTGSFVGGIVLTLGVLSILYIGCKMYYSRRGIRYRTIDEHDAII

SEQ ID NO: 1401 - DNA, 1117 bp, Homo sapiens
ccgccatggctgcgctttcatgggcggcccccagcagcgctagcacctgcagcgtccccaggagcagcgcggcccaagcacctcgcgcgccgagtcccattgttccgagggcaggatgcggcagcctcgtgggctcccagccgaggtggcggcggcgagagcggctcctctgcgcagccggcgccggctccgcttccccttcggccgcgcacgtttcccctcccgccgcttgccccccgaatgaccaaatagggcgcaggagcggggcctggagggggcgtcgcgtgcgcagccggggcggcggggccgggctgggtggcgcgggggcgggctcggggttctgggcgtggcgactcggctcgcggcctccctcgcaggcgcgcgcttgggaaccccagaaaccgcgagccgtttcctttctcttcggaaatggcagttttgttgtcctggatgaaggcgagcgccgctgcctccctgaatgctgagcacgctggcttcgcggtgcccggaaggaagcctttgaagaccctgactccagtgtctccagctgagaggctgagcttgccagctccatttctgactgctcatggagcagaatcagtgaccaaggagaaaagggctgagtgaagaaacaagtgtgagtgccaagatgatgccaagggctgtgatttcctggtgggaagaaagaaggaatagaagccaaaggaagggggatgaaaagcaaaaccaagaatcacaaggaatcaagttcggagagaattttggcagagattttgagaggggggctttaagtcagccatggacatactgaagcaagaggaatgaagggaaaaaagaaaaggggggaaaaaaagaagaagaatggggccaaggaggatttaagactaccattataggttacaagttgaattctttttaatattcttcaagcaatgacagtaaagattcaaataacttttaaattacctttgatttctaaaccaagtttcttggaatgtgaaagtcgccaagactgggccctgcagggcctgggttgggctactactgcctatggagattctgagggtattaaccttaataatggcatgaaatcaataaaaatcatccaaaagctttt

SEQ ID NO: 1402 - protein, 65 aa, Homo sapiens
MAVLLSWMKASAAASLNAEHAGFAVPGRKPLKTLTPVSPAERLSLPAPFLTAHGAESVTKEKRAE

SEQ ID NO: 1403 - DNA, 3512 bp, Homo sapiens
gacatggcgagtgtagtgctgccgagcggatcccagtgtgcggcggcagcggcggcggcggcgcctcccgggctccggctccggcttctgctgttgctcttctccgccgcggcactgatccccacaggtgatgggcagaatctgtttacgaaagacgtgacagtgatcgagggagaggttgcgaccatcagttgccaagtcaataagagtgacgactctgtgattcagctactgaatcccaacaggcagaccatttatttcagggacttcaggcctttgaaggacagcaggtttcagttgctgaatttttctagcagtgaactcaaagtatcattgacaaacgtctcaatttctgatgaaggaagatacttttgccagctctataccgatcccccacaggaaagttacaccaccatcacagtcctggtcccaccacgtaatctgatgatcgatatccagagagacactgcggtggaaggtgaggagattgaagtcaactgcactgctatggccagcaagccagccacgactatcaggtggttcaaagggaacacagagctaaaaggcaaatcggaggtggaagagtggtcagacatgtacactgtgaccagtcagctgatgctgaaggtgcacaaggaggacgatggggtcccagtgatctgccaggtggagcaccctgcggtcactggaaacctgcagacccagcggtatctagaagtacagtataagccacaagtgcacattcagatgacttatcctctacaaggcttaacccgggaaggggacgcgcttgagttaacatgtgaagccatcgggaagccccagcctgtgatggtaacttgggtgagagtcgatgatgaaatgcctcaacacgccgtactgtctgggcccaacctgttcatcaataacctaaacaaaacagataatggtacataccgctgtgaagcttcaaacatagtggggaaagctcactcggattatatgctgtatgtatacgatccccccacaactatccctcctcccacaacaaccaccaccaccaccaccaccaccaccaccaccatccttaccatcatcacagattcccgagcaggtgaagaaggctcgatcagggcagtggatcatgccgtgatcggtggcgtcgtggcggtggtggtgttcgccatgctgtgcttgctcatcattctggggcgctattttgccagacataaaggtacatacttcactcatgaagccaaaggagccgatgacgcagcagacgcagacacagctataatcaatgcagaaggaggacagaacaactccgaagaaaagaaagagtacttcatctagatcagcctttttgtttcaatgaggtgtccaactggccctatttagatgataaagagacagtgatattggaacttgcgagaaattcgtgtgtttttttatgaatgggtggaaaggtgtgagactgggaaggcttgggatttgctgtgtaaaaaaaaaaaaaaatgttctttggaaagtacactctgctgtttgacacctcttttttcgtttgtttgtttgtttaatttttatttcttcctaccaagtcaaacttggatacttggatttagtttcagtagattgcagaaaattctgtgccttgttttttgtttgtttgttgcgttcctttcttttccccctttgtgcacatttatttcctccctctaccccaatttcggattttttccaaaatctcccattttggaatttgcctgctgggattccttagactcttttccttcccttttctgttctagttttttacttttgtttatttttatggtaactgctttctgttccaaattcagtttcataaaaggagaaccagcacagcttaggatttcatagttcagaatttagtgtatccataatgcattcttctctgttgtcgtaaagatttgggtgaacaaacaatgaaaactctttgctgctgcccatgtttcaaatacttagagcagtgaagactagaaaattagactgtgattcagaaaatgttctgtttgctgtggaactacattactgtacagggttatctgcaagtgaggtgtgtcacaatgagattgaatttcactgtctttaattctgtatctgtagacggctcagtatagataccctacgctgtccagaaaggtttggggcagaaaggactcctcctttttccatgccctaaacagacctgacaggtgaggtctgttccttttatataagtggacaaattttgagttgccacaggaggggaagtagggaggggggaaatacagttctgctctggttgtttctgttccaaatgattccatccacctttcccaatcggccttacttctcactaatttgtaggaaaaagcaagttcgtctgttgtgcgaatgactgaatgggacagagttgattttttttttttttttcctttgtgcttagttaggaaggcagtaggatgtggcctgcatgtactgtatattacagatatttgtcatgctgggatttccaactcgaatctgtgtgaaactttcattccttcagatttggcttgacaaaggcaggaggtacaaaagaagggctggtattgttctcacactggtctgctgtcgctctcagttctcgataggtcagagcagaggtggaaaaacagcatgtacggattttcagttacttaatcaaaactcaaatgtgagtgtttttatctttttacctttcatacactagccttggcctctttcctcagccttaagaaccatctgccaaaaattactgatcctcgcatgatggcagccatagtgcatagctactaaaatcagtgaccttgaacatatcttagatggggagcctcgggaaaaggtagaggagtcacgttaccatttacatgttttaaagaaagaagtgtggggattttcactgaaacgtctaggaaatctagaagtagtcctgaaggacagaaactaaactcttaccatatgtttggtaagactccagactccagctaacagtccctatggaaagatggcatcaaaaaagatagatctatatatatatataaatatatattctattacattttcagtgagtaattttggattttgcaaggtgcatttttactattgttacattatgtggaaaacttatgctgatttatttaagggggaaaaagtgtcaactctttgttatttgaaaacatgtttatttttcttgtctttattttaacctttgatagaaccattgcaatatgggggccttttgggaacggactggtatgtaaaagaaaatccattatcgagcagcattttatttacccctcccctatccctaggcacttaaccaagacaaaaagccacaatgaacatccctttttcaatgaattttataatctgcagctctattccgagcccttagcacccattccgaccatagtataatcatatcaaagggtgagaatcatttagcatgttgttgaaaggttttttttcagttgttctttttagaaaaaaag

SEQ ID NO: 1404 - protein, 442 aa, Homo sapiens
MASVVLPSGSQCAAAAAAAAPPGLRLRLLLLLFSAAALIPTGDGQNLFTKDVTVIEGEVATISCQVNKSDDSVIQLLNPNRQTIYFRDFRPLKDSRFQLLNFSSSELKVSLTNVSISDEGRYFCQLYTDPPQESYTTITVLVPPRNLMIDIQRDTAVEGEEIEVNCTAMASKPATTIRWFKGNTELKGKSEVEEWSDMYTVTSQLMLKVHKEDDGVPVICQVEHPAVTGNLQTQRYLEVQYKPQVHIQMTYPLQGLTREGDALELTCEAIGKPQPVMVTWVRVDDEMPQHAVLSGPNLFINNLNKTDNGTYRCEASNIVGKAHSDYMLYVYDPPTTIPPPTTTTTTTTTTTTTILTIITDSRAGEEGSIRAVDHAVIGGVVAVVVFAMLCLLIILGRYFARHKGTYFTHEAKGADDAADADTAIINAEGGQNNSEEKKEYFI

SEQ ID NO: 1405 - DNA, 2495 bp, Homo sapiens
cggaggctgagcaccgagagccgccaaggaagagaaactaaccacagccaagttaccccgccggctttccttcgctgcgctaaggaatgaaacccttccagctcgatctgctcttcgtctgcttcttcctcttcagtcaagagctgggcctccagaagagaggatgctgtctggtgctgggctacatggccaaggacaagtttcggagaatgaatgaaggccaagtctattccttcagccagcagccccaggaccaggtggtggtgtcgggacagccagtgacgctactttgcgccatccccgaatacgatggcttcgttctgtggatcaaggacggcttggctctgggtgtgggcagggacctctcaagttacccacagtacctggtggtagggaaccacctgtcaggggagcaccacctgaagatcctgagggcagagctgcaagacgatgcggtgtacgagtgccaggccatccaggccgccatccgctcccgccccgcacgcctcacagtcctggtgccgcctgatgaccccgtcatcctggggggccctgtgatcagcctgcgtgcgggggaccctctcaacctcacctgccacgcagacaatgccaagcctgcagcctccatcatctggttgcgaaagggagaggtcatcaatggggccacctactccaagaccctgcttcgggacggcaagcgggagagcatcgtcagcaccctcttcatctcccctggtgacgtggagaatggccagagcatcgtgtgtcgtgccaccaacaaagccatccccggaggaaaggagacgtcggtcaccattgacatccagcaccctccactggtcaacctctcggtggagccacagccagtgctggaggacaacgtcgtcactttccactgctctgcaaaggccaacccagctgtcacccagtacaggtgggccaagcggggccagatcatcaaggaggcatctggagaggtgtacaggaccacagtggactacacgtacttctcagagcccgtctcctgtgaggtgaccaacgccctgggcagcaccaacctcagccgcacggttgacgtctactttgggccccggatgaccacagaaccccaatccttgctcgtggatctgggctctgatgccatcttcagctgcgcctggaccggcaacccatccctgaccatcgtctggatgaagcggggctccggagtggtcctgagcaatgagaagaccctgaccctcaaatccgtgcgccaggaggacgcgggcaagtacgtgtgccgggctgtggtgccccgtgtgggagccggggagagagaggtgaccctgaccgtcaatggaccccccatcatctccagcacccagacccagcacgccctccacggcgagaagggccagatcaagtgcttcatccggagcacgccgccgccggaccgcatcgcctggtcctggaaggagaacgttctggagtcgggcacatcggggcgctatacggtggagaccatcagcaccgaggagggcgtcatctccaccctgaccatcagcaacatcgtgcgggccgacttccagaccatctacaactgcacggcctggaacagcttcggctccgacactgagatcatccggctcaaggagcaaggttcggaaatgaagtcgggagccgggctggaagcagagtctgtgccgatggccgtcatcattggggtggccgtaggagctggtgtggccttcctcgtccttatggcaaccatcgtggcgttctgctgtgcccgttcccagagaaatctcaaaggtgttgtgtcagccaaaaatgatatccgagtggaaattgtccacaaggaaccagcctctggtcgggagggtgaggagcactccaccatcaagcagctgatgatggaccggggtgaattccagcaagactcagtcctgaaacagctggaggtcctcaaagaagaggagaaagagtttcagaacctgaaggaccccaccaatggctactacagcgtcaacaccttcaaagagcaccactcaaccccgaccatctccctctccagctgccagcccgacctgcgtcctgcgggcaagcagcgtgtgcccacaggcatgtccttcaccaacatctacagcaccctgagcggccagggccgcctctacgactacgggcagcggtttgtgctgggcatgggcagctcgtccatcgagctttgtgagcgggagttccagagaggctccctcagcgacagcagctccttcctggacacgcagtgtgacagcagcgtcagcagcagcggcaagcaggatggctatgtgcagttcgacaaggccagcaaggcttctgcttcctcctcccaccactcccagtcctcgtcccagaactctgaccccagtcgacccctgcagcggcggatgcagactcacgtctaaggatcacacaccgcgggtggggacgggccagggaagaggtcagggcacgttctggttgtccagggacgaggg

SEQ ID NO: 1406 - protein, 778 aa, Homo sapiens
MKPFQLDLLFVCFFLFSQELGLQKRGCCLVLGYMAKDKFRRMNEGQVYSFSQQPQDQVVVSGQPVTLLCAIPEYDGFVLWIKDGLALGVGRDLSSYPQYLVVGNHLSGEHHLKILRAELQDDAVYECQAIQAAIRSRPARLTVLVPPDDPVILGGPVISLRAGDPLNLTCHADNAKPAASIIWLRKGEVINGATYSKTLLRDGKRESIVSTLFISPGDVENGQSIVCRATNKAIPGGKETSVTIDIQHPPLVNLSVEPQPVLEDNVVTFHCSAKANPAVTQYRWAKRGQIIKEASGEVYRTTVDYTYFSEPVSCEVTNALGSTNLSRTVDVYFGPRMTTEPQSLLVDLGSDAIFSCAWTGNPSLTIVWMKRGSGVVLSNEKTLTLKSVRQEDAGKYVCRAVVPRVGAGEREVTLTVNGPPIISSTQTQHALHGEKGQIKCFIRSTPPPDRIAWSWKENVLESGTSGRYTVETISTEEGVISTLTISNIVRADFQTIYNCTAWNSFGSDTEIIRLKEQGSEMKSGAGLEAESVPMAVIIGVAVGAGVAFLVLMATIVAFCCARSQRNLKGVVSAKNDIRVEIVHKEPASGREGEEHSTIKQLMMDRGEFQQDSVLKQLEVLKEEEKEFQNLKDPTNGYYSVNTFKEHHSTPTISLSSCQPDLRPAGKQRVPTGMSFTNIYSTLSGQGRLYDYGQRFVLGMGSSSIELCEREFQRGSLSDSSSFLDTQCDSSVSSSGKQDGYVQFDKASKASASSSHHSQSSSQNSDPSRPLQRRMQTHV

SEQ ID NO: 1407 - DNA, 2791 bp, Homo sapiens
gaaccatcattaattgaagtgagatttttctggcctgagacttgcagggaggcaagaagacactctggacaccactatggacagcctcttgatgaaccggaggaagtttctttaccaattcaaaaatgtccgctgggctaagggtcggcgtgagacctacctgtgctacgtagtgaagaggcgtgacagtgctacatccttttcactggactttggttatcttcgcaataagaacggctgccacgtggaattgctcttcctccgctacatctcggactgggacctagaccctggccgctgctaccgcgtcacctggttcacctcctggagcccctgctacgactgtgcccgacatgtggccgactttctgcgagggaaccccaacctcagtctgaggatcttcaccgcgcgcctctacttctgtgaggaccgcaaggctgagcccgaggggctgcggcggctgcaccgcgccggggtgcaaatagccatcatgaccttcaaagattatttttactgctggaatacttttgtagaaaaccatgaaagaactttcaaagcctgggaagggctgcatgaaaattcagttcgtctctccagacagcttcggcgcatccttttgcccctgtatgaggttgatgacttacgagacgcatttcgtactttgggactttgatagcaacttccaggaatgtcacacacgatgaaatatctctgctgaagacagtggataaaaaacagtccttcaagtcttctctgtttttattcttcaactctcactttcttagagtttacagaaaaaatatttatatacgactctttaaaaagatctatgtcttgaaaatagagaaggaacacaggtctggccagggacgtgctgcaattggtgcagttttgaatgcaacattgtcccctactgggaataacagaactgcaggacctgggagcatcctaaagtgtcaacgtttttctatgacttttaggtaggatgagagcagaaggtagatcctaaaaagcatggtgagaggatcaaatgtttttatatcaacatcctttattatttgattcatttgagttaacagtggtgttagtgatagatttttctattcttttcccttgacgtttactttcaagtaacacaaactcttccatcaggccatgatctataggacctcctaatgagagtatctgggtgattgtgaccccaaaccatctctccaaagcattaatatccaatcatgcgctgtatgttttaatcagcagaagcatgtttttatgtttgtacaaaagaagattgttatgggtggggatggaggtatagaccatgcatggtcaccttcaagctactttaataaaggatcttaaaatgggcaggaggactgtgaacaagacaccctaataatgggttgatgtctgaagtagcaaatcttctggaaacgcaaactcttttaaggaagtccctaatttagaaacacccacaaacttcacatatcataattagcaaacaattggaaggaagttgcttgaatgttggggagaggaaaatctattggctctcgtgggtctcttcatctcagaaatgccaatcaggtcaaggtttgctacattttgtatgtgtgtgatgcttctcccaaaggtatattaactatataagagagttgtgacaaaacagaatgataaagctgcgaaccgtggcacacgctcatagttctagctgcttgggaggttgaggagggaggatggcttgaacacaggtgttcaaggccagcctgggcaacataacaagatcctgtctctcaaaaaaaaaaaaaaaaaaaagaaagagagagggccgggcgtggtggctcacgcctgtaatcccagcactttgggaggccgagccgggcggatcacctgtggtcaggagtttgagaccagcctggccaacatggcaaaaccccgtctgtactcaaaatgcaaaaattagccaggcgtggtagcaggcacctgtaatcccagctacttgggaggctgaggcaggagaatcgcttgaacccaggaggtggaggttgcagtaagctgagatcgtgccgttgcactccagcctgggcgacaagagcaagactctgtctcagaaaaaaaaaaaaaaaagagagagagagagaaagagaacaatatttgggagagaaggatggggaagcattgcaaggaaattgtgctttatccaacaaaatgtaaggagccaataagggatccctatttgtctcttttggtgtctatttgtccctaacaactgtctttgacagtgagaaaaatattcagaataaccatatccctgtgccgttattacctagcaacccttgcaatgaagatgagcagatccacaggaaaacttgaatgcacaactgtcttattttaatcttattgtacataagtttgtaaaagagttaaaaattgttacttcatgtattcatttatattttatattattttgcgtctaatgattttttattaacatgatttccttttctgatatattgaaatggagtctcaaagcttcataaatttataactttagaaatgattctaataacaacgtatgtaattgtaacattgcagtaatggtgctacgaagccatttctcttgatttttagtaaacttttatgacagcaaatttgcttctggctcactttcaatcagttaaataaatgataaataattttggaagctgtgaagataaaataccaaataaaataatataaaagtgatttatatgaagttaaaataaaaaatcagtatgatggaataaacttg

SEQ ID NO: 1408 - protein, 198 aa, Homo sapiens [sequence omitted]

SEQ ID NO: 1409 - DNA, 2900 bp, Homo sapiens
attccagcctcattgtaacacacattctacgcctagcctggctttcttgctctccctcatctcattgtttcagcggaggccaaatctgaagtcctttccagggagtggctctgttcatcttattcgccagccaaagtaggaacagcgtaagaggagagagacacattcagcagccaaaggactcggtggaaagagcagaacaccatagacaatatgtcgctcttgggacccaaggtgctgctgtttcttgctgcattcatcatcacctctgactggatacccctgggggtcaatagtcaacgaggagacgatgtgactcaagcgactccagaaacattcacagaagatcctaatctggtgaatgatcccgctacagatgaaacagttttggctgttttggctgatattgcaccttccacagatgacttggcctccctcagtgaaaaaaataccactgcagagtgctgggatgagaaatttacctgcacaaggctctactctgtgcatcggccggttaaacaatgcattcatcagttatgcttcaccagtttacgacgtatgtacatcgtcaacaaggagatctgctctcgtcttgtctgtaaggaacacgaagctatgaaagatgagctttgccgtcagatggctggtctgccccctaggagactccgtcgctccaattacttccgacttcctccctgtgaaaatgtggatttgcagagacccaatggtctgtgatcattgaaaaagaggaaagaagaaaaaatgtatgggtgagaggaaggaggatctccttcttctccaaccattgacagctaacccttagacagtatttcttaaaccaatccttttgcaatgtccagcttttacccctactctctactttttcacccaaactgataacatttatctcattttctagcacttaaaatacaaagtctatattattgcataattttgctgcttctcaatatcatagacacagtgaatagatgatgactatatggcttatatacaaacattctatgtacaatttcaagggagactaaactttaggctaataatctttactattgaatctgtctgatatagatcttagggttgaagaagctatctttgtctatttgggctaaccatagaatttcatttattttcctcacaatattttcctagaccaactccccatcattcacgtgttcctctttactcttactttaactattttgctggcttgcccgaaaatttgcctggcaagtcttccttataagacacatcatggtaagttttgtagtcctgtaagattctgcaacacagtcaagaattatacaatcctactagcaatatataaggacccaaaatgtcttctgctaagctcagaggctggggctaaagcatgaggactatgccagctatagaacttggactcataattcgctatccaatttttcatgcagttgtctagtcgggaagtaaggttggaaactaagtctcatttactgattcgtttatgggtagtaccgggatgaacccaccaccacaaagcaaattagacaacttaatgtgaaatcataccattggttgacgtttccttgagttgctacttcgttcatcttcacaacttaacaagtgcacggtcgaattattgtgcaagtggcttttggatatcctgattggggcctaagaagggcattcagacttgaattttaataggcagacagaaagtttgcctaatagttaatacgaaagagtgaaagaaacacaatattcagacaacccacattcttatcctggctctagcagtaaccacgtagccttggataagccattttccttcattaggtcctggtttaatttcctcatctttaaaatgagaaggttaaatttatcttagtactgctgggcgcagtggctcatgcctgtaatctgagcactttgggaagctgaggcgggtggatcacttgaggtcagaaatttgagacgagcctggccaacatggtgaaaccccatctctactaaaaatacaaaaattagctgggcgtggtggcacgtgcctgtaatcccagctactcgggaggctgaggcaggagaatcaattgaacctgggaggcagaggttgcagtgagccgagatggcgccattgcactccagcctgggtgacaaaagcaaaagtccatcttaagaaatatatatatatattatatatattcttagttctaagatttcctttaattctatgattctctggatttaaatgcattattcatatttcttgaagcttagatacagtctaattcatagcaaccatatctgctttatcctaggtgagggtagcagtccacaatggaatagaagaaaatcccattataacaaatgacaaattatatatcatgaatccttctgtctgactaactcaataactttctataaaagccaatggaattcaaataggagctaggagacaacaagttatatatgacagtggaggttgtattccttttatattgctgagaaaactagttaaatgatcagattcttgctgttaagaaacaatttcgtttaatgggatctgtacaactgattttaaaaaaatgctacaaaaagccccaaagcatataatctctactccttacagtctctagaattaaatgtactcatttagacaacatattaaatgcatattttagccactttagagaaacctcataggcacagagtttccaagattaattttaagaatatcttcacgaacttgaccctcctactccacattgcaacatttccatcagacagcatttcaattccagtattatgtatattgcaaattaaacattttaaaatatttttttccaatttatttctcaaaataaaatgtcttttgttctggtaaaaaaaaaaaaaaaaaa

SEQ ID NO: 1410 - protein, 173 aa, Homo sapiens
MSLLGPKVLLFLAAFIITSDWIPLGVNSQRGDDVTQATPETFTEDPNLVNDPATDETVLAVLADIAPSTDDLASLSEKNTTAECWDEKFTCTRLYSVHRPVKQCIHQLCFTSLRRMYIVNKEICSRLVCKEHEAMKDELCRQMAGLPPRRLRRSNYFRLPPCENVDLQRPNGL

SEQ ID NO: 1411 - DNA, 1610 bp, Homo sapiens
ccacgcgtccgatggattcgtgggctgcttccacctgctaggagggtggtgtactctaactcagggacagaagcccctgtctgtgctcaggactcttgcagacctctttacctggctgttcatcttccataatcaactggtagacgttacatccaagaggaaataatccaggcaaggaagcacaagctgatcaagatgtgtagttctgtggctgccaagttgtggtttttgacagatcgtcgcatcagggaagactatcctcaaaaagagattttacgagcattgaaggccaaatgttgtgaggaggaactggactttagggctgtggtgatggatgaggtggtgctgacaatcgagcaaggaaacctgggtctgcggatcaatggagagctaatcactgcctacccacaagtggtggtagtcagagtaccaaccccttgggtgcaaagtgatagtgacatcactgttttgcgccatctagagaagatgggatgtcggttaatgaaccgacctcaagccatcctgaactgcgttaataagttctggacatttcaagagttggctggccatggtgttcctctgccggatactttctcttatggtggccacgaaaattttgctaaaatgattgatgaggctgaagttctggagttcccaatggtagtaaagaatacgcggggtcacagaggtaaagctgttttcttggctcgagataagcaccatttggctgatctaagccatcttattcgccatgaagcgccatacctgttccagaagtatgttaaagagtctcatggacgggatgtacgtgtcattgtcgtgggaggccgtgtggttggcaccatgttacgttgttcaacagatgggagaatgcaaagcaactgctcattaggtggtgtggggatgatgtgctcattgagtgaacaagggaagcagctagctatccaggtgtctaatatcctggggatggatgtgtgtggcattgacctgctgatgaaagatgacggctccttctgcgtctgtgaggccaatgcaaatccttttcaggagccaaaaaaacaaatacaaacaaacaaaaaaatacccagagaaaaaactttccttcttcccccttcctgatgatgagtgagaagtattgagaactttcggggtcagtgcccttctaaactccccttcccccaataatgcagctgtataatgaatggtaaatgcaccggtttggattcaggcacagccccagtctgcctacagcagacaactaaactggtaggtggcagcagaggaaggaattcttcagattgatggctactgacttaaagtctgcataggagaagagatagagcatgacataccaagtgaagcaagggggacaaaaatggaaacaggactaagattcctgcattttgactctaaatggttcttttgaagtaaccagtgatcttttttgcttaccctcatcaacagaatggatgaagatagatttgactgtgtgctttttcaagtggagaatatgaatatacagaacaagaaagcaataactccaacctgtttgattccgtctgttttctaaataaagacactatgcgctggaaataaaaaaaaaaaaaaaa

SEQ ID NO: 1412 - protein, 307 aa, Homo sapiens
MCSSVAAKLWFLTDRRIREDYPQKEILRALKAKCCEEELDFRAVVMDEVVLTIEQGNLGLRINGELITAYPQVVVVRVPTPWVQSDSDITVLRHLEKMGCRLMNRPQAILNCVNKFWTFQELAGHGVPLPDTFSYGGHENFAKMIDEAEVLEFPMVVKNTRGHRGKAVFLARDKHHLADLSHLIRHEAPYLFQKYVKESHGRDVRVIVVGGRVVGTMLRCSTDGRMQSNCSLGGVGMMCSLSEQGKQLAIQVSNILGMDVCGIDLLMKDDGSFCVCEANANPFQEPKKQIQTNKKIPREKTFLLPPS

SEQ ID NO: 1413 - DNA, 5123 bp, Homo sapiens
gaccctggaaaaatctgtctcacccacaaagatgtgggctcagctccttctaggaatgttggccctatcaccagccattgcagaagaacttccaaactacctggtgacattaccagcccggctaaatttcccctccgttcagaaggtttgtttggacctgagccctgggtacagtgatgttaaattcacggttactctggagaccaaggacaagacccagaagttgctagaatactctggactgaagaagaggcacttacattgtatctcctttcttgtaccacctcctgctggtggcacagaagaagtggccacaatccgggtgtcgggagttggaaataacatcagctttgaggagaagaaaaaggttctaattcagaggcaggggaacggcacctttgtacagactgacaaacctctctacaccccagggcagcaagtgtatttccgcattgtcaccatggatagcaacttcgttccagtgaatgacaagtactccatggtggaactacaggatccaaatagcaacaggattgcacagtggctggaagtggtacctgagcaaggcattgtagacctgtccttccaactggcaccagaggcaatgctgggcacctacactgtggcagtggctgagggcaagacctttggtactttcagtgtggaggaatatgtgctgccgaagtttaaggtggaagtggtggaacccaaggagttatcaacggtgcaggaatctttcttagtaaaaatttgttgtaggtacacctatggaaagcccatgctaggggcagtgcaggtatctgtgtgtcagaaggcaaatacttactggtatcgagaggtggaacgggaacagcttcctgacaaatgcaggaacctctctggacagactgacaaaacaggatgtttctcagcacctgtggacatggccacctttgacctcattggatatgcgtacagccatcaaatcaatattgtggctactgttgtggaggaagggacaggtgtggaggccaatgccactcagaatatctacatttctccacaaatgggatcaatgacctttgaagacaccagcaatttttaccatccaaatttccccttcagtgggaagataagagttaggggccatgatgactccttcctcaagaaccatctagtgtttctggtgatttatggcacaaatggaaccttcaaccagaccctggttactgataacaatggcctagctccctttaccttggagacatccggttggaatgggacagacgtttctctggagggaaagtttcaaatggaagacttagtatataatccggaacaagtgccacgttactaccaaaatgcctacctgcacctgcgacccttctacagcacaacccgcagcttccttggcatccaccggctaaacggccccttgaaatgtggccagccccaggaagtgctggtggattattacatcgacccggccgatgcaagccctgaccaagagatcagcttctcctactatttaatagggaaaggaagtttggtgatggaggggcagaaacacctgaactctaagaagaaaggactgaaagcctccttctctctctcactgaccttcacttcgagactggcccctgatccttccctggtgatctatgccatttttcccagtggaggtgttgtagctgacaaaattcagttctcagtcgagatgtgctttgacaatcaggtttcccttggcttctccccctcccagcagcttccaggagcagaagtggagctgcagctgcaggcagctcccggatccctgtgtgcgctccgggcggtggatgagagtgtcttactgcttaggccagacagagagctgagcaaccgctctgtctatgggatgtttccattctggtatggtcactacccctatcaagtggctgagtatgatcagtgtccagtgtctggcccatgggactttcctcagcccctcattgacccaatgccccaagggcattcgagccagcgttccattatctggaggccctcgttctctgaaggcacggaccttttcagctttttccgggacgtgggcctgaaaatactgtccaatgccaaaatcaagaagccagtagattgcagtcacagatctccagaatacagcactgctatgggtgcaggcggtggtcatccagaggcttttgagtcatcaactcctttacatcaagcagaggattctcaggtccgccagtacttcccagagacctggctctgggatctgtttcctattggtaactcggggaaggaggcggtccacgtcacagttcctgacgccatcaccgagtggaaggcgatgagtttctgcacttcccagtcaagaggcttcgggctttcacccactgttggactaactgctttcaagccattctttgttgacctgactctcccttactcagtagtccgtggggaatcctttcgtcttactgccaccatcttcaattacctaaaggattgcatcagggttcagactgacctggctaaatcgcatgagtaccagctagaatcatgggcagattctcagacctccagttgtctctgtgctgatgaagcaaaaacccaccactggaacatcacagctgtcaaattgggtcacattaactttactattagtacaaagattctggacagcaatgaaccatgtgggggccagaaggggtttgttccccaaaagggccgaagtgacacgctcatcaagccagttctcgtcaaacctgagggagtcctggtggagaagacacacagctcattgctgtgcccaaaaggaaaggtggcatctgaatctgtctccctggagctcccagtggacattgttcctgactcgaccaaggcttatgttacggttctgggagacattatgggcacagccctgcagaacctggatggtctggtgcagatgcccagtggctgtggcgagcagaacatggtcttgtttgctcccatcatctatgtcttgcagtacctggagaaggcagggctgctgacggaggagatcaggtctcgggcagtgggtttcctggaaatagggtaccagaaggagctgatgtacaaacacagcaatggctcatacagtgcctttggggagcgagatggaaatggaaacacatggctgacagcgtttgtcacaaaatgctttggccaagctcagaaattcatcttcattgatcccaagaacatccaggatgctctcaagtggatggcaggaaaccagctccccagtggctgctatgccaacgtgggaaatctccttcacacagctatgaagggtggtgttgatgatgaggtctccttgactgcgtatgtcacagctgcattgctggagatgggaaaggatgtagatgacccaatggtgagtcagggtctacggtgtctcaagaattcggccacctccacgaccaacctctacacacaggccctgttggcttacattttctccctggctggggaaatggacatcagaaacattctccttaaacagttagatcaacaggctatcatctcaggagaatccatttactggagccagaaacctactccatcatcgaacgccagcccttggtctgagcctgcggctgtagatgtggaactcacagcatatgcattgttggcccagcttaccaagcccagcctgactcaaaaggagatagcgaaggccactagcatagtggcttggttggccaagcaacgcaatgcatatgggggcttctcttctactcaggatactgtagttgctctccaagctcttgccaaatatgccactaccgcctacatgccatctgaggagatcaacctggttgtaaaatccactgagaatttccagcgcacattcaacatacagtcagttaacagattggtatttcagcaggataccctgcccaatgtccctggaatgtacacgttggaggcctcaggccagggctgtgtctatgtgcagacggtgttgagatacaatattctccctcccacaaatatgaagacctttagtcttagtgtggaaataggaaaagctagatgtgagcaaccgacttcacctcgatccttgactctcactattcacaccagttatgtggggagccgtagctcttccaatatggctattgtggaagtgaagatgctatctgggttcagtcccatggagggcaccaatcagttacttctccagcaacccctggtgaagaaggttgaatttggaactgacacacttaacatttacttggatgagctcattaagaacactcagacttacaccttcaccatcagccaaagtgtgctggtcaccaacttgaaaccagcaaccatcaaggtctatgactactacctaccagatgaacaggcaacaattcagtattctgatccctgtgaatgaggataggagctggaaactcaattagtcctctgtgacatttactggagggtggaacattcttctgtcgcttgaagcagaactcattcaatcaaataatttaatttctctgactagtatatgggtaacaaatgaatatgtctgaacctcagctataatactttctactacctttgcaaggagatgggataggaacaatcactcagaggaggcgttgcatgggcagggtcatagggggaagaaaggtggtttagctgttttatttagccattcagggggctctccagagaggagacggtggtagagggtgaactagagaagataagaatgtcttcctaggccggatgcggtggctcacgcctgtaatcccagcactttgggattgcgaggtgggcggatcacttgaggtcaggagttcaagaccagcctggccaacatggtaaaacccgtctctactaacaatacaaagattagcctggtgtggtggcacgggcctgtaatcgcagccccttggaaggccaaggcaggagaatcgcctcaacactggaggtggaggttgcagtgagctgagattgtgccactgcactccagcctgggcaatgaggcaagaccctgtctcaaaaaataataaataataataataataatgtttttctagagtttcagtctaagggaaaatgtgatttagggctttggaaattggctaaaaaaataaaaatggaaaagaaaa

SEQ ID NO: 1414 - protein, 1454 aa, Homo sapiens
MWAQLLLGMLALSPAIAEELPNYLVTLPARLNFPSVQKVCLDLSPGYSDVKFTVTLETKDKTQKLLEYSGLKKRHLHCISFLVPPPAGGTEEVATIRVSGVGNNISFEEKKKVLIQRQGNGTFVQTDKPLYTPGQQVYFRIVTMDSNFVPVNDKYSMVELQDPNSNRIAQWLEVVPEQGIVDLSFQLAPEAMLGTYTVAVAEGKTFGTFSVEEYVLPKFKVEVVEPKELSTVQESFLVKICCRYTYGKPMLGAVQVSVCQKANTYWYREVEREQLPDKCRNLSGQTDKTGCFSAPVDMATFDLIGYAYSHQINIVATVVEEGTGVEANATQNIYISPQMGSMTFEDTSNFYHPNFPFSGKIRVRGHDDSFLKNHLVFLVIYGTNGTFNQTLVTDNNGLAPFTLETSGWNGTDVSLEGKFQMEDLVYNPEQVPRYYQNAYLHLRPFYSTTRSFLGIHRLNGPLKCGQPQEVLVDYYIDPADASPDQEISFSYYLIGKGSLVMEGQKHLNSKKKGLKASFSLSLTFTSRLAPDPSLVIYAIFPSGGVVADKIQFSVEMCFDNQVSLGFSPSQQLPGAEVELQLQAAPGSLCALRAVDESVLLLRPDRELSNRSVYGMFPFWYGHYPYQVAEYDQCPVSGPWDFPQPLIDPMPQGHSSQRSIIWRPSFSEGTDLFSFFRDVGLKILSNAKIKKPVDCSHRSPEYSTAMGAGGGHPEAFESSTPLHQAEDSQVRQYFPETWLWDLFPIGNSGKEAVHVTVPDAITEWKAMSFCTSQSRGFGLSPTVGLTAFKPFFVDLTLPYSVVRGESFRLTATIFNYLKDCIRVQTDLAKSHEYQLESWADSQTSSCLCADEAKTHHWNITAVKLGHINFTISTKILDSNEPCGGQKGFVPQKGRSDTLIKPVLVKPEGVLVEKTHSSLLCPKGKVASESVSLELPVDIVPDSTKAYVTVLGDIMGTALQNLDGLVQMPSGCGEQNMVLFAPIIYVLQYLEKAGLLTEEIRSRAVGFLEIGYQKELMYKHSNGSYSAFGERDGNGNTWLTAFVTKCFGQAQKFIFIDPKNIQDALKWMAGNQLPSGCYANVGNLLHTAMKGGVDDEVSLTAYVTAALLEMGKDVDDPMVSQGLRCLKNSATSTTNLYTQALLAYIFSLAGEMDIRNILLKQLDQQAIISGESIYWSQKPTPSSNASPWSEPAAVDVELTAYALLAQLTKPSLTQKEIAKATSIVAWLAKQRNAYGGFSSTQDTVVALQALAKYATTAYMPSEEINLVVKSTENFQRTFNIQSVNRLVFQQDTLPNVPGMYTLEASGQGCVYVQTVLRYNILPPTNMKTFSLSVEIGKARCEQPTSPRSLTLTIHTSYVGSRSSSNMAIVEVKMLSGFSPMEGTNQLLLQQPLVKKVEFGTDTLNIYLDELIKNTQTYTFTISQSVLVTNLKPATIKVYDYYLPDEQATIQYSDPCE

SEQ ID NO: 1415 - DNA, 2826 bp, Homo sapiens
gctccaagaaaccagccaacggctggaggatgtggaggagcaggtagggtggctcatggctacattagattcaggggacatctcctcagatgccctgcaaaccatgaaataaaaatggaggaggaacaacaacaacaaacaaaaaaaaaaagcaaagaggaactgcaagttcagtccctagcgactaacagtgagcagaggaagtaaagggggagttgtaagagaggcggtatcaacagcctgctgatgaaagaggcgactctgcagaaagaggcaacttgacatatcaggactttaaccgctgtagaaatagctcaggcataccaagcccatgcaaacacagaattgcagaagttcaggagaggcttatcacttccctgagaagaaaaacacattttcagttttgcctgcatcataagagtgagcactccattgctttctttcctggccacactgctacaatccagcactaactatccatgtccagggtaaggatcgagatcgagaagcccacactgccagtgaaaaagctacgtctttactgcataaattagaggaagcaatttcggaacaacggaaccttcaaactataaatactgaattatcgaacacttgccaggcacttcagcagaagacaaggaaactgaagaagctttttagatgaggaatttcctcactatgattccctgtcctgcgcagatgcaattcaacaacctcttcaagaaaaattgaagcagtgttgccacaaactatatggtggtcaagaagcaagaatacatcagacacccctgaccttgaaacatacgtgctggtacacacctctgctggatgccttatctctggatagttttacagcagttccaaccctggaatcaacacctttctcaggtgtagccaaccaaatccacactctgtgtgaaaggcccacatatggagaagtaaaggatggtgctttggatgtaaaaagacaacacaagtgcccaggccccacaagtggccccagcccaggaacgaatctctcaggctgcatcaggatgaatgatgacccaagtatggaagagaatggtgttgaacgcgtgtgtcctgagagcctgctgcagtccagggaatattcctcactaccattacccagacacacttcatcgacagacggtactataacttcaagtgatcctggattagaaattctgaatatggcttcttgtgaccttgacagaaactcgctctgtaagaaagaggaggatacaagatcagcttctcccacgatagaggcccaaggcacaagtccagctcatgataatattgcattccaagactctacgagtaaggataaaaccatattaaatctggaagccaaagaggaaccagaaacaatagaagaacataaaaaagaacatgcttcaggagactctgtggtttcccctcttcctgtaaccactgtgaaatcggttaaccttagacaaagtgagaacacttctgctaatgagaaggaggtggaggcagaatttctcagattatctttgggatttaagtgtgactggtttaccttggagaagagagtgaagcttgaagagaggtcccgtgacttggcagaagaaaatttgaagaaagaaatcactaactgtttaaaactattagagtctttaacacctctgtgtgaagatgacaaccaggcacaggaaatcattaagaagctggagaagagtataaagtttcttagccagtgtgcagcacgagtggccagtagggctgagatgttgggagccatcaatcaggaaagccgggttagtaaagcagttgaagtgatgattcagcacgtagaaaacttgaagaggatgtatgccaaagagcacgctgaattagaagaactgaaacaggttcttctgcagaatgaaaggtctttcaatcctcttgaagatgatgatgactgccaaattaaaaaacgttcagcttctctaaactccaagccatcttctctacgaagagtgactattgcctctttacccagaaatattggaaatgcaggaatggtggctgggatggaaaataatgatcgattcagtagaaggtcaagcagttggcgtattttggggtcaaagcagagtgaacaccgtccctcattacctcgatttattagcacctattcctgggcagatgctgaagaagaaaaatgtgaactaaaaactaaagatgactcagagccatctggagaagaaacagtagaaaggacaaggaagccaagtctttctgaaaagaaaaataatccatcaaagtgggatgtctcttcagtttatgacacaatagcttcctgggcaacaaatctcaagtcctccatcagaaaggctaataaggccctctggctctctattgcattcattgtactgtttgcagctttgatgagcttcctcacaggccaattattccagaagtctgtggatgccgctcccacacagcaagaggactcatggacgtctctagaacatatcttgtggccatttaccagactccgacacaatgggccaccaccagtgtgacagcaggacatcctaatatatggatcttgatttttaagtttcagtatctgaacttcgtaaattagtaacttttagctgggaaagtatagcatgaaaccagaggttctcagaatgactgtaagatagcttacatttcctctttttgcctttatctccccaactaaaatacaatggggaagaagtctgcctatgatctttgaatgagctttttaaggaagaaatattatatattgtttgttaaagtttattgaaataaagaatcatttaaatcttcaaaaaaaaaaaaaaaaaa

SEQ ID NO: 1416 - protein, 499 aa, Homo sapiens
MNDDPSMEENGVERVCPESLLQSREYSSLPLPRHTSSTDGTITSSDPGLEILNMASCDLDRNSLCKKEEDTRSASPTIEAQGTSPAHDNIAFQDSTSKDKTILNLEAKEEPETIEEHKKEHASGDSVVSPLPVTTVKSVNLRQSENTSANEKEVEAEFLRLSLGFKCDWFTLEKRVKLEERSRDLAEENLKKEITNCLKLLESLTPLCEDDNQAQEIIKKLEKSIKFLSQCAARVASRAEMLGAINQESRVSKAVEVMIQHVENLKRMYAKEHAELEELKQVLLQNERSFNPLEDDDDCQIKKRSASLNSKPSSLRRVTIASLPRNIGNAGMVAGMENNDRFSRRSSSWRILGSKQSEHRPSLPRFISTYSWADAEEEKCELKTKDDSEPSGEETVERTRKPSLSEKKNNPSKWDVSSVYDTIASWATNLKSSIRKANKALWLSIAFIVLFAALMSFLTGQLFQKSVDAAPTQQEDSWTSLEHILWPFTRLRHNGPPPV

SEQ ID NO: 1417 - DNA, 2550 bp, Homo sapiens
gtcgtccgggcaacccgggagcgtttgtccacacaatttctgctccgactctgcggactactgcagtggagcttgactcttaatgggtcccaaagcaaaaaaggaacactgtcatcacaaacaggcttcagtggccaaagatctggcagtaagaaaaagaaagtcaccaaagctgaacgattgaagctgctacaagaggaggaggagagacgactgaaagaggaagaggaagcccgtttgaaatatgagaaagaagaaatggaaaggcttgaaatacagcgaattgagaaagaaaaatggcatcgacttgaagcaaaagatctagaaaggagaaatgaagaacttgaagaactttatttattagagaggtgttttcctgaagcagagaaattgaaacaggaaactaaattgctttctcagtggaagcactacattcaatgtgatgggagtcctgatccttcagtagcccaagaaatgaacacgtttattagtttgtggaaagagaaaacaaatgagacttttgaggaagtgattgagaagagtaaagtagtgctaaatttaattgagaaattgaaatttattttactggaaactccaccatgtgatttgcaagataaaaatataatacagtaccaagaatcaatactacaactgcaggagctccttcatcttaaattcggtgtagccacagaaatacttctcaaacaagctagtactttggcagatctggacagtggaaatatggaaaaagtcattaaagatgaaaatgttactctgtatgtgtgggcaaacctcaagaagaatccaaggcacagaagtgttagattctctgaaacacaaattggatttgagattccaaggatattagcaacaagtgacattgctgtacgactcctgcatacccactatgatcatgtttctgcactgcaccctgtttcaacaccatcaaaagaatacacttctgcagtaactgagcttgtcaaagatgatgttaagaatgtagaaaaagcaatcagcaaggaggtcgaagaagagtccaaacaacaagaaagagggtctcacttaattcaggaggaagaaataaaagttgaggaggaacaaggtgatattgaagtgaaaatgagttctgctgaggaagaatctgaagccataaaatgtgaacgagagatgaaagtattaagtgaaactgtttcagcagcacagttgttgctggtagagaattcttctgaaaagccagatttctttgaagacaatgtggtggatttatgccagttcacaactctgggtggagtataccacttggatattttggagcttcctccacagtgtaaaccagtgaagggatggatgattgtggaaatactcaaagaaggattacagaaatacacatatcctccggaaactacagaagagtttgagacagaaaatgctttcccacctatagaggtcacacttgaggttcatgagaatgtaatcttttttgaggatcctgtggttgtaaggtgggatgctgaaggtaaacattggagaactgatggcatcagcaatgtatcctacaaaccaaaagaaagacttgtaacattcagcctggacacctttggccctgttaccttgattcaagatgctcatattaacatgccgtaccagtcatgggaactaagaccacttgatgtaaataaagtacttttaactgtgactacagtatttactgagattcaaatacaaattaaggaaaacctctgcatgttatcttcaatcaaactaaaagacaagaaacacatctctattttggaaggaacctggatgactcctattcctttcattattgctttgaaagaagctggactgaatatctttcctactagacactctcatttttatgttattataaacaataaggttcctttggtagaagtgaaagcttatcgacagatggccctactaagttctgcttttgcatttggttggagcaagtggaacctactatgtaattctacaaaagtcgtatttaaggtgagggaacaccttactgaagaatgtactgagaatcctaattgggcccttttaatgtttagtggtgacagagcacaaagactgaagatcaaggaagagagtgaggcattttctgaagcacttaaagaagaaactgagtttcattctactttatatcacatggtgaaggattttgcttctgaggaagcaatggagaaagtcaggagttccaactgtcagtttgtcaactctgtgtgccacatgctgctctctaccagattgctcagctactcctaacctccacttacaaactgtattgtaagtatgaagaaccaagcatggtgaaagacaggtatttctgcaacacaatgtaatgagtgaatgaatacatttcaaatcaactattaaaaattttctaatctgcattttctactcaagttttattttaaaaacagtatttttttttcctttgaatacttggcctgttaagaatttcagctttcactctatgaagatttaaatgattctttatttcaataaactttaacaaacaataaa

SEQ ID NO: 1418 - protein, 676 aa, Homo sapiens
MERLEIQRIEKEKWHRLEAKDLERRNEELEELYLLERCFPEAEKLKQETKLLSQWKHYIQCDGSPDPSVAQEMNTFISLWKEKTNETFEEVIEKSKVVLNLIEKLKFILLETPPCDLQDKNIIQYQESILQLQELLHLKFGVATEILLKQASTLADLDSGNMEKVIKDENVTLYVWANLKKNPRHRSVRFSETQIGFEIPRILATSDIAVRLLHTHYDHVSALHPVSTPSKEYTSAVTELVKDDVKNVEKAISKEVEEESKQQERGSHLIQEEEIKVEEEQGDIEVKMSSAEEESEAIKCEREMKVLSETVSAAQLLLVENSSEKPDFFEDNVVDLCQFTTLGGVYHLDILELPPQCKPVKGWMIVEILKEGLQKYTYPPETTEEFETENAFPPIEVTLEVHENVIFFEDPVVVRWDAEGKHWRTDGISNVSYKPKERLVTFSLDTFGPVTLIQDAHINMPYQSWELRPLDVNKVLLTVTTVFTEIQIQIKENLCMLSSIKLKDKKHISILEGTWMTPIPFIIALKEAGLNIFPTRHSHFYVIINNKVPLVEVKAYRQMALLSSAFAFGWSKWNLLCNSTKVVFKVREHLTEECTENPNWALLMFSGDRAQRLKIKEESEAFSEALKEETEFHSTLYHMVKDFASEEAMEKVRSSNCQFVNSVCHMLLSTRLLSYS

SEQ ID NO: 1419 - DNA, 6478 bp, Homo sapiens
ggctgacggcaggggaggagccgggtccactgccgggtggaggggcaaggcgagtgtgtgtccttatcctagcaattggggcgcgggcctgtgagccagttggagttgcggcggcgggaacgattgggctgagcagaggacgacatgttgcttttcgtggagcaggtagcatctaaaggaactggtttaaatcctaatgccaaagtatggcaagaaattgctcctggaaatactgatgccaccccagtaactcatggaactgaaagctcttggcatgaaatagcagctacatcaggtgctcatcctgagggtaatgcagagctctcagaagatatatgtaaagaatatgaagtaatgtattcttcatcttgtgaaaccacaagaaatactacaggcattgaagaatcaactgatgggatgattttaggaccagaagatctgagttaccaaatatatgatgtttccggagaaagcaattcagcagtttctacagaagacctaaaagaatgtctgaagaaacaattagaattctgtttttcacgagaaaatttgtcaaaggatctttacttgatatctcaaatggatagtgatcagttcatcccaatttggacagttgccaacatggaagaaataaaaaagttgactacagaccctgatctaattcttgaagtgttaagatcttctcccatggtacaagttgatgagaagggtgagaaagtgagaccaagtcataagcgttgtattgtaattcttagagagattcctgaaacaacaccaatagaggaagtgaaaggtttgttcaaaagtgaaaactgccccaaagtgataagctgtgagtttgcacacaatagcaactggtatatcactttccagtcagacacagatgcacaacaggcttttaaatacttaagagaagaagttaaaacatttcagggcaagccaattatggtaaggataaaagccatcaatacattttttgctaagaatggttatcgattaatggattctagtatctatagtcaccccattcaaactcaagcacagtatgcctccccagtctttatgcagcctgtatataatcctcaccaacagtactcggtctatagtattgtgcctcagtcttggtctccaaatcctacaccttactttgaaacaccactggctccctttcccaatggtagttttgtgaatggctttaattcgccaggatcttataaaacaaatgctgctgctatgaatatgggtcgaccattccaaaaaaatcgtgtgaagcctcagtttaggtcatctggtggttcagaacactcaacagagggctctgtatccttgggggatggacagttgaacagatatagttcaagaaactttccagctgaacggcataaccccacagtaactgggcatcaggagcaaacttaccttcagaaggagacttccactttgcaggtggaacagaatggggactatggtaggggcaggagaactctcttcagaggtcgaagacgacgagaagatgacaggatctcaagacctcatccttcaacagctgaatcaaaggctccaacaccaaagtttgacttattagcctcaaattttccacctttacctggaagttcatcaagaatgccaggtgaactcgttttggagaataggatgtctgatgttgttaaaggtgtctacaaagaaaaggataatgaagagttgacaattagttgcccagtgcctgcagatgagcagacagaatgcacttctgcccagcaactcaatatgagtaccagttctccatgtgctgctgagcttactgcattaagcacaactcagcaagaaaaggatctaatagaagattcctctgttcagaaggatggtctcaatcagacaactataccagtttctcctccaagtactacaaagccatcgagggcaagtactgcttcaccatgtaataataacataaatgcagctacagctgtggctctacaggaaccccgaaagttaagttatgctgaagtgtgccagaagccccctaaagagccatcttcagttcttgtgcagccactacgggaacttcgctccaatgtggtgtctcccaccaaaaatgaagacaatggagctcctgagaactccgttgagaaaccacatgagaagccagaagcaagggctagtaaggattattctggcttccgaggcaatataatccccaggggagcagcaggaaaaatcagggaacagagacgccagtttagccatagggctatacctcagggagtgactcgacgtaatggcaaagagcaatatgtgccacccagatcaccaaagtaaaaaacaacaaaactattcaaaaacttcactctcttcccattaaacttgaactgtggctatattgaactgttttggaggggagggggtagccaggaaggaaacaagagaaagtacgtccatttcattatggattttggagttgtgagtgataggatcccaaaattcatctctaatgtggtttttaaatgctggaggattccaatcaatataaatatatatatatatatacacacacatatataaaaagtataatttttctatttttgtttttggttttaatttgcagagatttgctgccaggaatcaattttgagggttcagatttagcttggaagaaaaaaaagaaacatacatccttcagtataggagatgagggaatgagagaaaatattttttgaagaagcatttctgtaaaattagaaattactttttttaatctatttaaagtttggcttgaagaatgccatctctgactatatggccttgtattgcaaagcagatcagtggctggggtgcctgttgtgggtgtgagtgtgtacaagagcgattgaagccaaatctgttgtcatgttagtaaatgatttgaaaactgaatgtaatacttgagtagatttttttttctagtttgaaatttagtctgtctttttgaccttactaatatttcatttaacaagttgtaaaactctgattgtacttagagatgtgactaccaatcagtttgatactcaaggaaagggggttattcaagaaattgaaaatttcatcttggacctcagtgcataggtcaaatggatttcagaggtttaaacttccctgtgattcccccgaatacccccaaaatgagaaacaaaattttttttcttactccatttgttactctctgttctttgactgcccacccacagaaaagcaaaataaccaactacctactcaattgtgtgtttgtaattgctttgagcagtctagtcaaatcatataaattgttctaaatttcagaattgaacattgaagtattaactcttctgttcacacatttagaattttagctcccaagatggtagggcagactgaccgtacagtaatttatttgtcgttagtgttaaagattaagcatagtaactgactcttaagtgttaaataatgtagaagtaaaaaaattttttttaaaggcttaatttgggaggggggacttatttctgtttacagtgtattaccttccttccctcctcttctccccccacacccaacaaaatacagtttggaattcactgaaacagtaccagcaagtcatgagattttttagtaaagatgagaaagatggttgaagaaaattagtgcataatttctcagtgaataaagttgtagctctcatatactaaatagacaagtttacatgctgttatttagaaaatgactaaaatattaaaaaccgtgttgtgttaatctgttttaagtcataccatgttcagagttctatgtaaggtgggttttatttttcttttaagggatagtttgtaatagtaagaactgtcccatatgttagtaaattacatatgtacaaattgaaactgtaaattgtgaacactggaaagcaccattgtgacatagagtaaacatcttagtaatatattaaagtgaatgtaaatggtggttaaaattacattactgtgaaattcatcttccaactctaagttaagctttggagatacatgttagtggttaactgttaagagctttgaaaacactgcacatatctgtacaagccagaattactatttctttgacttattattagcttggcagttgcttttgatttgattgttttatgacatggtatactactatatttactcagtttgaaactattcatttctacacactatttttaaaaattgcctactaggtgaaacataacaataaaactacctgtgctgaaatttgggggaagtttaggtcctttaaaaaaacatattaatcattgactacatctatgataaaagtgcttattttggtttactaagataatgcagttggtggaaatgataaacgttttaagtgttaacatcctttgaatgcgttggatttcagagaataaacattttgtaaaaatcacttggtaaggattataaacttaattactgcacttaaaatgaaacattactttttttaaacaatgtgtcacaaatgtaggtctgtattacttgtatgcttgtgtgacttactgttagtccagctctaaaaatttaaaggttgtaattgaaatacaagaaaagagccttcttttagaagaaagcaagtatatttttgcttttacttcaaatgttatttaaagtagaaatttaatttgtagatataacctttaaaaattttctcattaagacaatgtttttaatttaatttgcctcattacatctaatagttcccatttgatggcatgtatagggaagagtgagagagtgtgtgtgtgtgtatgtgtgtgtaatatttatatatattcacagtatgtatttagcatttattttattacagcagatttaaagtttgtatctaaataatgcctatgagttgtgtgaagctcttggcttttttccaacgttactttgtaactaatgagggtggatgttcattgtagtttatttatttggttctttagatggaggaatttaaaaaatcaaatttttctcttcacctttatgacttgacatttccttgatctgttggaggctaaaagtaggtataaatgatattgaatgttgggtatagtgatactctgccatagttcttactgcatgaagagaacaagagtcacacaagttcaccactttgcacttcatagagaaggtacatagagacattgcaaaacctgtctccatttgctatcctgataattaaggttttcataatacctagggcctgtctctgagtaattttaattttgccaaatacactgacatttaaaatagtgatccatctaaatttttttcagctgggttttgaggaatataagagctttcaatgataaaggtttgttgtagttgtcttatgtgctgaatttgcagatgatcagatgctgtgcagaattctgatttatttttgtttcctaaaattaagatagcttgaatattatttcacattcctttttcttttttaaataaacaggtttgctttggaaaggcttaatgatggaatgttagcatcttcactagggtaaagaagaacaaaaagaatgttgctggaacgtaaaatagtatttaaaagttaatgaacacttctctagttttcttagttatggccttaataattagtctcttggcttaaatgtccactggttttactttgacacagttgaacaacactggggttaagtctctggtatttaggctggcaatatatatattaaccatattttaaaagtaccaattttgtttttacagaaaagataaaactcaaaagagaacagtgtattccttctgaggggcttttataaattattaactataatatatgatggattttttcctaattttttatatttccttacaattttggtggccattaatttaactttaggcttttgggcatatgctagtctgagcttccgaaaagatacatatatgtttcccttttcattagctgaatgaggatattttaagaagttgaaagagaatttattttcaagttgtgagtaaatcctcctttgaaattcacctgattattagataacttaaagtttatttttaaaagctgacaactttttatgaatcttcgagttgacagttcctaaaagcgtaactcagatattaatgggctgtgtattaaatggttttattttcagttttgcagcacagaacactgttgaaatatccatatcaacttgatttttttaacctaattcaggtgtcctttgcatctcttaaatgttgggggtgggggtcagagccagttatccggcttctgttttgtcgattgcttagatttgttcctgttgtcaaaactgttacccccaaaattggtgtgacacatgctcatgcataaaatgttaaaatgagtacatccttgtatttgtatttgttttcaacatcgccaaggtgctatgggaaattaacaaaattagaaaaaaaataaaattattaaaaagcagaaaaaaaaaaaaaaaaaa

SEQ ID NO: 1420 - protein, 724 aa, Homo sapiens
MLLFVEQVASKGTGLNPNAKVWQEIAPGNTDATPVTHGTESSWHEIAATSGAHPEGNAELSEDICKEYEVMYSSSCETTRNTTGIEESTDGMILGPEDLSYQIYDVSGESNSAVSTEDLKECLKKQLEFCFSRENLSKDLYLISQMDSDQFIPIWTVANMEEIKKLTTDPDLILEVLRSSPMVQVDEKGEKVRPSHKRCIVILREIPETTPIEEVKGLFKSENCPKVISCEFAHNSNWYITFQSDTDAQQAFKYLREEVKTFQGKPIMVRIKAINTFFAKNGYRLMDSSIYSHPIQTQAQYASPVFMQPVYNPHQQYSVYSIVPQSWSPNPTPYFETPLAPFPNGSFVNGFNSPGSYKTNAAAMNMGRPFQKNRVKPQFRSSGGSEHSTEGSVSLGDGQLNRYSSRNFPAERHNPTVTGHQEQTYLQKETSTLQVEQNGDYGRGRRTLFRGRRRREDDRISRPHPSTAESKAPTPKFDLLASNFPPLPGSSSRMPGELVLENRMSDVVKGVYKEKDNEELTISCPVPADEQTECTSAQQLNMSTSSPCAAELTALSTTQQEKDLIEDSSVQKDGLNQTTIPVSPPSTTKPSRASTASPCNNNINAATAVALQEPRKLSYAEVCQKPPKEPSSVLVQPLRELRSNVVSPTKNEDNGAPENSVEKPHEKPEARASKDYSGFRGNIIPRGAAGKIREQRRQFSHRAIPQGVTRRNGKEQYVPPRSPK

SEQ ID NO: 1421 - DNA, 6496 bp, Homo sapiens
ggctgacggcaggggaggagccgggtccactgccgggtggaggggcaaggcgagtgtgtgtccttatcctagcaattggggcgcgggcctgtgagccagttggagttgcggcggcgggaacgattgggctgagcagaggacgacatgttgcttttcgtggagcaggtagcatctaaaggaactggtttaaatcctaatgccaaagtatggcaagaaattgctcctggaaatactgatgccaccccagtaactcatggaactgaaagctcttggcatgaaatagcagctacatcaggtgctcatcctgaggtgtctgtctttaatacaggtaatgcagagctctcagaagatatatgtaaagaatatgaagtaatgtattcttcatcttgtgaaaccacaagaaatactacaggcattgaagaatcaactgatgggatgattttaggaccagaagatctgagttaccaaatatatgatgtttccggagaaagcaattcagcagtttctacagaagacctaaaagaatgtctgaagaaacaattagaattctgtttttcacgagaaaatttgtcaaaggatctttacttgatatctcaaatggatagtgatcagttcatcccaatttggacagttgccaacatggaagaaataaaaaagttgactacagaccctgatctaattcttgaagtgttaagatcttctcccatggtacaagttgatgagaagggtgagaaagtgagaccaagtcataagcgttgtattgtaattcttagagagattcctgaaacaacaccaatagaggaagtgaaaggtttgttcaaaagtgaaaactgccccaaagtgataagctgtgagtttgcacacaatagcaactggtatatcactttccagtcagacacagatgcacaacaggcttttaaatacttaagagaagaagttaaaacatttcagggcaagccaattatggcaaggataaaagccatcaatacattttttgctaagaatggttatcgattaatggattctagtatctatagtcaccccattcaaactcaagcacagtatgcctccccagtctttatgcagcctgtatataatcctcaccaacagtactcggtctatagtattgtgcctcagtcttggtctccaaatcctacaccttactttgaaacaccactggctccctttcccaatggtagttttgtgaatggctttaattcgccaggatcttataaaacaaatgctgctgctatgaatatgggtcgaccattccaaaaaaatcgtgtgaagcctcagtttaggtcatctggtggttcagaacactcaacagagggctctgtatccttgggggatggacagttgaacagatatagttcaagaaactttccagctgaacggcataaccccacagtaactgggcatcaggagcaaacttaccttcagaaggagacttccactttgcaggtggaacagaatggggactatggtaggggcaggagaactctcttcagaggtcgaagacgacgagaagatgacaggatctcaagacctcatccttcaacagctgaatcaaaggctccaacaccaaagtttgacttattagcctcaaattttccacctttacctggaagttcatcaagaatgccaggtgaactcgttttggagaataggatgtctgatgttgttaaaggtgtctacaaagaaaaggataatgaagagttgacaattagttgcccagtgcctgcagatgagcagacagaatgcacttctgcccagcaactcaatatgagtaccagttctccatgtgctgctgagcttactgcattaagcacaactcagcaagaaaaggatctaatagaagattcctctgttcagaaggatggtctcaatcagacaactataccagtttctcctccaagtactacaaagccatcgagggcaagtactgcttcaccatgtaataataacataaatgcagctacagctgtggctctacaggaaccccgaaagttaagttatgctgaagtgtgccagaagccccctaaagagccatcttcagttcttgtgcagccactacgggaacttcgctccaatgtggtgtctcccaccaaaaatgaagacaatggagctcctgagaactccgttgagaaaccacatgagaagccagaagcaagggctagtaaggattattctggcttccgaggcaatataatccccaggggagcagcaggaaaaatcagggaacagagacgccagtttagccatagggctatacctcagggagtgactcgacgtaatggcaaagagcaatatgtgccacccagatcaccaaagtaaaaaacaacaaaactattcaaaaacttcactctcttcccattaaacttgaactgtggctatattgaactgttttggaggggagggggtagccaggaaggaaacaagagaaagtacgtccatttcattatggattttggagttgtgagtgataggatcccaaaattcatctctaatgtggtttttaaatgctggaggattccaatcaatataaatatatatatatatatacacacacatatataaaaagtataatttttctatttttgtttttggttttaatttgcagagatttgctgccaggaatcaattttgagggttcagatttagcttggaagaaaaaaaagaaacatacatccttcagtataggagatgagggaatgagagaaaatattttttgaagaagcatttctgtaaaattagaaattactttttttaatctatttaaagtttggcttgaagaatgccatctctgactatatggccttgtattgcaaagcagatcagtggctggggtgcctgttgtgggtgtgagtgtgtacaagagcgattgaagccaaatctgttgtcatgttagtaaatgatttgaaaactgaatgtaatacttgagtagatttttttttctagtttgaaatttagtctgtctttttgaccttactaatatttcatttaacaagttgtaaaactctgattgtacttagagatgtgactaccaatcagtttgatactcaaggaaagggggttattcaagaaattgaaaatttcatcttggacctcagtgcataggtcaaatggatttcagaggtttaaacttccctgtgattcccccgaatacccccaaaatgagaaacaaaattttttttcttactccatttgttactctctgttctttgactgcccacccacagaaaagcaaaataaccaactacctactcaattgtgtgtttgtaattgctttgagcagtctagtcaaatcatataaattgttctaaatttcagaattgaacattgaagtattaactcttctgttcacacatttagaattttagctcccaagatggtagggcagactgaccgtacagtaatttatttgtcgttagtgttaaagattaagcatagtaactgactcttaagtgttaaataatgtagaagtaaaaaaattttttttaaaggcttaatttgggaggggggacttatttctgtttacagtgtattaccttccttccctcctcttctccccccacacccaacaaaatacagtttggaattcactgaaacagtaccagcaagtcatgagattttttagtaaagatgagaaagatggttgaagaaaattagtgcataatttctcagtgaataaagttgtagctctcatatactaaatagacaagtttacatgctgttatttagaaaatgactaaaatattaaaaaccgtgttgtgttaatctgttttaagtcataccatgttcagagttctatgtaaggtgggttttatttttcttttaagggatagtttgtaatagtaagaactgtcccatatgttagtaaattacatatgtacaaattgaaactgtaaattgtgaacactggaaagcaccattgtgacatagagtaaacatcttagtaatatattaaagtgaatgtaaatggtggttaaaattacattactgtgaaattcatcttccaactctaagttaagctttggagatacatgttagtggttaactgttaagagctttgaaaacactgcacatatctgtacaagccagaattactatttctttgacttattattagcttggcagttgcttttgatttgattgttttatgacatggtatactactatatttactcagtttgaaactattcatttctacacactatttttaaaaattgcctactaggtgaaacataacaataaaactacctgtgctgaaatttgggggaagtttaggtcctttaaaaaaacatattaatcattgactacatctatgataaaagtgcttattttggtttactaagataatgcagttggtggaaatgataaacgttttaagtgttaacatcctttgaatgcgttggatttcagagaataaacattttgtaaaaatcacttggtaaggattataaacttaattactgcacttaaaatgaaacattactttttttaaacaatgtgtcacaaatgtaggtctgtattacttgtatgcttgtgtgacttactgttagtccagctctaaaaatttaaaggttgtaattgaaatacaagaaaagagccttcttttagaagaaagcaagtatatttttgcttttacttcaaatgttatttaaagtagaaatttaatttgtagatataacctttaaaaattttctcattaagacaatgtttttaatttaatttgcctcattacatctaatagttcccatttgatggcatgtatagggaagagtgagagagtgtgtgtgtgtgtatgtgtgtgtaatatttatatatattcacagtatgtatttagcatttattttattacagcagatttaaagtttgtatctaaataatgcctatgagttgtgtgaagctcttggcttttttccaacgttactttgtaactaatgagggtggatgttcattgtagtttatttatttggttctttagatggaggaatttaaaaaatcaaatttttctcttcacctttatgacttgacatttccttgatctgttggaggctaaaagtaggtataaatgatattgaatgttgggtatagtgatactctgccatagttcttactgcatgaagagaacaagagtcacacaagttcaccactttgcacttcatagagaaggtacatagagacattgcaaaacctgtctccatttgctatcctgataattaaggttttcataatacctagggcctgtctctgagtaattttaattttgccaaatacactgacatttaaaatagtgatccatctaaatttttttcagctgggttttgaggaatataagagctttcaatgataaaggtttgttgtagttgtcttatgtgctgaatttgcagatgatcagatgctgtgcagaattctgatttatttttgtttcctaaaattaagatagcttgaatattatttcacattcctttttcttttttaaataaacaggtttgctttggaaaggcttaatgatggaatgttagcatcttcactagggtaaagaagaacaaaaagaatgttgctggaacgtaaaatagtatttaaaagttaatgaacacttctctagttttcttagttatggccttaataattagtctcttggcttaaatgtccactggttttactttgacacagttgaacaacactggggttaagtctctggtatttaggctggcaatatatatattaaccatattttaaaagtaccaattttgtttttacagaaaagataaaactcaaaagagaacagtgtattccttctgaggggcttttataaattattaactataatatatgatggattttttcctaattttttatatttccttacaattttggtggccattaatttaactttaggcttttgggcatatgctagtctgagcttccgaaaagatacatatatgtttcccttttcattagctgaatgaggatattttaagaagttgaaagagaatttattttcaagttgtgagtaaatcctcctttgaaattcacctgattattagataacttaaagtttatttttaaaagctgacaactttttatgaatcttcgagttgacagttcctaaaagcgtaactcagatattaatgggctgtgtattaaatggttttattttcagttttgcagcacagaacactgttgaaatatccatatcaacttgatttttttaacctaattcaggtgtcctttgcatctcttaaatgttgggggtgggggtcagagccagttatccggcttctgttttgtcgattgcttagatttgttcctgttgtcaaaactgttacccccaaaattggtgtgacacatgctcatgcataaaatgttaaaatgagtacatccttgtatttgtatttgttttcaacatcgccaaggtgctatgggaaattaacaaaattagaaaaaaaataaaattattaaaaagcagaaaaaaaaaaaaaaaaaa

SEQ ID NO: 1422 - protein, 730 aa, Homo sapiens
MLLFVEQVASKGTGLNPNAKVWQEIAPGNTDATPVTHGTESSWHEIAATSGAHPEVSVFNTGNAELSEDICKEYEVMYSSSCETTRNTTGIEESTDGMILGPEDLSYQIYDVSGESNSAVSTEDLKECLKKQLEFCFSRENLSKDLYLISQMDSDQFIPIWTVANMEEIKKLTTDPDLILEVLRSSPMVQVDEKGEKVRPSHKRCIVILREIPETTPIEEVKGLFKSENCPKVISCEFAHNSNWYITFQSDTDAQQAFKYLREEVKTFQGKPIMARIKAINTFFAKNGYRLMDSSIYSHPIQTQAQYASPVFMQPVYNPHQQYSVYSIVPQSWSPNPTPYFETPLAPFPNGSFVNGFNSPGSYKTNAAAMNMGRPFQKNRVKPQFRSSGGSEHSTEGSVSLGDGQLNRYSSRNFPAERHNPTVTGHQEQTYLQKETSTLQVEQNGDYGRGRRTLFRGRRRREDDRISRPHPSTAESKAPTPKFDLLASNFPPLPGSSSRMPGELVLENRMSDVVKGVYKEKDNEELTISCPVPADEQTECTSAQQLNMSTSSPCAAELTALSTTQQEKDLIEDSSVQKDGLNQTTIPVSPPSTTKPSRASTASPCNNNINAATAVALQEPRKLSYAEVCQKPPKEPSSVLVQPLRELRSNVVSPTKNEDNGAPENSVEKPHEKPEARASKDYSGFRGNIIPRGAAGKIREQRRQFSHRAIPQGVTRRNGKEQYVPPRSPK

SEQ ID NO: 1423 - DNA, 6265 bp, Homo sapiens
ggctgacggcaggggaggagccgggtccactgccgggtggaggggcaaggcgagtgtgtgtccttatcctagcaattggggcgcgggcctgtgagccagttggagttgcggcggcgggaacgattgggctgagcagaggacgacatgttgcttttcgtggagcaggtagcatctaaaggaactggtttaaatcctaatgccaaagtatggcaagaaattgctcctggaaatactgatgccaccccagtaactcatggaactgaaagctcttggcatgaaatagcagctacatcaggtgctcatcctgagggtaatgcagagctctcagaagatatatgtaaagaatatgaagtaatgtattcttcatcttgtgaaaccacaagaaatactacaggcattgaagaatcaactgatgggatgattttaggaccagaagatctgagttaccaaatatatgatgtttccggagaaagcaattcagcagtttctacagaagacctaaaagaatgtctgaagaaacaattagaattctgtttttcacgagaaaatttgtcaaaggatctttacttgatatctcaaatggatagtgatcagttcatcccaatttggacagttgccaacatggaagaaataaaaaagttgactacagaccctgatctaattcttgaagtgttaagatcttctcccatggtacaagttgatgagaagggtgagaaagtgagaccaagtcataagcgttgtattgtaattcttagagagattcctgaaacaacaccaatagaggaagtgaaaggtttgttcaaaagtgaaaactgccccaaagtgataagctgtgagtttgcacacaatagcaactggtatatcactttccagtcagacacagatgcacaacaggcttttaaatacttaagagaagaagttaaaacatttcagggcaagccaattatggctccctttcccaatggtagttttgtgaatggctttaattcgccaggatcttataaaacaaatgctgctgctatgaatatgggtcgaccattccaaaaaaatcgtgtgaagcctcagtttaggtcatctggtggttcagaacactcaacagagggctctgtatccttgggggatggacagttgaacagatatagttcaagaaactttccagctgaacggcataaccccacagtaactgggcatcaggagcaaacttaccttcagaaggagacttccactttgcaggtggaacagaatggggactatggtaggggcaggagaactctcttcagaggtcgaagacgacgagaagatgacaggatctcaagacctcatccttcaacagctgaatcaaaggctccaacaccaaagtttgacttattagcctcaaattttccacctttacctggaagttcatcaagaatgccaggtgaactcgttttggagaataggatgtctgatgttgttaaaggtgtctacaaagaaaaggataatgaagagttgacaattagttgcccagtgcctgcagatgagcagacagaatgcacttctgcccagcaactcaatatgagtaccagttctccatgtgctgctgagcttactgcattaagcacaactcagcaagaaaaggatctaatagaagattcctctgttcagaaggatggtctcaatcagacaactataccagtttctcctccaagtactacaaagccatcgagggcaagtactgcttcaccatgtaataataacataaatgcagctacagctgtggctctacaggaaccccgaaagttaagttatgctgaagtgtgccagaagccccctaaagagccatcttcagttcttgtgcagccactacgggaacttcgctccaatgtggtgtctcccaccaaaaatgaagacaatggagctcctgagaactccgttgagaaaccacatgagaagccagaagcaagggctagtaaggattattctggcttccgaggcaatataatccccaggggagcagcaggaaaaatcagggaacagagacgccagtttagccatagggctatacctcagggagtgactcgacgtaatggcaaagagcaatatgtgccacccagatcaccaaagtaaaaaacaacaaaactattcaaaaacttcactctcttcccattaaacttgaactgtggctatattgaactgttttggaggggagggggtagccaggaaggaaacaagagaaagtacgtccatttcattatggattttggagttgtgagtgataggatcccaaaattcatctctaatgtggtttttaaatgctggaggattccaatcaatataaatatatatatatatatacacacacatatataaaaagtataatttttctatttttgtttttggttttaatttgcagagatttgctgccaggaatcaattttgagggttcagatttagcttggaagaaaaaaaagaaacatacatccttcagtataggagatgagggaatgagagaaaatattttttgaagaagcatttctgtaaaattagaaattactttttttaatctatttaaagtttggcttgaagaatgccatctctgactatatggccttgtattgcaaagcagatcagtggctggggtgcctgttgtgggtgtgagtgtgtacaagagcgattgaagccaaatctgttgtcatgttagtaaatgatttgaaaactgaatgtaatacttgagtagatttttttttctagtttgaaatttagtctgtctttttgaccttactaatatttcatttaacaagttgtaaaactctgattgtacttagagatgtgactaccaatcagtttgatactcaaggaaagggggttattcaagaaattgaaaatttcatcttggacctcagtgcataggtcaaatggatttcagaggtttaaacttccctgtgattcccccgaatacccccaaaatgagaaacaaaattttttttcttactccatttgttactctctgttctttgactgcccacccacagaaaagcaaaataaccaactacctactcaattgtgtgtttgtaattgctttgagcagtctagtcaaatcatataaattgttctaaatttcagaattgaacattgaagtattaactcttctgttcacacatttagaattttagctcccaagatggtagggcagactgaccgtacagtaatttatttgtcgttagtgttaaagattaagcatagtaactgactcttaagtgttaaataatgtagaagtaaaaaaattttttttaaaggcttaatttgggaggggggacttatttctgtttacagtgtattaccttccttccctcctcttctccccccacacccaacaaaatacagtttggaattcactgaaacagtaccagcaagtcatgagattttttagtaaagatgagaaagatggttgaagaaaattagtgcataatttctcagtgaataaagttgtagctctcatatactaaatagacaagtttacatgctgttatttagaaaatgactaaaatattaaaaaccgtgttgtgttaatctgttttaagtcataccatgttcagagttctatgtaaggtgggttttatttttcttttaagggatagtttgtaatagtaagaactgtcccatatgttagtaaattacatatgtacaaattgaaactgtaaattgtgaacactggaaagcaccattgtgacatagagtaaacatcttagtaatatattaaagtgaatgtaaatggtggttaaaattacattactgtgaaattcatcttccaactctaagttaagctttggagatacatgttagtggttaactgttaagagctttgaaaacactgcacatatctgtacaagccagaattactatttctttgacttattattagcttggcagttgcttttgatttgattgttttatgacatggtatactactatatttactcagtttgaaactattcatttctacacactatttttaaaaattgcctactaggtgaaacataacaataaaactacctgtgctgaaatttgggggaagtttaggtcctttaaaaaaacatattaatcattgactacatctatgataaaagtgcttattttggtttactaagataatgcagttggtggaaatgataaacgttttaagtgttaacatcctttgaatgcgttggatttcagagaataaacattttgtaaaaatcacttggtaaggattataaacttaattactgcacttaaaatgaaacattactttttttaaacaatgtgtcacaaatgtaggtctgtattacttgtatgcttgtgtgacttactgttagtccagctctaaaaatttaaaggttgtaattgaaatacaagaaaagagccttcttttagaagaaagcaagtatatttttgcttttacttcaaatgttatttaaagtagaaatttaatttgtagatataacctttaaaaattttctcattaagacaatgtttttaatttaatttgcctcattacatctaatagttcccatttgatggcatgtatagggaagagtgagagagtgtgtgtgtgtgtatgtgtgtgtaatatttatatatattcacagtatgtatttagcatttattttattacagcagatttaaagtttgtatctaaataatgcctatgagttgtgtgaagctcttggcttttttccaacgttactttgtaactaatgagggtggatgttcattgtagtttatttatttggttctttagatggaggaatttaaaaaatcaaatttttctcttcacctttatgacttgacatttccttgatctgttggaggctaaaagtaggtataaatgatattgaatgttgggtatagtgatactctgccatagttcttactgcatgaagagaacaagagtcacacaagttcaccactttgcacttcatagagaaggtacatagagacattgcaaaacctgtctccatttgctatcctgataattaaggttttcataatacctagggcctgtctctgagtaattttaattttgccaaatacactgacatttaaaatagtgatccatctaaatttttttcagctgggttttgaggaatataagagctttcaatgataaaggtttgttgtagttgtcttatgtgctgaatttgcagatgatcagatgctgtgcagaattctgatttatttttgtttcctaaaattaagatagcttgaatattatttcacattcctttttcttttttaaataaacaggtttgctttggaaaggcttaatgatggaatgttagcatcttcactagggtaaagaagaacaaaaagaatgttgctggaacgtaaaatagtatttaaaagttaatgaacacttctctagttttcttagttatggccttaataattagtctcttggcttaaatgtccactggttttactttgacacagttgaacaacactggggttaagtctctggtatttaggctggcaatatatatattaaccatattttaaaagtaccaattttgtttttacagaaaagataaaactcaaaagagaacagtgtattccttctgaggggcttttataaattattaactataatatatgatggattttttcctaattttttatatttccttacaattttggtggccattaatttaactttaggcttttgggcatatgctagtctgagcttccgaaaagatacatatatgtttcccttttcattagctgaatgaggatattttaagaagttgaaagagaatttattttcaagttgtgagtaaatcctcctttgaaattcacctgattattagataacttaaagtttatttttaaaagctgacaactttttatgaatcttcgagttgacagttcctaaaagcgtaactcagatattaatgggctgtgtattaaatggttttattttcagttttgcagcacagaacactgttgaaatatccatatcaacttgatttttttaacctaattcaggtgtcctttgcatctcttaaatgttgggggtgggggtcagagccagttatccggcttctgttttgtcgattgcttagatttgttcctgttgtcaaaactgttacccccaaaattggtgtgacacatgctcatgcataaaatgttaaaatgagtacatccttgtatttgtatttgttttcaacatcgccaaggtgctatgggaaattaacaaaattagaaaaaaaataaaattattaaaaagcagaaaaaaaaaaaaaaaaaa

SEQ ID NO: 1424 - protein, 653 aa, Homo sapiens
MLLFVEQVASKGTGLNPNAKVWQEIAPGNTDATPVTHGTESSWHEIAATSGAHPEGNAELSEDICKEYEVMYSSSCETTRNTTGIEESTDGMILGPEDLSYQIYDVSGESNSAVSTEDLKECLKKQLEFCFSRENLSKDLYLISQMDSDQFIPIWTVANMEEIKKLTTDPDLILEVLRSSPMVQVDEKGEKVRPSHKRCIVILREIPETTPIEEVKGLFKSENCPKVISCEFAHNSNWYITFQSDTDAQQAFKYLREEVKTFQGKPIMAPFPNGSFVNGFNSPGSYKTNAAAMNMGRPFQKNRVKPQFRSSGGSEHSTEGSVSLGDGQLNRYSSRNFPAERHNPTVTGHQEQTYLQKETSTLQVEQNGDYGRGRRTLFRGRRRREDDRISRPHPSTAESKAPTPKFDLLASNFPPLPGSSSRMPGELVLENRMSDVVKGVYKEKDNEELTISCPVPADEQTECTSAQQLNMSTSSPCAAELTALSTTQQEKDLIEDSSVQKDGLNQTTIPVSPPSTTKPSRASTASPCNNNINAATAVALQEPRKLSYAEVCQKPPKEPSSVLVQPLRELRSNVVSPTKNEDNGAPENSVEKPHEKPEARASKDYSGFRGNIIPRGAAGKIREQRRQFSHRAIPQGVTRRNGKEQYVPPRSPK

SEQ ID NO: 1425 - DNA, 8715 bp, Homo sapiens
acgtgacctttgctcatggcggcggcggcggcggcggcggtgctggtggtgctcggcggccggagccggatcctgtagccgggtgtgggcccgtgtctgtccgtccctccttcggccccctctcttgtcttccggagtgtggctggcggagctgggatggcggaacgaggcctggagccgtcgccggccgcggtggcggcgctgccgcctgaagtgcgggcgcagctggcggagctggagctggagctctcggagggggacatcacccagaagggctatgaaaagaaaaggtccaaactcctatctccttacagcccgcagacacaagaaactgattcagcagtacagaaagaacttagaaaccagacacctgctccatctgcagctcaaacttctgctccctctaagtaccaccgaactcgatctgggggagccagggatgaacgatatcgatcagatatccacacagaagcagttcaggctgcactggcaaagcataaagaacagaagatggctttgcccatgccaaccaaaaggcgatccacatttgttcagtctcctgcagatgcctgcacacctcctgacacatcttcggcctctgaggatgagggctctctgagacgccaagctgcgctctctgctgccttgcaacagagcttacagaatgctgagtcctggatcaaccgttcaattcagggatcgtccacttcttcatccgcatcttctacgctgtcccacggagaggtcaaaggaaccagtgggtctctagctgatgtatttgccaatactcgaatagagaatttctctgctcctcctgatgtcactacaactacctcttcctcctcatcatcttcctcaattcgcccagcaaacattgacctgcccccctcggggatagttaaaggcatgcacaaaggatccaacaggtccagccttatggatacagctgatggtgttcctgtcagtagcagagtatctacaaaaatccagcagcttctgaacactctgaaacgacccaaaaggcctcccttaaaggaattttttgtggatgactctgaagaaattgtggaagtacctcagccagaccccaaccagcccaagccggagggacggcagatgacccctgtgaaaggagagcctttaggagtcatctgtaactggcctcctgctcttgaatctgccctgcagcgctggggtaccactcaagcaaaatgctcctgtctgactgcactggacatgacagggaaaccagtttacactcttacatatggaaagttgtggagcagaagtttaaagttggcctacacacttcttaataaactggggaccaaaaatgaacctgtgttaaaacctggagacagggtagccctggtttaccccaacaatgatccagtcatgtttatggtggctttctatggatgcctcctggcagaagtgattccagtgcctatagaggtacctcttaccagaaaggatgctggaggtcagcagattggcttcttgctaggaagctgtggtattgccttagctcttaccagtgaagtttgtctaaaaggactgccaaaaacccagaatggagaaattgtacagtttaaaggttggccccggctcaaatgggttgtaacagattccaagtacctttcaaagccaccgaaagactggcagccacacatctcacctgctgggacagaaccggcatacattgagtataaaacaagcaaagaagggagtgtaatgggagttacagtatcccggcttgcaatgttgtctcactgccaagctctgtcgcaggcctgcaattattctgaaggggaaacaatagtaaatgtcttagactttaagaaggatgctgggctgtggcacggcatgtttgcgaatgtaatgaataagatgcacacaatcagcgtaccctactctgttatgaaaacctgtcctctctcttgggtccaaagagtacatgctcacaaagccaaggtagctttagtaaaatgtcgggacttgcactgggctatgatggcacatcgggaccaaagagacgtgagcttgagttccctccgaatgttaattgtgactgatggagctaacccctggtccgtgtcatcctgtgatgccttcctgagtctgttccaaagtcatggactgaagcctgaggccatctgtccgtgcgccacgtctgctgaagccatgactgtagcaatccgcaggcctggagttccaggagcccctttgccaggaagagccattctctcaatgaatggattgagctatggggtaatacgggtcaatactgaagataaaaattcagcactgacggtccaggatgtagggcatgtaatgcctggtgggatgatgtgcattgtgaaaccagatggacctccccagctctgcaaaacagatgaaattggagaaatctgtgttagctccagaactggaggcatgatgtactttgggcttgctggtgtgacaaaaaatacatttgaggtaattccagtgaattctgcaggctctcctgttggggatgtgccattcatccgatcaggattgctggggtttgtagggccgggtagtttggtgttcgtggttgggaaaatggatggcttactgatggttagtggtcgaagacataatgctgatgacattgttgctactggattggctgtagaatcaataaagactgtttatagaggaagaattgctgtgttttctgtgtctgtattttatgatgagcgcattgtggtggttgcggaacaaagacctgatgcttctgaggaagatagtttccagtggatgagccgcgtgctgcaggcgatcgatagcattcatcaagtgggggtttattgtcttgctctggtgccagccaatacattgccaaaaactccactaggaggaatccatatatctcagacgaaacaactctttctggagggatcactgcatccttgcaacatcctcatgtgcccccatacatgtgtgacaaacttgccaaagccccggcaaaaacaaccaggtgtaggccctgcttccgtgatggttgggaatctggttgctggaaaacgtatagcacaagctgctggaagggatctgggacaaatagaagagaatgatttggtgaggaagcaccagtttctggcagagatcctacagtggcgagcccaggcgactcctgaccatgtactcttcatgctgttaaatgccaagggaaccactgtatgcacagccagctgccttcagcttcataagcgagcagagaggattgcatctgttcttggtgataagggacatctaaatgcaggagataatgtggtgttgctctatccacctggcattgagttaatcgccgccttctatggctgcctgtatgcgggctgtatacctgtgaccgtcagacctccacatgctcagaacctcacggccacgctgcccactgtccgaatgattgttgatgtcagcaaagcagcctgtattctcaccagtcagaccctaatgaggctactgaggtcccgagaggcagcagcagctgtggatgtgaaaacctggccaaccatcattgacacagatgatttacccaggaaaaggttacctcagctgtataaaccgcccactcctgagatgttggcatatcttgattttagtgtctccacaactggcatgcttacaggagtgaagatgtcccactctgcagtgaacgctctgtgtcgagccatcaagctccagtgtgagttgtactcttctcggcagatcgccatctgccttgacccttactgtggacttggcttcgcgctctggtgtctctgcagtgtctattcaggccaccagtctgtcttaattcctcctatggagttagagaacaaccttttcctctggctctccacagtcaaccagtacaaaataagggacactttctgctcctattcagtgatggagctctgcaccaaaggtcttgggaaccaagtggaagtgctaaagaccagagggatcaacctctcctgcgtccggacctgtgtggtggtggcggaggagaggccccgcgttgcactccagcagtccttctctaagctcttcaaagacatcgggctgtccccgcgggctgtcagcaccacttttggatcaagagtcaatgtagcaatatgtttacagggaacctcagggcctgatccgactactgtgtatgtggatctgaaatcactaagacatgacagggttcgtctcgtggaacgtggcgcccctcagagtttgcttctctcagagtctggaaagattttacctggagtgaaagtggttattgttaatcctgagaccaaagggccggttggagactctcaccttggagagatttgggtgaacagtccccatacagccagcggctactacaccatctatgatagcgagactcttcaagctgatcatttcaacactcgcctcagctttggagatgcagctcagacactctgggctcggacaggataccttggttttgtccgccggaccgagctcacagcggccactggagagcgtcatgatgcattgtatgtggtgggagcgctggatgaaacactggagctgagaggattacgataccacccaattgatattgagacctcggtgtcccggatccacagaagcattgctgaatgtgccgtgttcacatggaccaacttgcttgtggtggttgtggaactgtgcggctctgaacaggaagccctagatctggtcccattagtgaccaacgtggtcctggaagagcattacctcatcgttggcgtcgtggttgtggtggacccaggtgtcatcccgatcaactccagaggagagaagcagaggatgcacctccgtgatagcttcctagctgaccagttagaccccatctacgtggcttataacatgtaaccagccttgtggggactgcagtgggccattctgaagaatcacaaagacagaagacctctggctaagagcaggcttcaaacgatgtgaaataagctgagatggctacatgatattcttcatctcatcctgtgggattctgcaatcataaaacacaggaaaggggaattctgtgatggcaaatgaaaaaaatgttaacatttggtagacatgtgctttgacatagcgtgagcagcacattactaaagcaattacatgcatgttgcatttttttcatctgttgtacatagttgtatttttatctaatgccattttagaattttctaagggaatttaatgaattcacatgaaaggggtagtctgagtgacacagttccccactccgtactgtattttgccattctgccgtagctagatgttctgtggggtttgttaacatggaactactcagctttctttcagtcaacccataagcaaatcagataacccactgactatgagaattactttatatagataattcttgactgtaaaacattttgaccagtgttttacaacatgtacataagaatacacataattcaactagagatttgaagaattggcttgtatagttataacaaccacagtagaaacatttctactttgagagaatttcaatattctcttaatgttgtgtaattgattaggtaactaaaaagcgcaaattgttggcaggttttgctgcacattgttctatgtctttgttggctggtgtattttataaactaaagctgcctatgtttctttttaaagctcgcattcccagaatcagcttaggcttctatgaattcagcctgtttctaaaagctgaaaatctcagtttaaaaatcaaaatgttaacacaaagctaagattcatcagagcccaccctattctaaggaaccacaataacttactctggccccagtgttaaaacgatctttcagatttagagtgactatgtaagaatttaggatttcctcttttccaggcacattgtaaactgtgtctacagtttatccatataacttctcttctgaaaactgaggagtgtcctctgttcttccagttcacgagggcagggggtttaaaacaagaatgataggccaggaaggcagtggggatccaccatcacatggaactgtaaggccatataactacacaaaactgaccaatctgggttgccaaagcagccaggcttatgctgaaaccggggaagtctgacatatgcaggaaactcttttgaaataactttggtgcccaggccaagtagaatgagatgagactgagtttggcctctggctcggtttcctttctttggtctgatacttcatgtatttgaatatagttaaatcgtattatttttttcttaacagaaatatttttaaaaatgaaaaagtactcaaaagtgagaagagttaacttgtcaaagcagaatggttctctttgacccactctggtctattgtgtaaatatttatttagactattttaataatacatattatttaccccactgtaacatcatgtaaactaagtatgtttttaaacaatttttaagacttgtaattaccctgaaaataaggtttataatgcaaagaccagctcctttgcggtggcagtgctctagggctgccattacacggtcttgtgatgtgactaaaagccactttgtgactcccttcatgtaatcctcttttcctccccactcctccacagagggcagagctcaggacatttgccagttccagatctctttttcagcattttcatggaattaatttacacgtaatgagggaagtcctaggatggatagaaaaaaagcacttacattggggcacacaggaaatcccagtgtctagcaatggtttggtttgcagagaacacagcctgatacttaattttcttaaaactatttttaatgatccactaaacaaagcaggggatcctgaagctgatataaataagtctagctctataatccccaagttctaaaagttatggttagatgctattctgtgggttgctttgataattcttactaacacagattagggtataggcatctagagatgcactgtccactgtaaatactataatgagagccacatctgtaatttaaatgtttctagtaaccacatttttttaaaagtaaaaagaaacccatggtattgatttaaatatattttatttaacccaatagctcaaaaacactatcatttcaacataggatcaatataaaaattattaatgagttattttactttttttcatattaggcctttgaaattcagtgtgtattaaacacatctcaattcaaaccatcaccatatttcaagtctttgtagccaaatgtgactagtggctaccatattagacagtgcagatctatactcattccttcaaatacattactctgttaatctcaaagtgtggccaactcccatttacttagaggctgattatctagttttgtagttcctcaggcctctaatttattttttgctttctgctttattgatcttttgcatgtcccccaaagccagaatctgctcatggaggaaggaaggctaagaactgtccttgaggaacttcatcagtaactctggtaaagcatcctgtggagggagaggagagcccagtcatttgcttagatggtgtttgtgggatcacctgcagatttaaagcctactctgccacagactcgagtaagaaaatgttctcttgatgacacagtgctcctactctatccacattaagtagcacttttgtggtagaactgattcttaaggcaggcctgaaaggccattactaatagaaacacagcctttccaatcctctggaacatattctgtctgggtttttaatgtctgtggaaaaaaactaaacaagtctctgtctcagttaagagaaatctattggtctgaaggtttctgaacctctttctggttctcagcagaagtaactgaagtagatcaggaaggggctgcctcaggaaaattcctagatcctaggaattcagtgagaccctgggaaggaccagcatgctaatcagtgtcagtgaatccacagtctttacttcctgcctcataaagggccaggtctccccagtaccaagtcctttcctcatgaagttgtgttgcctcaggctgtttagggaccattgcctgtcttggtcacatgagtctgtctccttactttagtccctgggcaatccttgcttaatgcttttgttgactcaacaagggcccgaggccttaggttttctattaaggtctctgccccaggcatggtgctctatatcttggccaaataaattactttccttgaatatccaggaatcttttagtctaaagcaatgaggagttatcacctcatcctcaaactccaacaagatctatgccttagtgttgtttttgttgtctgctttgatgtaaaagcaagagtatttggagcaagaagctgcaatgcgccaaatacacaataggccttttctttatcattcatacgacatttctggtttaggtgtatgtagttgggccatgttacttgtccagaggaagagactaaagatataagaataattttttagtcctaaatgctgttttgtttactttctgtcaagatatttacccgtgtcaaattcaaactacagtactgtgtaattatgtataaagtttttttatttatttgaagttagactagatatacgtttttaaatttaacatctggctggacagtgttctattaactcattgaatgtgtttcctttgtcttgtgttaataaatattgatgcctgattctgtttaa

SEQ ID NO: 1426 - protein, 1576 aa, Homo sapiens
MAERGLEPSPAAVAALPPEVRAQLAELELELSEGDITQKGYEKKRSKLLSPYSPQTQETDSAVQKELRNQTPAPSAAQTSAPSKYHRTRSGGARDERYRSDIHTEAVQAALAKHKEQKMALPMPTKRRSTFVQSPADACTPPDTSSASEDEGSLRRQAALSAALQQSLQNAESWINRSIQGSSTSSSASSTLSHGEVKGTSGSLADVFANTRIENFSAPPDVTTTTSSSSSSSSIRPANIDLPPSGIVKGMHKGSNRSSLMDTADGVPVSSRVSTKIQQLLNTLKRPKRPPLKEFFVDDSEEIVEVPQPDPNQPKPEGRQMTPVKGEPLGVICNWPPALESALQRWGTTQAKCSCLTALDMTGKPVYTLTYGKLWSRSLKLAYTLLNKLGTKNEPVLKPGDRVALVYPNNDPVMFMVAFYGCLLAEVIPVPIEVPLTRKDAGGQQIGFLLGSCGIALALTSEVCLKGLPKTQNGEIVQFKGWPRLKWVVTDSKYLSKPPKDWQPHISPAGTEPAYIEYKTSKEGSVMGVTVSRLAMLSHCQALSQACNYSEGETIVNVLDFKKDAGLWHGMFANVMNKMHTISVPYSVMKTCPLSWVQRVHAHKAKVALVKCRDLHWAMMAHRDQRDVSLSSLRMLIVTDGANPWSVSSCDAFLSLFQSHGLKPEAICPCATSAEAMTVAIRRPGVPGAPLPGRAILSMNGLSYGVIRVNTEDKNSALTVQDVGHVMPGGMMCIVKPDGPPQLCKTDEIGEICVSSRTGGMMYFGLAGVTKNTFEVIPVNSAGSPVGDVPFIRSGLLGFVGPGSLVFVVGKMDGLLMVSGRRHNADDIVATGLAVESIKTVYRGRIAVFSVSVFYDERIVVVAEQRPDASEEDSFQWMSRVLQAIDSIHQVGVYCLALVPANTLPKTPLGGIHISQTKQLFLEGSLHPCNILMCPHTCVTNLPKPRQKQPGVGPASVMVGNLVAGKRIAQAAGRDLGQIEENDLVRKHQFLAEILQWRAQATPDHVLFMLLNAKGTTVCTASCLQLHKRAERIASVLGDKGHLNAGDNVVLLYPPGIELIAAFYGCLYAGCIPVTVRPPHAQNLTATLPTVRMIVDVSKAACILTSQTLMRLLRSREAAAAVDVKTWPTIIDTDDLPRKRLPQLYKPPTPEMLAYLDFSVSTTGMLTGVKMSHSAVNALCRAIKLQCELYSSRQIAICLDPYCGLGFALWCLCSVYSGHQSVLIPPMELENNLFLWLSTVNQYKIRDTFCSYSVMELCTKGLGNQVEVLKTRGINLSCVRTCVVVAEERPRVALQQSFSKLFKDIGLSPRAVSTTFGSRVNVAICLQGTSGPDPTTVYVDLKSLRHDRVRLVERGAPQSLLLSESGKILPGVKVVIVNPETKGPVGDSHLGEIWVNSPHTASGYYTIYDSETLQADHFNTRLSFGDAAQTLWARTGYLGFVRRTELTAATGERHDALYVVGALDETLELRGLRYHPIDIETSVSRIHRSIAECAVFTWTNLLVVVVELCGSEQEALDLVPLVTNVVLEEHYLIVGVVVVVDPGVIPINSRGEKQRMHLRDSFLADQLDPIYVAYNM

SEQ ID NO: 1427 - DNA, 1568 bp, Homo sapiens
aggcttgtgtagatcatgccgccagtagcggccctgactgccgaggaaacggtagcttaggacagttggctgttaagtgacactgattctccccgccccgcctgacccccgagaaggaggcttgtcccccgctgcgtgagggggtggggaagtgggtagtgaattcggatctacctgggaggggggagtggaagttcccgccccggagagcggcgaggcggcagccacagttgattatggaagattcccacaagagtaccacgtcagagacagcacctcaacctggttcagcagttcagggagctcacatttctcatattgctcaacaggtatcatctttatcagaaagtgaggagtcccaggactcatccgacagcataggctcctcacagaaagcccacgggatcctagcacggcgcccatcttacagaaaaattttgaaagacttatcttctgaagatacacggggcagaaaaggagacggagaaaattctggagtttctgctgctgtcacttctatgtctgttccaactcccatctatcagactagcagcggacagtacattgccattgccccaaatggagccttacagttggcaagtccaggcacagatggagtacagggacttcagacattaaccatgacaaattcaggcagtactcagcaaggtacaactattcttcagtatgcacagacctctgatggacagcagatacttgtgcccagcaatcaggtggtcgtacaaactgcatcaggagatatgcaaacatatcagatccgaactacaccttcagctacttctctgccacaaactgtggtgatgacatctcctgtgactctcacctctcagacaactaagacagatgacccccaattgaaaagagaaataaggttaatgaaaaacagagaagctgctcgagaatgtcgcagaaagaagaaagaatatgtgaaatgcctggaaaaccgagttgcagtcctggaaaatcaaaataaaactctaatagaagagttaaaaactttgaaggatctttattccaataaaagtgtttgattcctaagaaagaaaatatttttgtggacatgcataaaaattaaatggatttcctagtggagttttataaattaaaaggtcaaaactgaagctttttatttaggcttttccaaatcaaggataaatatcttacgcacgatatctagtgacagaggagaaagtggaaaatgacctcaaggaagctacgggcacaactggaagctttgtagaaattaaacatattcaaggagcaagaaatgaactttcagcagtctaaattttctaaataaccaatagttgccaatctaaaatggcagagaagatgaaatttgataaactgaattttttttaaaaatccatttaccctacaggtttgcatttgtttgctgaaatttacctttttttagttatatatatgtgtgtgtgtgtgtgtaatttctgccaataaattctaaattacaaaggtaagagaaaacctagtacattactaaatatataaagtatatgttctgattatgtaaaaaaaaaaaaaaaaaa

SEQ ID NO: 1428 - protein, 271 aa, Homo sapiens
MEDSHKSTTSETAPQPGSAVQGAHISHIAQQVSSLSESEESQDSSDSIGSSQKAHGILARRPSYRKILKDLSSEDTRGRKGDGENSGVSAAVTSMSVPTPIYQTSSGQYIAIAPNGALQLASPGTDGVQGLQTLTMTNSGSTQQGTTILQYAQTSDGQQILVPSNQVVVQTASGDMQTYQIRTTPSATSLPQTVVMTSPVTLTSQTTKTDDPQLKREIRLMKNREAARECRRKKKEYVKCLENRVAVLENQNKTLIEELKTLKDLYSNKSV

SEQ ID NO: 1429 - DNA, 1475 bp, Homo sapiens
acctgccgccatcttgctcaccagcctccaaaatgcggctggggctcctgagcgtggcgctgttgtttgtggggagctctcacttatactcagaccactactcgccctctggaaggcacaggctcggcccctcgccggaaccggcggctagttcccagcaggctgaggccgtccgcaagaggctccggcggcggagggagggaggggcgcatgcaaaggattgtggaacagcaccgcttaaggatgtgttgcaagggtctcggattatagggggcaccgaagcacaagctggcgcatggccgtgggtggtgagcctgcagattaaatatggccgtgttcttgttcatgtatgtgggggaaccctagtgagagagaggtgggtcctcacagctgcccactgcactaaagacgctagcgatcctttaatgtggacagctgtgattggaactaataatatacatggacgctatcctcataccaagaagataaaaattaaagcaatcattattcatccaaacttcattttggaatcttatgtaaatgatattgcactttttcacttaaaaaaagcagtgaggtataatgactatattcagcctatttgcctaccttttgatgttttccaaatcctggacggaaacacaaagtgttttataagtggctggggaagaacaaaagaagaaggtaacgctacaaatattttacaagatgcagaagtgcattatatttctcgagagatgtgtaattctgagaggagttatgggggaataattcctaacacttcattttgtgcaggtgatgaagatggagcttttgatacttgcaggggtgacagtgggggaccattaatgtgctacttaccagaatataaaagattttttgtaatgggaattaccagttacggacatggctgtggtcgaagaggttttcctggtgtctatattgggccatccttctaccaaaagtggctgacagagcatttcttccatgcaagcactcaaggcatacttactataaatattttacgtggccagatcctcatagctttatgttttgtcatcttactagcaacaacataaagaaattctgaaggctttcatatctttattttgcattgtgtccctttctatgttctatataatgaacatcatttattcttctagcaattaattgcctacattagagatttcatgtgaacattttatgggctataagtattgtgacagatatacaattgtaattttggcactgaatcacatgtctccttgaaatatcttgattattttataatcataattctgtatctggaatactcatagagtttgtacaaaatattcagttaaacatatatgtgtataaatgccaaataatagtttataattaaaatgaaagctgtcatttggttaaattaataaaaattctttcttagattttattctaaaaaaaaaaaaaaaaaaagaaaaaaaaaaaaaaaa

SEQ ID NO: 1430 - protein, 348 aa, Homo sapiens
MRLGLLSVALLFVGSSHLYSDHYSPSGRHRLGPSPEPAASSQQAEAVRKRLRRRREGGAHAKDCGTAPLKDVLQGSRIIGGTEAQAGAWPWVVSLQIKYGRVLVHVCGGTLVRERWVLTAAHCTKDASDPLMWTAVIGTNNIHGRYPHTKKIKIKAIIIHPNFILESYVNDIALFHLKKAVRYNDYIQPICLPFDVFQILDGNTKCFISGWGRTKEEGNATNILQDAEVHYISREMCNSERSYGGIIPNTSFCAGDEDGAFDTCRGDSGGPLMCYLPEYKRFFVMGITSYGHGCGRRGFPGVYIGPSFYQKWLTEHFFHASTQGILTINILRGQILIALCFVILLATT

SEQ ID NO: 1431 - DNA, 1182 bp, Homo sapiens
cctgagccaggaggaagcagcggcgaggtctgcgggaggcatggcgggagctccggacgagcgccggcggggccccgcggcaggggagcagctgcagcagcaacacgtctcttgccaggtcttccccgagcgtctggcccaggggaatccccagcaagggttcttctccagcttcttcaccagcaaccagaagtgccagcttaggctcctgaagacgctggagacaaatccatatgtcaaacttctgcttgatgctatgaaacactcaggttgtgctgttaacaaagatagacacttttcttgcgaagactgtaatggaaatgtcagtggaggttttgatgcttcaacatctcagatagttttgtgccagaataatatccataatcaggcccatatgaacagagtggtcacacacgagcttattcatgcatttgatcattgtcgtgcccatgtcgactggttcaccaacatcagacatttggcgtgctcagaggttcgagctgctaaccttagtggagactgctcacttgtcaatgaaatattcaggttacattttggattaaaacaacaccaccagacttgtgtgcgagacagagccactctttctatcctggctgttaggaatatcagcaaagaagtagctaaaaaggctgttgatgaagtttttgaatcttgtttcaatgaccatgaaccttttggaaggatcccacataacaagacttatgcaagatatgctcacagagactttgaaaaccgtgatcggtattattcaaatatatgagcacaatgacatttttatattacagagcttccatcatcatgaagaaaaaaaaatttggttctcaagtgaacaaacatataaaatgtaaacaatccctacaatccagataaaacagagaagactgtgattctagcatattatcagaaaaagtaactatggcaaaaaatgaaactgctttaaactccaaggcagaaattgtatctttatagctaaccatttagtaaataaatacattacatttttgtattttagtcatttgtttttattacatgtgattattttaaaatttgattatgaaacctgtgaagtgtgctcttccatgatgttgataggtgaccactgttggtatttacattaaatgtaaagaaatgtgtactgaaaaaaaaaaaaaaaaaaaaaaa

SEQ ID NO: 1432 - protein, 246 aa, Homo sapiens
MAGAPDERRRGPAAGEQLQQQHVSCQVFPERLAQGNPQQGFFSSFFTSNQKCQLRLLKTLETNPYVKLLLDAMKHSGCAVNKDRHFSCEDCNGNVSGGFDASTSQIVLCQNNIHNQAHMNRVVTHELIHAFDHCRAHVDWFTNIRHLACSEVRAANLSGDCSLVNEIFRLHFGLKQHHQTCVRDRATLSILAVRNISKEVAKKAVDEVFESCFNDHEPFGRIPHNKTYARYAHRDFENRDRYYSNI

SEQ ID NO: 1433 - DNA, 387 bp, Homo sapiens
atgtgtaagcaggatctcagcgttctgcacaccaaggaaatgtgcttcctgagggagtgggtggagagcatggggagtaaagtgccacctgctagtcagaaagctaaatcagaagaaaataccaaggaagaaaaatctggtagtaagaatgtggaggaagacttaaaggcagatgaaccatccagtaaggaaagttatctagaaattaataatgaaggtgtgattgaaccagacactgatgcccctcaagaaatgggagatgaaaatgcagagataacagaggagatgatggatcaggcaaatgataagaaagtggctgctgttgaagccctaaatgatggtgaactgcagaaagccattgacttatcacagattccatcaagctga

SEQ ID NO: 1434 - protein, 128 aa, Homo sapiens [sequence omitted]

SEQ ID NO: 1435 - DNA, 622 bp, Homo sapiens
atggctaaattacatactccagtaacggtggatgttgttcattgtttgtcaccacaaaaaggacagattttttctagatatgacatttggttcgggagggcacacaaaagccattctacagaaggagtcagatattgttctgtatgccttggacacaaacccgacagcttatgcattagctgaacatctttcagagttgtatcctaaacaaatccgagctatgctgggccagttcagccaggcagaagccttgttaatgaaagctggagtgcagccagggacttttgatggagttcttatggatcttgggtgttcctccatgcaacttgatactcctgaaagatttttccctttggaaagatggccccttggacatgaggatggatggtagcagatcaacaggcacttgcttctatcctcagaacatacggggaggagaagcatgccaagaaaatcgcttcagcaattgttcaggcacgcagcatctgcctcagcagcttgccaacatcgtcgcaggtgcatttcctctctctgctatttatgcacgaaaagacttgctatagcgacctacccatattgccaccaagactttccaggctcttcgcatatttgtgaacaatga

SEQ ID NO: 1436 - DNA, 3818 bp, Homo sapiens
atggaccgcttcctgggttttgtcaaggcgataagaagatctaggagaagaaaggggaaaaagtaccgaccagaagaggattaccacgagggctatgaggatgtctattattacgcttcagagcattttcgaaatgagagtccctacactaaatccgccagccagacaaagccgcctgatggagcgttggctgtgaggagacagagcatcccagaggaattcaagggctccacagtcgtcgagctgatgaagaaggaaggcactaccctgggtctgacggtatcgggaggaattgataaggatggcaagccaagagtatctaatctgcggcaaggaggaattgctgctagaagtgaccagctggatgtgggtgactacatcaaagcagtgaatggaatcaacctggccaaattccgccatgacgagatcatcagcttgctgaagaatgtgggagaaagagtggttcttgaagtagagtacgagcttccaccggtctctgtgcaaggatcaagtgttattttccgaacagtggaggtcacattacataaagaaggcaatacctttggttttgtaattcgagggggagcacatgatgatagaaataaatctcgtccagttgtgataacatgtgttcgtcctggagggcctgctgacagagagggcacgatcaaacccggtgacaggttgctcagtgtggatggaattcggcttcttggaactacgcatgctgaagccatgagtattcttaaacaatgtggacaagaagcagcactgctgatagaatatgatgtctcagtaatggactctgtggcaacagcatccgggccactactagtcgaagttgccaaaactcctggtgccagccttggggttgccctaactacctcgatgtgctgtaacaaacaagtcattgtcatagacaaaatcaaatctgcaagtattgcagacagatgtggcgcattgcatgtgggagatcacatcctctccatcgatggaaccagcatggagtactgtacacttgcagaagcaacccagttcctggccaacaccactgaccaggtcaagcttgagatccttccccatcatcagacccggctggccctaaaggggcccgaccatgtgaaaattcagaggagcgacaggcaacttacctgggattcctgggccagcaaccacagcagccttcacaccaaccatcactataacacgtaccaccctgaccattgcagagtaccagccctgacattcccgaaagcacctcctccaaacagccctcctttggtgtcttcatccttctctcctacctccatgagtgcatacagcctgagttccctgaacatggggactctacctcgaagcctctactccaccagcccacgtggaaccatgatgaggaggagactgaaaaagaaagacttcaaaagctcattgtccttagcctccagcacagtaggattggctgggcaggttgttcacacagaaaccacagaggttgtgctgacggcagatcctgtcacaggatttgggatccaactgcagggcagtgtgtttgccacagaaactctctcttctccacctctgatttcctatatcgaagctgacagcccagcagagagatgtggggtgctacagattggagacagagtgatggccatcaatggaattccaacagaagacagcaccttcgaagaagccagtcagctcctccgagactcttcaatcacgagcaaggtcacactggaaatcgagtttgatgttgcagagtctgtcatcccaagtagtggaacatttcatgtaaagctgcctaagaagcacaatgtggaacttggaataaccataagttcaccatccagtagaaaaccaggagaccccctcgtcatttcagatatcaagaaagggagtgtggcacacagaactgggaccctggaacttggggataaattgctcgcaatagataatatccggctggacaactgttccatggaagatgcagttcagatcctccagcaatgtgaagacctggtgaagctcaaaatccgcaaagatgaagataattcagatgagcaagaaagttccggagcaattatttacaccgtggagcttaaacgctacggggggccccttggcatcacaatttcaggaactgaagagccgtttgatcctataatcatttcaagcctcactaaagggggattagctgaaagaactggcgcaatccacataggagaccgaatcctagccatcaatagcagcagcttgaaagggaagcctctgagtgaagccatccatttgttacagatggcaggagagactgtcaccttgaaaattaagaaacagacagatgcatcgagccccaagaagttccctatttctagccatttgagtgacctgggggatgtggaggaggactcctcaccagcacagaagccaggcaagctctccgacatgtacccctccacggtgcccagtgtggacagtgctgtggattcatgggatgggtctgcaatagacaccagctatggaactcaaggcactagttttcaggcctcaggatacaatttcaacacctatgactggaggagtccaaaacagagaggcagcttgtccccagtcactaagcctcgaagccagacttacccagatgtggggctgagttatgaagactgggaccggtccacagccagtggttttgcaggggctgccgatagtgcagagacagaacaagaggagaacttctggtctcaagcgctggaggatttggaaacctgcggacagtcaggaattctgagagaactggaggcaacaatcatgtcggggagcacgatgagtttgaatcatgaggctccaacacctcgcagtcagctggggcgacaggccagcttccaggagcgcagcagctcgcggccgcactacagccaaacaactcggagcaacaccctgccttcagatgtgggtaggaagtcagtaaccctgagaaaaatgaaacaagaaataaaggagatcatgtctccaactcctgtggagctgcacaaggtgaccttgtacaaggactctgacatggaggactttgggttcagtgtagcagatggcttactggagaaaggagtgtatgtcaaaaatattcgcccagctgggccaggagatcttggtggcttaaagccctatgacaggctcttacaggtgaatcatgtccgaaccagagactttgactgctgccttgttgtgcccctcatagcagaatccgggaataagctggacctggttattagtagaaacccactggcttcacagaagtctatagaccaacagagtctaccaggagattggagtgaacagaacagtgcttttttccagcagcctagccacggtggtaatttggagacacgagaacccactaatacattatagcaacgctttttataaagcaggacaaaagacaatatctacatggtgctaaaaatcctttaagatttctgtgacctttgaagcacagataatcaatcaacgtggcattaactgcaagcacaggggtcttttaaatctctctcatggctcatgttcacttcccttttcaagttgaagaggtttcttttttggtgaccactatggtatatggtgggcaatgccctgccagtcccaacggtagagaaaaataggccgtcccccacaactctacaattaacatcagaggaaattttttacaagttcatcttactatcactttttaaaaagagaaacatctgtttgaaaatattctctgtgatgatttccttaattcactttgaaatcagtttcttactatgaagtcattaatgtaa

SEQ ID NO: 1437 - protein, 1135 aa, Homo sapiens
MDRFLGFVKAIRRSRRRKGKKYRPEEDYHEGYEDVYYYASEHFRNESPYTKSASQTKPPDGALAVRRQSIPEEFKGSTVVELMKKEGTTLGLTVSGGIDKDGKPRVSNLRQGGIAARSDQLDVGDYIKAVNGINLAKFRHDEIISLLKNVGERVVLEVEYELPPVSVQGSSVIFRTVEVTLHKEGNTFGFVIRGGAHDDRNKSRPVVITCVRPGGPADREGTIKPGDRLLSVDGIRLLGTTHAEAMSILKQCGQEAALLIEYDVSVMDSVATASGPLLVEVAKTPGASLGVALTTSMCCNKQVIVIDKIKSASIADRCGALHVGDHILSIDGTSMEYCTLAEATQFLANTTDQVKLEILPHHQTRLALKGPDHVKIQRSDRQLTWDSWASNHSSLHTNHHYNTYHPDHCRVPALTFPKAPPPNSPPLVSSSFSPTSMSAYSLSSLNMGTLPRSLYSTSPRGTMMRRRLKKKDFKSSLSLASSTVGLAGQVVHTETTEVVLTADPVTGFGIQLQGSVFATETLSSPPLISYIEADSPAERCGVLQIGDRVMAINGIPTEDSTFEEASQLLRDSSITSKVTLEIEFDVAESVIPSSGTFHVKLPKKHNVELGITISSPSSRKPGDPLVISDIKKGSVAHRTGTLELGDKLLAIDNIRLDNCSMEDAVQILQQCEDLVKLKIRKDEDNSDEQESSGAIIYTVELKRYGGPLGITISGTEEPFDPIIISSLTKGGLAERTGAIHIGDRILAINSSSLKGKPLSEAIHLLQMAGETVTLKIKKQTDASSPKKFPISSHLSDLGDVEEDSSPAQKPGKLSDMYPSTVPSVDSAVDSWDGSAIDTSYGTQGTSFQASGYNFNTYDWRSPKQRGSLSPVTKPRSQTYPDVGLSYEDWDRSTASGFAGAADSAETEQEENFWSQALEDLETCGQSGILRELEATIMSGSTMSLNHEAPTPRSQLGRQASFQERSSSRPHYSQTTRSNTLPSDVGRKSVTLRKMKQEIKEIMSPTPVELHKVTLYKDSDMEDFGFSVADGLLEKGVYVKNIRPAGPGDLGGLKPYDRLLQVNHVRTRDFDCCLVVPLIAESGNKLDLVISRNPLASQKSIDQQSLPGDWSEQNSAFFQQPSHGGNLETREPTNTL

SEQ ID NO: 1438 - DNA, 3989 bp, Homo sapiens
agtgcttagcgttagatttatggaatggctcctcacacagtgtcgtccctgctttgtacaatttggtgctttgttgctatcgaaacggcattactttctaagccattgtgattgtgaagggggaggaggctgtggcaggcaggggtggtagtagtagtgaatgacacagatttgccagatgacatgtagcggacctctgcatcagccaagaggaattaagctttgtcactccccactgggactacctttctcctggtatgtgcgcaaggaattcatatgctgctgctgctgcagccaccagagcagagagccttgagtacactttgccacagaaagcagtgagcaagaatgatagctgtctcttttaaatgccgttgtcaaattctgaggcgacttactaaagatgagagtccctacactaaatccgccagccagacaaagccgcctgatggagcgttggctgtgaggagacagagcatcccagaggaattcaagggctccacagtcgtcgagctgatgaagaaggaaggcactaccctgggtctgacggtatcgggaggaattgataaggatggcaagccaagagtatctaatctgcggcaaggaggaattgctgctagaagtgaccagctggatgtgggtgactacatcaaagcagtgaatggaatcaacctggccaaattccgccatgacgagatcatcagcttgctgaagaatgtgggagaaagagtggttcttgaagtagagtacgagcttccaccggtctctgtgcaaggatcaagtgttattttccgaacagtggaggtcacattacataaagaaggcaatacctttggttttgtaattcgagggggagcacatgatgatagaaataaatctcgtccagttgtgataacatgtgttcgtcctggagggcctgctgacagagagggcacgatcaaacccggtgacaggttgctcagtgtggatggaattcggcttcttggaactacgcatgctgaagccatgagtattcttaaacaatgtggacaagaagcagcactgctgatagaatatgatgtctcagtaatggactctgtggcaacagcatccgggccactactagtcgaagttgccaaaactcctggtgccagccttggggttgccctaactacctcgatgtgctgtaacaaacaagtcattgtcatagacaaaatcaaatctgcaagtattgcagacagatgtggcgcattgcatgtgggagatcacatcctctccatcgatggaaccagcatggagtactgtacacttgcagaagcaacccagttcctggccaacaccactgaccaggtcaagcttgagatccttccccatcatcagacccggctggccctaaaggggcccgaccatgcagctttggtgtcttcatccttctctcctacctccatgagtgcatacagcctgagttccctgaacatggggactctacctcgaagcctctactccaccagcccacgtggaaccatgatgaggaggagactgaaaaagaaagacttcaaaagctcattgtccttagcctccagcacagtaggattggctgggcaggttgttcacacagaaaccacagaggttgtgctgacggcagatcctgtcacaggatttgggatccaactgcagggcagtgtgtttgccacagaaactctctcttctccacctctgatttcctatatcgaagctgacagcccagcagagagatgtggggtgctacagattggagacagagtgatggccatcaatggaattccaacagaagacagcaccttcgaagaagccagtcagctcctccgagactcttcaatcacgagcaaggtcacactggaaatcgagtttgatgttgcagagtctgtcatcccaagtagtggaacatttcatgtaaagctgcctaagaagcacaatgtggaacttggaataaccataagttcaccatccagtagaaaaccaggagaccccctcgtcatttcagatatcaagaaagggagtgtggcacacagaactgggaccctggaacttggggataaattgctcgcaatagataatatccggctggacaactgttccatggaagatgcagttcagatcctccagcaatgtgaagacctggtgaagctcaaaatccgcaaagatgaagataattcagatgagcaagaaagttccggagcaattatttacaccgtggagcttaaacgctacggggggccccttggcatcacaatttcaggaactgaagagccgtttgatcctataatcatttcaagcctcactaaagggggattagctgaaagaactggcgcaatccacataggagaccgaatcctagccatcaatagcagcagcttgaaagggaagcctctgagtgaagccatccatttgttacagatggcaggagagactgtcaccttgaaaattaagaaacagacagatgcccagtcagcatcgagccccaagaagttccctatttctagccatttgagtgacctgggggatgtggaggaggactcctcaccagcacagaagccaggcaagctctccgacatgtacccctccacggtgcccagtgtggacagtgctgtggattcatgggatgggtctgcaatagacaccagctatggaactcaaggcactagttttcaggcctcaggatacaatttcaacacctatgactggaggagtccaaaacagagaggcagcttgtccccagtcactaagcctcgaagccagacttacccagatgtggggctgagttatgaagactgggaccggtccacagccagtggttttgcaggggctgccgatagtgcagagacagaacaagaggagaacttctggtctcaagcgctggaggatttggaaacctgcggacagtcaggaattctgagagaactggaggagaaagctgacaggcgtgtgtctttgagaaacatgactctcttggcaacaatcatgtcggggagcacgatgagtttgaatcatgaggctccaacacctcgcagtcagctggggcgacaggccagcttccaggagcgcagcagctcgcggccgcactacagccaaacaactcggagcaacaccctgccttcagatgtgggtaggaagtcagtaaccctgagaaaaatgaaacaagaaataaaggagatcatgtctccaactcctgtggagctgcacaaggtgaccttgtacaaggactctgacatggaggactttgggttcagtgtagcagatggcttactggagaaaggagtgtatgtcaaaaatattcgcccagctgggccaggagatcttggtggcttaaagccctatgacaggctcttacaggtgaatcatgtccgaaccagagactttgactgctgccttgttgtgcccctcatagcagaatccgggaataagctggacctggttattagtagaaacccactggcttcacagaagtctatagaccaacagagtctaccaggagattggagtgaacagaacagtgcttttttccagcagcctagccacggtggtaatttggagacacgagaacccactaatacattatagcaacgctttttataaagcaggacaaaagacaatatctacatggtgctaaaaatcctttaagatttctgtgacctttgaagcacagataatcaatcaacgtggcattaactgcaagcacaggggtcttttaaatctctctcatggctcatgttcacttcccttttcaagttgaagaggtttcttttttggtgaccactatggtatatggtgggcaatgccctgccagtcccaacggtagagaaaaataggccgtcccccacaactctacaattaacatcagaggaaattttttacaagttcatcttactatcactttttaaaaagagaaacatctgtttgaaaatattctctgtgatgatttccttaattcactttgaaatcagtttcttactatgaagtcattaatgtaa

SEQ ID NO: 1439 - protein, 1076 aa, Homo sapiens
MIAVSFKCRCQILRRLTKDESPYTKSASQTKPPDGALAVRRQSIPEEFKGSTVVELMKKEGTTLGLTVSGGIDKDGKPRVSNLRQGGIAARSDQLDVGDYIKAVNGINLAKFRHDEIISLLKNVGERVVLEVEYELPPVSVQGSSVIFRTVEVTLHKEGNTFGFVIRGGAHDDRNKSRPVVITCVRPGGPADREGTIKPGDRLLSVDGIRLLGTTHAEAMSILKQCGQEAALLIEYDVSVMDSVATASGPLLVEVAKTPGASLGVALTTSMCCNKQVIVIDKIKSASIADRCGALHVGDHILSIDGTSMEYCTLAEATQFLANTTDQVKLEILPHHQTRLALKGPDHAALVSSSFSPTSMSAYSLSSLNMGTLPRSLYSTSPRGTMMRRRLKKKDFKSSLSLASSTVGLAGQVVHTETTEVVLTADPVTGFGIQLQGSVFATETLSSPPLISYIEADSPAERCGVLQIGDRVMAINGIPTEDSTFEEASQLLRDSSITSKVTLEIEFDVAESVIPSSGTFHVKLPKKHNVELGITISSPSSRKPGDPLVISDIKKGSVAHRTGTLELGDKLLAIDNIRLDNCSMEDAVQILQQCEDLVKLKIRKDEDNSDEQESSGAIIYTVELKRYGGPLGITISGTEEPFDPIIISSLTKGGLAERTGAIHIGDRILAINSSSLKGKPLSEAIHLLQMAGETVTLKIKKQTDAQSASSPKKFPISSHLSDLGDVEEDSSPAQKPGKLSDMYPSTVPSVDSAVDSWDGSAIDTSYGTQGTSFQASGYNFNTYDWRSPKQRGSLSPVTKPRSQTYPDVGLSYEDWDRSTASGFAGAADSAETEQEENFWSQALEDLETCGQSGILRELEEKADRRVSLRNMTLLATIMSGSTMSLNHEAPTPRSQLGRQASFQERSSSRPHYSQTTRSNTLPSDVGRKSVTLRKMKQEIKEIMSPTPVELHKVTLYKDSDMEDFGFSVADGLLEKGVYVKNIRPAGPGDLGGLKPYDRLLQVNHVRTRDFDCCLVVPLIAESGNKLDLVISRNPLASQKSIDQQSLPGDWSEQNSAFFQQPSHGGNLETREPTNTL

SEQ ID NO: 1440 - DNA, 4727 bp, Homo sapiens
agctgcagcagccgcgccgccccctcgcccgcggctcccagggtgatcccgagcacagccggtggctcgcggcgcggcagccccagaagacgggaaagttcgcggccggagcgcggagatgccgggcagcgacacggcgctcaccgtggaccggacctactcggaccccggccggcaccaccgctgcaagagccgggtagaacgtcatgacatgaataccttaagcctgcccctgaacatacgccgaggggggtcagacaccaacctcaactttgatgtcccggatggcatcctggacttccacaaggtcaaactcactgcagacagcctgaagcaaaaaattctaaaggtaacagagcagataaaaattgagcaaacatcgcgcgatgggaatgttgcggagtatctgaaactagtgaacaacgcagacaagcagcaggcgggacgtatcaagcaagtctttgagaagaagaatcagaaatcagctcactccatcgcccagctgcagaagaagttagagcagtatcatcgaaagctcagagagatcgagcagaatggagcctctaggagctcaaaggacatttccaaagaccacctgaaggatatacatcgctctttgaaagatgcccacgtgaaatctcgaactgccccccattgcatggagagcagcaaatcgggcatgccaggggtctcacttactccacctgtgttcgttttcaataagtccagagagtttgccaacctgatccggaataagtttggcagcgccgacaacattgctcacttgaaaaattccttagaggagtttaggcaagaggcgagtgccagggcctacgggggcagcgctaccatcgtgaacaaacccaagtatggcagtgatgatgaatgttcgagtggcacgtcaggctcggccgacagtaacggaaaccagtcgtttggggctggtggagccagcacactggacagccagggcaagctcgccgtgatcctggaggaactgagggagatcaaggatacccaagctcagctggctgaggacatcgaggcactgaaggtgcagtttaagagagaatatggttttatttctcagaccctgcaagaggaaagatacaggtatgagcgactggaggaccagctgcatgacctgacggacctgcatcagcatgagacagccaacctgaagcaggagctggccagcattgaggagaaggtggcctaccaggcctacgagcgctcgcgggacatccaggaagccttggaatcctgccagactcgcatttctaagctggagctccaccagcaagagcagcaagctctgcagacagacaccgtgaatgctaaagttctcctggggaggtgcatcaacgtgatcctggccttcatgactgtcatcttagtgtgtgtgtccaccatcgcgaagttcgtctcacccatgatgaagagtcgctgccacattcttggcaccttctttgccgtgactcttcttgctatattttgtaaaaactgggaccatatcctgtgtgccatagaaaggatgataataccaagatgaagccactggttcctgccttcaagttctttcaagtttttattttaaagaaaactctgtgcatactaccaaattttacagtgaatgattgtgcggactcgtgtgtaagaaaaactaggactgtgtggggtaaataactacaattctcttaactcggtagcagttgccaactcagtccttgtacttcgttaacacgaatctgtttcagagctctcctaccttgctcactgccttaatcagaccgatttcctgcccacctgaccagcccagcgtggtaaacctctgtatattgagaccttggcataattggtgatcctgaagaaagaggtctctctcctaagtctctgtcagaattgagcttcacaattgctaatggttgttttctgtgagtcctataaaaagcaaggatatgcatgattcagggaatgaagaatcacaggcttgggcagtgttaaacactgtggcctatggtccccgtgtgatccaccctgcttctctccaggggaccataggtcccgtcatgtactcagtgtccacagcagtcagtcgtgtatgaccctgtaacgtggaaatcttatcacacacctgttatccaacaagtctacctgaggggttttgttacactttaaatgggaaggcatagggatttatgaatggggctttcaccttctcatacccaggcaaccaacacctgattttgtctcaactggctagcaaatgcccagccttcagagtgtgcaggaatgttttcaaatccctcatcagactgtgactttaacattaatttggaatcctgtgagcactactctgaaggtttgtgttttggcaaatctttttttcttttttgagacagggctctgctaaatattgctcaggctggttgcaaactccttgcttcaagggatcctcccacctcagcctcccaagcagccgggactgcaggcacaagccaccatgcctggctgttttttggcaaatcttgattgtgataagcccccctggaggatatgattcactttatgtgattcatcttattcacaggtctgtgagggactgcgaagcttactcaggaaatgaaaacaaatgatggtcatgttgcagttttttccttgaaggacaaccgaaccatagcctctaaagttcaagtgcactgaggtgtcggaacgctgaaagcatgaggaaacgaggacgtagggtgtgactgaatggtggctagattagtgggagcagttcacctggatgaagattgagagcatcgtctttgagaagtgaaagactagcaagaataaaataaattaagtccagtgtttgagccaaggttgccacctgtctcttaacatctcactgaacataagtcctgaggtattaggacgaccatactgcctctgagctgaaaacattcaaaagttcacatccctgtttgggggataccattcaccgccttcagcccagatgatactttcctttaaatctgtgtctctgtgtgtataacaaagaggaagatggaaacaatgttcatggaaactgctgttgagccccttgtcccaccactcccgccatctgctgcaggcaggaaggcatgtgagtgtacgttttcttccaggagacatcaggtccccctggattcaaattaagtgcaatattttgcaaacagctcttcttagggaaatctcctgaaggaaaaaaatgtgacagaatgttccatagtctgagagaatggaatcgttgagcatttagtacaagtccagtgtgtgtgagcgggacttaggcagctcaagcttgcttttttttttaagcgtacaattgagtggttttagtaaattcacaaacttgttcaaccatcaccactatctaattccagactcacgcttttttaaacaataaatgtcatttcatgaaatctttggtgataaagtattttggattcagagaagagctcccttaccagtcccaccctgatctcatggctgtctctcctttcattgtcagactccccctggtctaccgcgttgatgtgtatacactgatctttcaagtctgggagacagataaggaggccaggtgcaaggcagggaggcagagagaatgttgtgcttcctttagcttttgtatttcgatggccagcattaccctttacctgtgggcatcagactcagcgtgggctgagtgctgagtgtaacttacactcctaaatcaagctggggcctgggtgggcccctcttggtatctgtgaatctttccaagcaccacttcggacacaccagggattgagtgctgctgttagtttagagaaggagagatgtctaacccttgaggtgaagggctctgggagggtccaagaagacgtaggcttcattttcacaccagcccacaccattccagtgctcagcctagcaaatgtgctttaatgcacacttctcagagctgtgatccgtgtatcttctccccagtgacagaagtagagaagagaatggaaagcagcacactccgtcccctctagtctggagctgttaacagaatctgctagaaactagctttattctaacataccgtaggatctaaatcctcctacctggatcatgaattcctttgaaataattcatattttcattgactctcactaaatgtcaaataaccttgttttcacttggataggctcaacctacctggcatatttattttgcagtcttgttgaaagttcatgaaactttgtactttttaataagatgatacactcgaaggaaacttttaatctctgcagtttattctctcttaaggaataaacactcccactgtttgttctcttcaatgtgtaaggagattaaatgacattttagaaatattacaattaaaaatagtgatgtagctgtaacatatgctggaattggatatttaatttatgtttgtgtcaactataatcctttccccacccctttcatttatggtaaacatcttgggcaaacccaaagatggaaagtgcttgttgggtgggtaagcaccacctggtctctcagcaaacactcctgagtggttgaagatgctggacattggattctagcactgggtttatctggtgacatagtctcctgtgggtcttgagttggttatttcaagctcaaactctgaatatgattaaaccagaacaccccacccccaactgccaaaaaaaaaaaaaaaa

SEQ ID NO: 1441 - protein, 477 aa, Homo sapiens
MPGSDTALTVDRTYSDPGRHHRCKSRVERHDMNTLSLPLNIRRGGSDTNLNFDVPDGILDFHKVKLTADSLKQKILKVTEQIKIEQTSRDGNVAEYLKLVNNADKQQAGRIKQVFEKKNQKSAHSIAQLQKKLEQYHRKLREIEQNGASRSSKDISKDHLKDIHRSLKDAHVKSRTAPHCMESSKSGMPGVSLTPPVFVFNKSREFANLIRNKFGSADNIAHLKNSLEEFRQEASARAYGGSATIVNKPKYGSDDECSSGTSGSADSNGNQSFGAGGASTLDSQGKLAVILEELREIKDTQAQLAEDIEALKVQFKREYGFISQTLQEERYRYERLEDQLHDLTDLHQHETANLKQELASIEEKVAYQAYERSRDIQEALESCQTRISKLELHQQEQQALQTDTVNAKVLLGRCINVILAFMTVILVCVSTIAKFVSPMMKSRCHILGTFFAVTLLAIFCKNWDHILCAIERMIIPR

SEQ ID NO: 1442 - DNA, 1714 bp, Homo sapiens
cttcttctgctgcctggttttgggggctgtatgacgtactggtcggtagtaaagattaatatgtaagaaatgtggagctaggatcaagtcatactccacagcctgcctggcaaactatgttttacttctgactttgctctctcgctgagaacattaatctgtcaagctggcgggctcctttgatagcaactttcccaggggcatgatgtggcaatgccacctctcagcccaggactaccgctattaccccgtggacggctactccctgcttaaacgcttccctcttcatcctcttacaggacccagatgccctgtccaaacagtgggacaatggttggaaagcattgggctacctcagtacgagaaccacctgatggctaatggatttgacaatgtgcagtttatgggaagcaatgttatggaagatcaggatttgttggaaattggaatccttaattctgggcacagacaaagaattctacaggcaatccagctccttccaaagatgagacccattgggcatgatggctaccatcccacctctgtagctgagtggctggattccattgaactgggcgactacaccaaagcctttctaattaatggctacacttcgatggacctgttgaaaaaaatctgggaggttgaacttattaatgttttaaaaatcaatttgattggccacaggaaacgtattttggcatctctgggagacaggctgcacgacgatcccccacagaagccccctcggtccatcaccctcaggacaggagactggggagaaccttccattaccttgcgacctccgaatgaagccacagcctctaccccggtacagtactggcagcatcacccagaaaagcttatcttccagtcgtgtgattacaaagctttttatttaggttctatgctgataaaagagcttagggggacagaatcaacccaagatgcttgtgcaaaaatgcgggctaactgtcagaagtctacagagcaaatgaagaaggtccctactattattctttctgtctcatataaaggagtcaaatttattgatgcaacaaataagaacataattgctgagcatgaaattcgtaatatctcctgtgctgcccaggacccagaagacctctcaacatttgcctatatcacaaaagatttgaagtctaatcaccactactgtcatgtgtttactgcctttgatgtgaatttagcctatgaaatcatcctaaccctgggacaggcattcgaagtcgcttaccagctagcactacaagcaagaaaagggggacactcctccacacttccagaaagctttgaaaacaaaccctccaaacccatccccaagccccgcgttagcattcgcaagtccgtggatcttcttcatgccagccataccgggcaggaaccatcagagagacacactgaggaggcactcagaaaattttgatagaattgaatttacatatagctgataaagcctaaatagaaaggttgatgtatttagcttgaatccttcactttagtggtctaatcaacagataaatgacaagcaaagaatgaaacaatccaaaaatgtttttcaaaacaattttgtgaattttatttttacaaaaattttttaaattcatattttaaaatgtataccaaggcaaaaaaatcatataagctatatcataaatacaagagtttcaaaacatacaagagacatataatg

SEQ ID NO: 1443 - protein, 414 aa, Homo sapiens
MMWQCHLSAQDYRYYPVDGYSLLKRFPLHPLTGPRCPVQTVGQWLESIGLPQYENHLMANGFDNVQFMGSNVMEDQDLLEIGILNSGHRQRILQAIQLLPKMRPIGHDGYHPTSVAEWLDSIELGDYTKAFLINGYTSMDLLKKIWEVELINVLKINLIGHRKRILASLGDRLHDDPPQKPPRSITLRTGDWGEPSITLRPPNEATASTPVQYWQHHPEKLIFQSCDYKAFYLGSMLIKELRGTESTQDACAKMRANCQKSTEQMKKVPTIILSVSYKGVKFIDATNKNIIAEHEIRNISCAAQDPEDLSTFAYITKDLKSNHHYCHVFTAFDVNLAYEIILTLGQAFEVAYQLALQARKGGHSSTLPESFENKPSKPIPKPRVSIRKSVDLLHASHTGQEPSERHTEEALRKF

SEQ ID NO: 1444 - DNA, 4431 bp, Homo sapiens
ctgcgctcccgctccagctaggactctctctgccgcctcctcctcctcctccgacctcagtcctcaccaccctcctcccgctcctcaaaagcacccccgagtccccaccccctcacgccgcacccgcgggaacgaggccttgggaattcaggggagtggctgtgggggcgcgtcgcggctcccagctcggccagcccctctttcaagacatggtctgatccccattgtaaaagctgcgccccgaagaggaggagagagtcgtgctccctgcctggggctgcagggagctctccgtgctgaagctcttgcattattttagggtggggcgaagagggccctggattttggggagtgggggtgggtggggaggaggacccgaggggggcaaggactctgtgggggagtcggtgagagactatggggaaggaccaggagctgctggaagctgctcgcactggaaatgtggctctggtggagaaactcctgtctggcaggaaaggagggatcctgggcggtggatccggacccctgcccctgtctaatctgctaagcatctggcgaggccccaatgtgaactgcacagacagttcgggttacactgctttacaccacgcagccttaaatggacataaggacatagttctcaaactacttcagtatgaggcatcaacaaatgtagcagacaacaaagggtattttcctattcacctggctgcctggaaaggagatgtggaaattgtgaagattcttattcatcatggaccatcacattccagggtcaatgaacagaacaatgaaaatgaaactgccctacactgtgcagctcaatatggacactcagaagtagttgctgttctcctagaagagctcactgacccgacaattagaaatagcaagctggaaacacctttggacttggcggcactctacggacggcttagagtggtaaaaatgatcatcagtgcacatcctaacttaatgagctgcaacactcgcaagcacacgccacttcaccttgctgcgcgcaatggccacaaagcagtcgtgcaggtgctgctggaggcaggaatggatgtgagctgtcaaacagaaaaggggagtgcacttcatgaagcagctttgtttggaaaggtggatgttgtacgagttctgttagaaacaggaattgatgccaacataaaggatagcttaggtagaactgtcttggacattctgaaagaacatccatctcagaaatctctccagattgcaacactcttacaagagtatttagaaggcgtgggaagatctacagtcctcgaagagcctgtacaggaagatgcaacacaagaaacacacatttcatctcctgttgagtctccttcccaaaagaccaaaagtgaaaccgtcactggagaattatcaaaactcttggatgaaataaaactctgtcaagaaaaggattattcgtttgaagacttgtgccacacaatatcagaccactacttagataatttgagcaagatttcagaggaagaacttgggaaaaatggaagccagagtgtaagaacctcatctacaatcaatttgtcaccaggagaagtggaagaagaggatgatgatgaaaatacgtgtgggccatcaggactttgggaagcattaactccgtgtaatggatgtaggaaccttggcttccccatgcttgcccaggagtcctatccaaagaagagaaattacactatggaaattgtaccatctgcttctctggatacatttccttcagaaaatgagaactttctgtgtgatctcatggacacagctgttacaaagaaaccttgctccttagaaattgcaagggcaccttccccaagaactgataatgcctctgaggtagcagttactactccaggaactagtaaccatagaaacagctcaacaggcccaacacctgattgttcacctccatcccctgatactgccctcaaaaatattgtaaaagtcattcgaccccagcctaaacagcgaacatccattgtgtcttctctggattttcaccgaatgaatcacaaccaagaatattttgaaatcaacacatctacagggtgcacaagctttactgccagtcctcctgctagtccacccacctcttctgtgggaaccacagaagtcaagaatgagggaactaaccatacagatgacctctcccgacaggatgacaatgatcccccaaaagaatatgatcctgggcaatttgcaggcctgctccatggatcctctccagcctgtgagtcccctgaaaatccatttcatctctatgggaaaagagaacaatgtgaaaaaggacaagatgaagtcagtttggcaaacagtcctttgcctttcaagcagtctccaatagaaaataactcagaacctttggtaaagaaaattaaacccaaagtggtcagtagaacaatttttcacaaaaaaagcaaccaactcgaaaaccataccattgttggcacaagatcaaccaggagtggatctcggaatggggaccagtgggttatgaacgcagggggatttgtggagagagcctgtactctggggagaataaggtcattgcctaaagccttgatcgacatgcatttgtcaaaaagtgtctctaaatctgattctgatctcattgcctatccttccaatgagaaaacatcaagagttaactggagtgaatcttccactgctgaacacagttctaaagggaattctgaaagaacaccatccttcacatcggaatgggaagaaattgacaaaataatgagttccatagatgttggaatcaacaacgaacttaaagagatgaatggtgagaccacaagacccagatgccctgtccaaacagtgggacaatggttggaaagcattgggctacctcagtacgagaaccacctgatggctaatggatttgacaatgtgcagtttatgggaagcaatgttatggaagatcaggatttgttggaaattggaatccttaattctgggcacagacaaagaattctacaggcaatccagctccttccaaagatgagacccattgggcatgatggctaccatcccacctctgtagctgagtggctggattccattgaactgggcgactacaccaaagcctttctaattaatggctacacttcgatggacctgttgaaaaaaatctgggaggttgaacttattaatgttttaaaaatcaatttgattggccacaggaaacgtattttggcatctctgggagacaggctgcacgacgatcccccacagaagccccctcggtccatcaccctcagggaacccagtggtaatcacactcctcctcagttgtctccatcacttagccaaagcacttacaccactggtggctccctagacgttcctcacattatcatgcagggcgatgcaaggaggagaagaaatgaaaactactttgatgatattccccgatcaaaactggagaggcagatggctcagacaggagactggggagaaccttccattaccttgcgacctccgaatgaagccacagcctctaccccggtacagtactggcagcatcacccagaaaagcttatcttccagtcgtgtgattacaaagctttttatttaggttctatgctgataaaagagcttagggggacagaatcaacccaagatgcttgtgcaaaaatgcgggctaactgtcagaagtctacagagcaaatgaagaaggtccctactattattctttctgtctcatataaaggagtcaaatttattgatgcaacaaataagaacataattgctgagcatgaaattcgtaatatctcctgtgctgcccaggacccagaagacctctcaacatttgcctatatcacaaaagatttgaagtctaatcaccactactgtcatgtgtttactgcctttgatgtgaatttagcctatgaaatcatcctaaccctgggacaggcattcgaagtcgcttaccagctagcactacaagcaagaaaagggggacactcctccacacttccagaaagctttgaaaacaaaccctccaaacccatccccaagccccgcgttagcattcgcaagtccgtggatcttcttcatgccagccataccgggcaggaaccatcagagagacacactgaggaggcactcagaaaattttgatagaattgaatttacatatagctgataaagcctaaatagaaaggttgatgtatttagcttgaatccttcactttagtggtctaatcaacagataaatgacaagcaaagaatgaaacaatccaaaaatgtttttcaaaacaattttgtgaattttatttttacaaaaattttttaaattcatattttaaaatgtataccaaggcaaaaaaatcatataagctatatcataaatacaagagtttcaaaacatacaagagacatataatg

SEQ ID NO: 1445 - protein, 1248 aa, Homo sapiens
MGKDQELLEAARTGNVALVEKLLSGRKGGILGGGSGPLPLSNLLSIWRGPNVNCTDSSGYTALHHAALNGHKDIVLKLLQYEASTNVADNKGYFPIHLAAWKGDVEIVKILIHHGPSHSRVNEQNNENETALHCAAQYGHSEVVAVLLEELTDPTIRNSKLETPLDLAALYGRLRVVKMIISAHPNLMSCNTRKHTPLHLAARNGHKAVVQVLLEAGMDVSCQTEKGSALHEAALFGKVDVVRVLLETGIDANIKDSLGRTVLDILKEHPSQKSLQIATLLQEYLEGVGRSTVLEEPVQEDATQETHISSPVESPSQKTKSETVTGELSKLLDEIKLCQEKDYSFEDLCHTISDHYLDNLSKISEEELGKNGSQSVRTSSTINLSPGEVEEEDDDENTCGPSGLWEALTPCNGCRNLGFPMLAQESYPKKRNYTMEIVPSASLDTFPSENENFLCDLMDTAVTKKPCSLEIARAPSPRTDNASEVAVTTPGTSNHRNSSTGPTPDCSPPSPDTALKNIVKVIRPQPKQRTSIVSSLDFHRMNHNQEYFEINTSTGCTSFTASPPASPPTSSVGTTEVKNEGTNHTDDLSRQDDNDPPKEYDPGQFAGLLHGSSPACESPENPFHLYGKREQCEKGQDEVSLANSPLPFKQSPIENNSEPLVKKIKPKVVSRTIFHKKSNQLENHTIVGTRSTRSGSRNGDQWVMNAGGFVERACTLGRIRSLPKALIDMHLSKSVSKSDSDLIAYPSNEKTSRVNWSESSTAEHSSKGNSERTPSFTSEWEEIDKIMSSIDVGINNELKEMNGETTRPRCPVQTVGQWLESIGLPQYENHLMANGFDNVQFMGSNVMEDQDLLEIGILNSGHRQRILQAIQLLPKMRPIGHDGYHPTSVAEWLDSIELGDYTKAFLINGYTSMDLLKKIWEVELINVLKINLIGHRKRILASLGDRLHDDPPQKPPRSITLREPSGNHTPPQLSPSLSQSTYTTGGSLDVPHIIMQGDARRRRNENYFDDIPRSKLERQMAQTGDWGEPSITLRPPNEATASTPVQYWQHHPEKLIFQSCDYKAFYLGSMLIKELRGTESTQDACAKMRANCQKSTEQMKKVPTIILSVSYKGVKFIDATNKNIIAEHEIRNISCAAQDPEDLSTFAYITKDLKSNHHYCHVFTAFDVNLAYEIILTLGQAFEVAYQLALQARKGGHSSTLPESFENKPSKPIPKPRVSIRKSVDLLHASHTGQEPSERHTEEALRKF

SEQ ID NO: 1446 - DNA, 3287 bp, Homo sapiens
cttcttctgctgcctggttttgggggctgtatgacgtactggtcggtagtaaagattaatatgtaagaaatgtggagctaggatcaagtcatactccacagcctgcctggcaaactatgttttacttctgactttgctctctcgctgagaacattaatctgtcaagctggcgggctcctttgatagcaactttcccaggggcatgatgtggcaatgccacctctcagcccaggactaccgctattaccccgtggacggctactccctgcttaaacgcttccctcttcatcctcttacaggacccagatgccctgtccaaacagtgggacaatggttggaaagcattgggctacctcagtacgagaaccacctgatggctaatggatttgacaatgtgcagtttatgggaagcaatgttatggaagatcaggatttgttggaaattggaatccttaattctgggcacagacaaagaattctacaggcaatccagctccttccaaagatgagacccattgggcatgatggctaccatcccacctctgtagctgagtggctggattccattgaactgggcgactacaccaaagcctttctaattaatggctacacttcgatggacctgttgaaaaaaatctgggaggttgaacttattaatgttttaaaaatcaatttgattggccacaggaaacgtattttggcatctctgggagacaggctgcacgacgatcccccacagaagccccctcggtccatcaccctcagggaacccagtggtaatcacactcctcctcagttgtctccatcacttagccaaagcacttacaccactggtggctccctagacgttcctcacattatcatgcagggcgatgcaaggaggagaagaaatgaaaactactttgatgatattccccgatcaaaactggagaggcagatggctcagtcgtctgtctgtgaaatatggacgaatcagaacgcaggatttcctttctcagcgatccatcaggttcataatacaggagactggggagaaccttccattaccttgcgacctccgaatgaagccacagcctctaccccggtacagtactggcagcatcacccagaaaagcttatcttccagtcgtgtgattacaaagctttttatttaggttctatgctgataaaagagcttagggggacagaatcaacccaagatgcttgtgcaaaaatgcgggctaactgtcagaagtctacagagcaaatgaagaaggtccctactattattctttctgtctcatataaaggagtcaaatttattgatgcaacaaataagaacataattgctgagcatgaaattcgtaatatctcctgtgctgcccaggacccagaagacctctcaacatttgcctatatcacaaaagatttgaagtctaatcaccactactgtcatgtgtttactgcctttgatgtgaatttagcctatgaaatcatcctaaccctgggacaggcattcgaagtcgcttaccagctagcactacaagcaagaaaagggggacactcctccacacttccagaaagctttgaaaacaaaccctccaaacccatccccaagccccgcgttagcattcgcaagtccgtgcagatcgacccatctgagcaaaagactctggccaatctaccgtggattgtggagccgggccaagaagccaagaggggcattaataccaagtatgaaaccacgattttctgatactcgccgtcctcctgtcctcgcggtgccttgctcgccaagcggtcccggagcaggctttccttcgcgcctccgcgtccacccagcccaggaggaagactgctctgagcgtgcggccttgttacgggcgaaaggccactggccattcctggggaagttctttctgcaccagtgatggaaaacgcaagactttccagtcgcaacccctgagaggcgtgagttgagatgggttttccctgatgctcccgactcccctccccaccacctcccaaggtatttctgatgactccgccccagtacttgctttgcttcatttggggaaaataataccttttctttaaaaaaaaaaaaaaaaaaaaaaaagtaaaggggatctctaatactgcctaaaagtatgctttcactgtcagcagttttaaaggtgaaatcagagcagcactacccctcccacctccaaagcatctgtaaaatcattctatcattgagtatcgtttaatgcaaaaggacaaaaacaactcccgtgatatgattgccaggagattctgtttccccatttctatatttgtggattttatatgtaatcacctatgtcagagaaagaaaacctttcaaccaaatgattggttcaaaaggaaagaatgattcaaagcagaggaatttattatgcacagcaaaatgtgtcttgtattaaatatttttattaaaagaatgtttcattaatgcattgataagaaaactaggttagttgcgagggatgtttctggtttcatttcaaataattaaatttctactgctactaccaagaggactggctcagtggtggcaaaatactggtgatgctccctagagcaggaggcccggaagtgctgacgcagccatcagcctgccaagattgttttttaatcttcacagtgttttaaagaacatgttaaaaaaaaaaaaatctagtgctcctgctgtcaagatttctgtcatggaaaccttgtttgagaaaggtgttaataaaattctattgcaaaaatttctttttctagaaaaaataaatacaaaaaaaaaaaagaagaaattccaaagtaataaaacttttcttgagacaaacaaaaaaaaagtttgcttactatttgattaaataaaatttacttacatttctttaaggtattttaattttttaatgtctctgtggagtatttgtatgataccataatgtatatttatgtagaatcaaattatataaacagtaccaatatcattatagaaaaaaataacattttaatgtatattgttctaacaatcatattgtgaatcattttgaagttcattatagcgatattgataaattgtggaattgtcttaatgtttttttattaactgacattattttaaacctaactgagatgatcagttacattcatcagttggtgagttttgaagaataactacattttatttcaaactaacaaatgtatacggttttagttcagtgttgaagaattttaatacaatattaaattacttgaactgaaaaaaaaaaaaaaaaaaaaaaaaaaaaaaa

SEQ ID NO: 1447 - protein, 510 aa, Homo sapiens
MMWQCHLSAQDYRYYPVDGYSLLKRFPLHPLTGPRCPVQTVGQWLESIGLPQYENHLMANGFDNVQFMGSNVMEDQDLLEIGILNSGHRQRILQAIQLLPKMRPIGHDGYHPTSVAEWLDSIELGDYTKAFLINGYTSMDLLKKIWEVELINVLKINLIGHRKRILASLGDRLHDDPPQKPPRSITLREPSGNHTPPQLSPSLSQSTYTTGGSLDVPHIIMQGDARRRRNENYFDDIPRSKLERQMAQSSVCEIWTNQNAGFPFSAIHQVHNTGDWGEPSITLRPPNEATASTPVQYWQHHPEKLIFQSCDYKAFYLGSMLIKELRGTESTQDACAKMRANCQKSTEQMKKVPTIILSVSYKGVKFIDATNKNIIAEHEIRNISCAAQDPEDLSTFAYITKDLKSNHHYCHVFTAFDVNLAYEIILTLGQAFEVAYQLALQARKGGHSSTLPESFENKPSKPIPKPRVSIRKSVQIDPSEQKTLANLPWIVEPGQEAKRGINTKYETTIF

SEQ ID NO: 1448 - DNA, 1687 bp, Homo sapiens
ggggagcctttggagagaagggagagggcccgtcggacagccacagcggccagcgcagcggcagcggcggcggcaccaccatcaccgctcgcaccccagccgcccggcccgcgaccaggcagcggcggccgccggcgggatcggaggaggcggcgaagcgactccgatcctccctctgagccttgctcagctctgccccgcgcctcccgggctccggtccgcgcggcggggtccctgctcctgcgccccgggcgcgcttcccggacaccccggtccccgcagccaggacaaagccatgaagccagcgctgctggaagtgatgaggatgaacagaatctgccggatggtgctggccacttgcttgggatcctttatcctggtcatcttctatttccaaagtatgttgcacccagtcatgcggaggaatccctttggtgtggacatctgctgccggaaggggtcccgaagccccctgcaggaactctacaacccaatccagctggagctctcaaacactgctgtcctgcaccagatgcggcgggaccaggtgacagacacgtgccgagccaacagcgccacaagccgtaagcggagggtgctgacccccaacgacctgaagcacttggtggtggatgaggaccacgagctcatctactgctacgtgcccaaggtggcctgcaccaactggaagcggctcatgatggtcctgaccgggcgggggaagtacagcgaccccatggagatcccggccaacgaggcacacgtctccgccaacctgaagaccctgaaccagtacagcatcccagaaatcaaccaccgcttgaaaagctacatgaagttcctgtttgtccgggagcccttcgagaggctagtgtccgcctaccgcaacaagttcacccagaagtacaacatctccttccacaagcggtacggcaccaagatcatcaaacgccagcggaagaacgccacccaggaggccctgcgcaaaggggacgatgtcaaattcgaggagtttgtggcctatctcatcgacccacacacccagcgggaggagcctttcaacgaacactggcaaaccgtctactcactctgccatccctgccacatccactatgacctcgtgggcaagtacgagacactggaagaggattctaattacgtcctgcagctggcaggagtgggcagctacctgaagttccccacctatgcaaagtctacgagaactactgatgaaatgaccacagaattcttccagaacatcagctcagagcaccaaacgcagctgtacgaagtctacaaactcgattttttaatgttcaattactcagtgccaagctacctgaaattggaataaagggggtggggagagggagagaatcatgctttttaatttaagatttttatttgtcaaaagaattatatggatattgggttattttgtaaattaatatttctttggggatgatgctgcgagcagcatagtgagaattatttaaaatccttcgtagggaaggacagctgtctttgcaggggaaataggatgggtcgttcttgtctgtagaagtgaatactgcaacactgtctcaaaggtttcttgtgttctggtgaattccatgaattgtgcattccataaattctaattaatattatttatagcaaaaaaaaaaaaaaaaaaaaaaaaaaaaaa

SEQ ID NO: 1449 - protein, 352 aa, Homo sapiens
MKPALLEVMRMNRICRMVLATCLGSFILVIFYFQSMLHPVMRRNPFGVDICCRKGSRSPLQELYNPIQLELSNTAVLHQMRRDQVTDTCRANSATSRKRRVLTPNDLKHLVVDEDHELIYCYVPKVACTNWKRLMMVLTGRGKYSDPMEIPANEAHVSANLKTLNQYSIPEINHRLKSYMKFLFVREPFERLVSAYRNKFTQKYNISFHKRYGTKIIKRQRKNATQEALRKGDDVKFEEFVAYLIDPHTQREEPFNEHWQTVYSLCHPCHIHYDLVGKYETLEEDSNYVLQLAGVGSYLKFPTYAKSTRTTDEMTTEFFQNISSEHQTQLYEVYKLDFLMFNYSVPSYLKLE

SEQ ID NO: 1450 - DNA, 768 bp, Homo sapiens
atggagttccgagatagggcaggggagccttcgggctgcagcggtgtcccctccgttggacctggccggtcacctccgagccggcaacgcctcccccgtgatggatacgcaccgggtccagcacgtagacaagaggagaacggcgacggagtgaccccgggtcagggctctctgggcgtcccctcaccgagcacagcacagtcacctcgaaaactcaccagcccaacaaacccccccagccccagtgtcccccccaacgcgttgcgtctacacctccacataaacacgggtctagatttgcacctgcacgggacgattagctccttggagtcacacccatccaggccctctgaagacttggcgtgcgtgcaaaagataaagcgtcttacttcctctagggttcttggcagcacctatctccgggagaagtttccaccttggttaatgtcgggaagggagggggtcgcgcttggcccgcggcgcaggttcaccccggctttcgtccctccgaccccgcctggccgcccatccccgacccccgtggaccctgctcggccgccccggctggggtcgatctggccctccgcccccagcctgcgtggaacccgccgggccgccagccccacctcggccgcgtcccctcccctccgctccgctcttctcccctcccctcgcggccacctcggtgcccaccccggcctccgcagaccccgccgggaccccgccccgcgcccagccacccccgcgccggcttcccggcccccgtag

SEQ ID NO: 1451 - protein, 255 aa, Homo sapiens
MEFRDRAGEPSGCSGVPSVGPGRSPPSRQRLPRDGYAPGPARRQEENGDGVTPGQGSLGVPSPSTAQSPRKLTSPTNPPSPSVPPNALRLHLHINTGLDLHLHGTISSLESHPSRPSEDLACVQKIKRLTSSRVLGSTYLREKFPPWLMSGREGVALGPRRRFTPAFVPPTPPGRPSPTPVDPARPPRLGSIWPSAPSLRGTRRAASPTSAASPPLRSALLPSPRGHLGAHPGLRRPRRDPAPRPATPAPASRPP

SEQ ID NO: 1452 - DNA, 2243 bp, Homo sapiens
gggacactggggctgggggggtttgttgggctggtgagttttcgaggtgactgtgctgtgctcggtgaggggacgcccagagagccctgacccggggtcactccgtcgccgttctcctcttgtctacgtgctggacccggtgctacctttttacccacacttaagtgacgcaaaatgcccttcaatggcgagaagcagtgtgtgggagaggaccagccaagcgattctgattcttcccggttttccgaaagcatggcttcgctcagtgactatgaatgctccaggcagagctttgcaagtgactcctccagcaaatccagctctcctgcttcaacaagccctccaagggttgtaacatttgatgaagtgatggctacagcaaggaacttatcaaacttgactcttgctcatgagattgctgtaaatgagaactttcaattgaaacaagaggctctcccagaaaagagtttggctggtcgagtgaagcacattgttcaccaggccttctgggacgtcttggattcagaactaaatgctgaccctcctgagtttgaacatgccatcaaactgtttgaagaaatcagagagattcttctctcttttctcactcccggtggcaaccggcttcgcaaccaaatctgtgaagttttggacacagacctcattaggcagcaggctgagcacagtgctgttgacatccaaggcctggccaactatgtcatcagtacgatgggaaagctgtgtgctcccgtgcgagataatgatatcagagagttaaaggctactggcaacatcgtggaggtgctgagacaaatattccatgtcctggacctcatgcaaatggacatggccaattttacaattatgagtctcagaccgcaccttcaacgccagttggtggaatatgagagaaccaagttccaggaaattttggaagaaactccaagtgctcttgatcagactacagaatggataaaagaatctgtaaatgaagaattattttctctttctgagagtgctttaactcctggggccgaaaatacctccaagccaagcctgagccctactttggtgctaaataatagttacttgaaactgttacagtgggattatcagaaaaaagaattaccagagacacttatgacagatggagcacgtcttcaggaactaacagaaaagctgaatcaattgaaaattattgcctgcctgtccctaattaccaacaacatggtgggtgctattacaggaggcctgcctgagcttgcaagcaggttaacaaggatttcagctgttctacttgaaggcatgaacaaagagacctttaacttgaaggaagtcctgaattctattggtattcagacttgtgttgaggttaacaagaccctgatggaaagaggtttacccactttaaatgctgagattcaagctaatcttataggtcaattttcaagcattgaagaggaggacaatcctatctggtccttgattgataaacgaattaagctttacatgagaaggctactttgtcttccaagccctcaaaaatgcatgcctcctatgccaggaggcctagctgtcattcagcaggagctagaagccctaggctctcaatatgcaaacattgtgaatctcaacaaacaagtgtatggaccattttatgcaaatatacttcgaaagctgctcttcaatgaggaagccatggggaaggtagatgcttcacctcctactaactaaagaagaactgacattggacgagagattggaaatccagtactttggtatccagtccacttccattgatggcattagagatccagcacattctcagtactgtggtgcagtattagcccaaatctgtgtaatgggtaatattagcattacagaagacacacacatcacatagaccctcagaagacgtaaacatcacatagaccctatttgtgcatcattttcaagtttaaaacagatatttgtaatgaacagaaaacaatttgtaattaattatattacctatataatacttgtaaatgttttcttaaccatttatatttggcttatgacatttaacccctaaggagttgtttttctcacttgttattatcaaacctaatggtttttaattttggtacaactccttaaagggttgaaggttgtgacaataactgagggaactgatgttctgaataaatgatgtgaagtaaacacaattgtatttgaaaaaaaaaaaaaaaaaaaaaaaaaaa

SEQ ID NO: 1453 - protein, 519 aa, Homo sapiens
MPFNGEKQCVGEDQPSDSDSSRFSESMASLSDYECSRQSFASDSSSKSSSPASTSPPRVVTFDEVMATARNLSNLTLAHEIAVNENFQLKQEALPEKSLAGRVKHIVHQAFWDVLDSELNADPPEFEHAIKLFEEIREILLSFLTPGGNRLRNQICEVLDTDLIRQQAEHSAVDIQGLANYVISTMGKLCAPVRDNDIRELKATGNIVEVLRQIFHVLDLMQMDMANFTIMSLRPHLQRQLVEYERTKFQEILEETPSALDQTTEWIKESVNEELFSLSESALTPGAENTSKPSLSPTLVLNNSYLKLLQWDYQKKELPETLMTDGARLQELTEKLNQLKIIACLSLITNNMVGAITGGLPELASRLTRISAVLLEGMNKETFNLKEVLNSIGIQTCVEVNKTLMERGLPTLNAEIQANLIGQFSSIEEEDNPIWSLIDKRIKLYMRRLLCLPSPQKCMPPMPGGLAVIQQELEALGSQYANIVNLNKQVYGPFYANILRKLLFNEEAMGKVDASPPTN

SEQ ID NO: 1454 - DNA, 4239 bp, Homo sapiens
gagattcgggcagggagcgggcggaacctttctaccgcgtctctagctaacacgcacggcggggacagtttaggcctccgcgcaccgttcgccgggagtcttgcagtttgcttggtgcagggaaggcgggcgcggaggttctatctgtttcttcctccttcgtgagcagcatggacgtgctagcggaggagtttgggaacctgactccggagcagctggcggcgccgatcccgactgtagaggaaaaatggaggctgcttccagcatttttaaaggtgaaaggccttgtgaaacagcatatagattcatttaactatttcattaatgtagagataaagaagataatgaaagccaatgaaaaggttacaagtgacgctgaccctatgtggtacttaaaatatcttaatatctatgttgggcttcctgatgttgaagaaagcttcaatgtaactagaccagtgtcccctcatgagtgccgtttgagagacatgacatactctgcccctattacagtggatattgaatatacccgaggcagccagaggatcatccgcaatgccttacctatcggcagaatgcccataatgctacgtagttcaaactgtgttcttacaggaaaaacgccagcagaatttgccaaactgaacgaatgtcccttagatccaggtggctacttcattgttaaaggagtagaaaaagttattcttatccaagagcagctgtctaagaacaggatcatcgtggaggctgatagaaaaggggctgttggagcttcagttaccagctctacccatgagaaaaaaagcagaaccaatatggctgtgaaacaaggacgattttatttgaggcataatactttgtcagaagatatacccattgtcatcatatttaaggccatgggtgttgagagtgaccaggaaattgtgcagatgattggaacagaggagcacgtgatggctgcatttgggcccagtctggaagagtgccagaaagctcagattttcacacagatgcaggcattaaaatatatagggaacaaagtaagaaggcaaaggatgtggggaggtggaccaaagaaaaccaaaatagaagaagcaagagagctcctggcttccaccattctgacccatgtcccagttaaggaattcaatttccgagccaaatgtatctatactgcagtgatggtgcgaagagttattctggcccaaggagataataaagttgacgacagagattattatggtaacaagcgactggaattggcaggacagcttttatctcttctttttgaagacttgttcaaaaaatttaattctgaaatgaaaaagattgccgaccaggtgattcctaagcaaagagcagcccagtttgatgttgtcaaacacatgcgccaagaccagatcaccaatggcatggtgaatgctatttctaccggaaattggtctttaaagagatttaaaatggaccgccagggtgtaacccaagtgctgtctcgcttgtcatatatatccgcactgggcatgatgacaagaatctcttcccagtttgaaaaaacgagaaaagtgagtggtcctcgctccctccagccatctcagtggggaatgctgtgtccttcggacactcctgaaggagaggcatgtggtttggttaaaaacttggcccttatgacacacatcacaactgatatggaagatggacccattgttaaattagccagtaacttgggagtagaagatgtgaatttattatgtggggaagagctctcttacccaaatgtgtttcttgtctttcttaatggtaacatcttaggtgtcattcgagaccacaaaaagctagtgaatacatttcgactcatgagaagagcaggatatatcaatgaatttgtttccatctcaacaaatcttacagatcgatgtgtctatatttcttctgatgggggaaggctatgcagaccctacataattgtcaagaaacagaagccagcagtcacaaataaacatatggaagagctggcccaagggtacaggaattttgaagatttcttacatgagagtctggttgaatatttagatgtgaatgaagaaaatgattgtaacattgcactgtacgaacacacaattaataaagacaccacccacttggagattgaacccttcactcttctcggcgtgtgtgctggacttatcccataccctcaccataaccagtcaccgagaaacacttatcagtgtgccatggggaaacaagccatgggtactataggatacaaccagcgaaacagaattgatactctcatgtatctactagcatatccacaaaaacccatggttaagacaaaaaccattgaattgatagaatttgagaaactgccagctggacagaatgcaacagttgctgtgatgagctatagtggctatgatattgaagatgctcttgttttaaacaaggcctctttagacagaggctttgggcgttgccttgtatataaaaatgctaaatgtacgttgaaacgatacaccaatcagacttttgataaagtgatggggcccatgttggatgctgctacaaggaaacctatctggcgacatgaaatcttagatgcagatggtatttgttctccaggtgagaaagtagaaaacaaacaagtgcttgtaaataagtccatgcccacagtgactcagattcctttggaaggaagtaatgtaccacagcaaccacagtacaaagatgtacccataacctacaaaggagcaacagactcatatattgaaaaagtgatgatatcttcaaatgctgaagatgcttttctgatcaaaatgctgctgagacagacaaggcgtccagaaattggagacaaattcagcagtcgtcatgggcaaaaaggtgtttgtggcttgatcgtcccccaggaagacatgccattttgtgattctggcatctgtccggacatcatcatgaacccacacggcttcccatcacgaatgacggtggggaagctcattgagctgctggctggcaaggccggtgtgctggacggcagattccactacggcactgcgtttggaggcagtaaagtgaaggatgtgtgtgaggacctcgttcgccatggttataactacttggggaaagactatgttacatccggcatcacaggtgagcccttcgaagcatacatctattttggccccgtgtactatcagaagctgaaacacatggtgctagataaaatgcatgcccgggcccggggcccacgagccgtccttaccaggcaacccactgaaggacggtctcgtgatggtggcttgcgtctcggggaaatggaacgtgactgtttaatcggttatggagccagtatgcttttgctagagagactaatgatttcaagtgatgcctttgaggttgatgtctgtgggcagtgtggacttctggggtattctggctggtgccattactgcaagtcatcctgccacgtgtcttccctccgtattccgtatgcctgcaagctgctcttccaggaactacagtctatgaacatcatccccaggttaaaactgtccaagtacaatgaatgaggatggaaaaaatgattattaaagagaacaagtgatacatccaatgcaacggaaagcagaagggatttaggactacgtctcctcctgtgaagaattcccttgcgtattctctctctaaaacaaccaaaaaaaaatggagaggctttttatatactctaagactggctaaacaaccttgatcattgagcctcgagccatgggagagatgctgaccatgtggactgcaaggctgcttgattcacagatggatgtgacctaaaggataaataagctattacttatgtgctgatctcttgacattcactcattagaagaccttactccttcaagcaaatgtttggggtcaaatttaccatatcttctggctaaccatattcaagattcttctgaaacttggaggatgtaaagaatccatttgatttggtcagcctggcttttgtcgtggtggctggctcggataaattttcccaacaattaaatcttgcctttacacacccaaactttgtaattttagtcttggtgaaatataatgaatttgttcctaccttgtcaagcaagaatgtcgtcttctcctatggactcaattgctattattttaaacctgcatgattgtaccatgcaatactattcgttaaatatctgaatctagaaaaaaaaaaaaaaaaaa

SEQ ID NO: 1455 - protein, 1133 aa, Homo sapiens
MDVLAEEFGNLTPEQLAAPIPTVEEKWRLLPAFLKVKGLVKQHIDSFNYFINVEIKKIMKANEKVTSDADPMWYLKYLNIYVGLPDVEESFNVTRPVSPHECRLRDMTYSAPITVDIEYTRGSQRIIRNALPIGRMPIMLRSSNCVLTGKTPAEFAKLNECPLDPGGYFIVKGVEKVILIQEQLSKNRIIVEADRKGAVGASVTSSTHEKKSRTNMAVKQGRFYLRHNTLSEDIPIVIIFKAMGVESDQEIVQMIGTEEHVMAAFGPSLEECQKAQIFTQMQALKYIGNKVRRQRMWGGGPKKTKIEEARELLASTILTHVPVKEFNFRAKCIYTAVMVRRVILAQGDNKVDDRDYYGNKRLELAGQLLSLLFEDLFKKFNSEMKKIADQVIPKQRAAQFDVVKHMRQDQITNGMVNAISTGNWSLKRFKMDRQGVTQVLSRLSYISALGMMTRISSQFEKTRKVSGPRSLQPSQWGMLCPSDTPEGEACGLVKNLALMTHITTDMEDGPIVKLASNLGVEDVNLLCGEELSYPNVFLVFLNGNILGVIRDHKKLVNTFRLMRRAGYINEFVSISTNLTDRCVYISSDGGRLCRPYIIVKKQKPAVTNKHMEELAQGYRNFEDFLHESLVEYLDVNEENDCNIALYEHTINKDTTHLEIEPFTLLGVCAGLIPYPHHNQSPRNTYQCAMGKQAMGTIGYNQRNRIDTLMYLLAYPQKPMVKTKTIELIEFEKLPAGQNATVAVMSYSGYDIEDALVLNKASLDRGFGRCLVYKNAKCTLKRYTNQTFDKVMGPMLDAATRKPIWRHEILDADGICSPGEKVENKQVLVNKSMPTVTQIPLEGSNVPQQPQYKDVPITYKGATDSYIEKVMISSNAEDAFLIKMLLRQTRRPEIGDKFSSRHGQKGVCGLIVPQEDMPFCDSGICPDIIMNPHGFPSRMTVGKLIELLAGKAGVLDGRFHYGTAFGGSKVKDVCEDLVRHGYNYLGKDYVTSGITGEPFEAYIYFGPVYYQKLKHMVLDKMHARARGPRAVLTRQPTEGRSRDGGLRLGEMERDCLIGYGASMLLLERLMISSDAFEVDVCGQCGLLGYSGWCHYCKSSCHVSSLRIPYACKLLFQELQSMNIIPRLKLSKYNE

SEQ ID NO: 1456 - DNA, 9251 bp, Homo sapiens
atggtcttgcttctttgtctatcttgtctgattttctcctgtctgaccttttcctggttaaaaatctgggggaaaatgacggactccaagccgatcaccaagagtaaatcagaagcaaacctcatcccgagccaggagccctttccagcctctgataactcaggggagacaccgcagagaaatggggagggccacactctgcccaagacacccagccaggccgagccagcctcccacaaaggccccaaagatgccggtcggcggagaaactccctaccaccctcccaccagaagcccccaagaaaccccctttcttccagtgacgcagcaccctccccagagcttcaagccaacgggactgggacacaaggtctggaggccacagataccaatggcctgtcctcctcagccaggccccagggccagcaagctggctccccctccaaagaagacaagaagcaggcaaacatcaagaggcagctgatgaccaacttcatcctgggctcttttgatgactactcctccgacgaggactctgttgctggctcatctcgtgagtctacccggaagggcagccgggccagcttgggggccctgtccctggaggcttatctgaccacaggtgaagctgagacccgcgtccccactatgaggccgagcatgtcgggactccacctggtgaagaggggacgggaacacaagaagctggacctgcacagagactttaccgtggcttctcccgctgagtttgtcacacgctttgggggggatcgggtcatcgagaaggtgcttattgccaacaacgggattgccgccgtgaagtgcatgcgctccatccgcaggtgggcctatgagatgttccgcaacgagcgggccatccggtttgttgtgatggtgacccccgaggaccttaaggccaacgcagagtacatcaagatggcggatcattacgtccccgtcccaggagggcccaataacaacaactatgccaacgtggagctgattgtggacattgccaagagaatccccgtgcaggcggtgtgggctggctggggccatgcttcagaaaaccctaaacttccggagctgctgtgcaagaatggagttgctttcttaggccctcccagtgaggccatgtgggccttaggagataagatcgcctccaccgttgtcgcccagacgctacaggtcccaaccctgccctggagtggaagcggcctgacagtggagtggacagaagatgatctgcagcagggaaaaagaatcagtgtcccagaagatgtttatgacaagggttgcgtgaaagacgtagatgagggcttggaggcagcagaaagaattggttttccattgatgatcaaagcttctgaaggtggcggagggaagggaatccggaaggctgagagtgcggaggacttcccgatccttttcagacaagtacagagtgagatcccaggctcgcccatctttctcatgaagctggcccagcacgcccgtcacctggaagttcagatcctcgctgaccagtatgggaatgctgtgtctctgtttggtcgcgactgctccatccagcggcggcatcagaagatcgttgaggaagcaccggccaccatcgccccgctggccatattcgagttcatggagcagtgtgccatccgcctggccaagaccgtgggctatgtgagtgcagggacagtggaatacctctatagtcaggatggcagcttccacttcttggagctgaatcctcgcttgcaggtggaacatccctgcacagaaatgattgctgatgttaatctgccggccgcccagctacagatcgccatgggcgtgccactgcaccggctgaaggatatccggcttctgtatggagagtcaccatggggagtgactcccatttcttttgaaaccccctcaaaccctcccctcgcccgaggccacgtcattgccgccagaatcaccagcgaaaacccagacgagggttttaagccgagctccgggactgtccaggaactgaatttccggagcagcaagaacgtgtggggttacttcagcgtggccgctactggaggcctgcacgagtttgcggattcccaatttgggcactgcttctcctggggagagaaccgggaagaggccatttcgaacatggtggtggctttgaaggaactgtccatccgaggcgactttaggactaccgtggaatacctcattaacctcctggagaccgagagcttccagaacaacgacatcgacaccgggtggttggactacctcattgctgagaaagtgcaggcggagaaaccggatatcatgcttggggtggtatgcggggccttgaacgtggccgatgcgatgttcagaacgtgcatgacagatttcttacactccctggaaaggggccaggtcctcccagcggattcactactgaacctcgtagatgtggaattaatttacggaggtgttaagtacattctcaaggtggcccggcagtctctgaccatgttcgttctcatcatgaatggctgccacatcgagattgatgcccaccggctgaatgatggggggctcctgctctcctacaatgggaacagctacaccacctacatgaaggaagaggttgacagttaccgaattaccatcggcaataagacgtgtgtgtttgagaaggagaacgatcctacagtcctgagatccccctcggctgggaagctgacacagtacacagtggaggatgggggccacgttgaggctgggagcagctacgctgagatggaggtgatgaagatgatcatgaccctgaacgttcaggaaagaggccgggtgaagtacatcaagcgtccaggtgccgtgctggaagcaggctgcgtggtggccaggctggagctcgatgacccttctaaagtccacccggctgaaccgttcacaggagaactccctgcccagcagacactgcccatcctcggagagaaactgcaccaggtcttccacagcgtcctggaaaacctcaccaacgtcatgagtggcttttgtctgccagagcccgtttttagcataaagctgaaggagtgggtgcagaagctcatgatgaccctccggcacccgtcactgccgctgctggagctgcaggagatcatgaccagcgtggcaggccgcatccccgcccctgtggagaagtctgtccgcagggtgatggcccagtatgccagcaacatcacctcggtgctgtgccagttccccagccagcagatagccaccatcctggactgccatgcagccaccctgcagcggaaggctgatcgagaggtcttcttcatcaacacccagagcatcgtgcagttggtccagagataccgcagcgggatccgcggctatatgaaaacagtggtgttggatctcctgagaagatacttgcgtgttgagcaccattttcagcaagcccactacgacaagtgtgtgataaacctcagggagcagttcaagccagacatgtcccaggtgctggactgcatcttctcccacgcacaggtggccaagaagaaccagctggtgatcatgttgatcgatgagctgtgtggcccagacccttccctgtcggacgagctgatctccatcctcaacgagctcactcagctgagcaaaagcgagcactgcaaagtggccctcagagcccggcagatcctgattgcctcccacctcccctcctacgagctgcggcataaccaggtggagtccattttcctgtctgccattgacatgtacggccaccagttctgccccgagaacctcaagaaattaatactttcggaaacaaccatcttcgacgtcctgcctactttcttctatcacgcaaacaaagtcgtgtgcatggcgtccttggaggtttacgtgcggaggggctacatcgcctatgagttaaacagcctgcagcaccggcagctcccggacggcacctgcgtggtagaattccagttcatgctgccgtcctcccacccaaaccggatgaccgtgcccatcagcatcaccaaccctgacctgctgaggcacagcacagagctcttcatggacagcggcttctccccactgtgccagcgcatgggagccatggtagccttcaggagattcgaggacttcaccagaaattttgatgaagtcatctcttgcttcgccaacgtgcccaaagacacccccctcttcagcgaggcccgcacctccctatactccgaggatgactgcaagagcctcagagaagagcccatccacattctgaatgtgtccatccagtgtgcagaccacctggaggatgaggcactggtgccgattttacggacattcgtacagtccaagaaaaatatccttgtggattatggactccgacgaatcacattcttgattgcccaagagaaagaatttcccaagtttttcacattcagagcaagagatgagtttgcagaagatcgcatttaccgtcacttggaacctgccctggccttccagctggaacttaaccggatgcgtaacttcgatctgaccgccgtgccctgtgccaaccacaagatgcacctttacctgggtgctgccaaggtgaaggaaggtgtggaagtgacggaccataggttcttcatccgcgccatcatcaggcactctgacctgatcacaaaggaagcctccttcgaatacctgcagaacgagggtgagcggctgctcctggaggccatggacgagctggaggtggcgttcaataacaccagcgtgcgcaccgactgcaaccacatcttcctcaacttcgtgcccactgtcatcatggaccccttcaagatcgaggagtccgtgcgctacatggttatgcgctacggcagccggctgtggaaactccgtgtgctacaggctgaggtcaagatcaacatccgccagaccaccaccggcagtgccgttcccatccgcctgttcatcaccaatgagtcgggctactacctggacatcagcctctacaaagaagtgactgactccagatctggaaatatcatgtttcactccttcggcaacaagcaagggccccagcacgggatgctgatcaatactccctacgtcaccaaggatctgctccaggccaagcgattccaggcccagaccctgggaaccacctacatctatgacttcccggaaatgttcaggcaggctctctttaaactgtggggctccccagacaagtatcccaaagacatcctgacatacactgaattagtgttggactctcagggccagctggtggagatgaaccgacttcctggtggaaatgaggtgggcatggtggccttcaaaatgaggtttaagacccaggagtacccggaaggacgggatgtgatcgtcatcggcaatgacatcacctttcgcattggatcctttggccctggagaggaccttctgtacctgcgggcatccgagatggcccgggcagagggcattcccaaaatttacgtggcagccaacagtggcgcccgtattggcatggcagaggagatcaaacacatgttccacgtggcttgggtggacccagaagacccccacaaaggatttaaatacctgtacctgactccccaagactacaccagaatcagctccctgaactccgtccactgtaaacacatcgaggaaggaggagagtccagatacatgatcacggatatcatcgggaaggatgatggcttgggcgtggagaatctgaggggctcaggcatgattgctggggagtcctctctggcttacgaagagatcgtcaccattagcttggtgacctgccgagccattgggattggggcctacttggtgaggctgggccagcgagtgatccaggtggagaattcccacatcatcctcacaggagcaagtgctctcaacaaggtcctgggaagagaggtctacacatccaacaaccagctgggtggcgttcagatcatgcattacaatggtgtctcccacatcaccgtgccagatgactttgagggggtttataccatcctggagtggctgtcctatatgccaaaggataatcacagccctgtccctatcatcacacccactgaccccattgacagagaaattgaattcctcccatccagagctccctacgacccccggtggatgcttgcaggaaggcctcacccaactctgaagggaacgtggcagagcggattctttgaccacggcagtttcaaggaaatcatggcaccctgggcgcagaccgtggtgacaggacgagcaaggcttggggggattcccgtgggagtgattgctgtggagacacggactgtggaggtggcagtccctgcagaccctgccaacctggattctgaggccaagataattcagcaggcaggacaggtgtggttcccagactcagcctacaaaaccgcccaggccatcaaggacttcaaccgggagaagttgcccctgatgatctttgccaactggagggggttctccggtggcatgaaagacatgtatgaccaggtgctgaagtttggagcctacatcgtggacggccttagacaatacaaacagcccatcctgatctatatcccgccctatgcggagctccggggaggctcctgggtggtcatagatgccaccatcaacccgctgtgcatagaaatgtatgcagacaaagagagcaggggtggtgttctggaaccagaggggacagtggagattaagttccgaaagaaagatctgataaagtccatgagaaggatcgatccagcttacaagaagctcatggaacagctaggggaacctgatctctccgacaaggaccgaaaggacctggagggccggctaaaggctcgcgaggacctgctgctccccatctaccaccaggtggcggtgcagttcgccgacttccatgacacacccggccggatgctggagaagggcgtcatatctgacatcctggagtggaagaccgcacgcaccttcctgtattggcgtctgcgccgcctcctcctggaggaccaggtcaagcaggagatcctgcaggccagcggggagctgagtcacgtgcatatccagtccatgctgcgtcgctggttcgtggagacggagggggctgtcaaggcctacttgtgggacaacaaccaggtggttgtgcagtggctggaacagcactggcaggcaggggatggcccgcgctccaccatccgtgagaacatcacgtacctgaagcacgactctgtcctcaagaccatccgaggcctggttgaagaaaaccccgaggtggccgtggactgtgtgatatacctgagccagcacatcagcccagctgagcgggcgcaggtcgttcacctgctgtctaccatggacagcccggcctccacctgaccgtggcccgcccagccactcccgggaccacggcaaaaggaaccacccagacccaccacccgtacaccctcagcagaccctgaagacttgcttttaaacaaagaaaatcctgggcacttctgcagggctgctggttccgagctgacacccgtcttaacaaaaggcccaggagtgcctcttccaaacaaaaacagcctcctctccatagctgggaagtttattttgttttgtctctgaagacagcagttttattgcatcactaaatctaatcaagctaaaacatccctgtttccttttgcaaaacagtgcctggcatgtgggatccaggcgttctttaggatccttggataccacatcgtgaaatcttttatttttttactctgagaccagcaccagatgtaagtaagcatctcatatatttcagccaaataaatgggccaagggaaaaaaatatatatatatagacaggactagagaaaacctatttttgtaatgatgtttctttggatactgtctagtcacccagaaaaatgtatggatgaatttttttttttttttttgagacaaagtctcactgtgtcatgcaggctggagtgcagtggcatgatctcactgcaacctccatctcctgtctcagcctcctagataactgggattacaggtgcccaccaccatgcccggctaatttttgtatttttggtagagacagagtttcaccaggttggtcaggctggtctcaaactcttgacttcaggtaatccacccaccttggcctcccaaagtgctgggattacaggcatgagccaccatcttcagccagatgatttttttattgagagagtgaaatgctattttgttccccaaatggcgctagtgaatcactaggagggtcccactgataggccatgtttagcactggttgccagggattctctttttgagagagggaaagcaaaatgaatggaagtacccagctggaggtttcagggcttctggaggatgctctcgcatagctcgaggtcctctgcccacctcttctctccaaggaaaatgaggactgccccttccccctgcaggattggcccccagcctgcgcatgcaccctcctcttgcccaagtggggagcacagaggcggagaggaatcccttaccacacccacggcccagcttgctcacgagtgtcacctctgtgacggtcaccactgctcccttggagggccacttgagttactgttgcttcctcgcctgctggcttgatgagcaccgatggtgggatctgaccccgaggggcagagctgtcggtgactgaggactggactgtggtgaccatgccgatttgctcagggagaacgttgcaatgcacccagcagctcctggctctgcaggcggcacagcctggggccctgtgatcctctggtttcttccattggggcggagtcgggggtggagggagctggccacaacccactgctctgatgggtggtttgtccaaggatgctgaatgtaatgcctggtcaatgtggaagcccatgaggttgcccagggaagcctccaaaagctgggatgcttgagggtatccaagttgaaaaagacaaaatctgaccatcagccagtgacagtcctggcaaatgaaggtggggcggggcagtgaggggtgggagaaggtgaatgattcattattccaccccgaggtttgctggggtgaggggaagaatcgatgctgctttgggaactgaaggtttttctgttgggaaggccctcttggttttggagagaaagacaagttatgagtagctgctaccctggaacggtgggcagagagcctactaggaaatgtgcagaataaactattttttgaaggaaaaaaaaaaaaa

SEQ ID NO: 1457 - protein, 2458 aa, Homo sapiens
MVLLLCLSCLIFSCLTFSWLKIWGKMTDSKPITKSKSEANLIPSQEPFPASDNSGETPQRNGEGHTLPKTPSQAEPASHKGPKDAGRRRNSLPPSHQKPPRNPLSSSDAAPSPELQANGTGTQGLEATDTNGLSSSARPQGQQAGSPSKEDKKQANIKRQLMTNFILGSFDDYSSDEDSVAGSSRESTRKGSRASLGALSLEAYLTTGEAETRVPTMRPSMSGLHLVKRGREHKKLDLHRDFTVASPAEFVTRFGGDRVIEKVLIANNGIAAVKCMRSIRRWAYEMFRNERAIRFVVMVTPEDLKANAEYIKMADHYVPVPGGPNNNNYANVELIVDIAKRIPVQAVWAGWGHASENPKLPELLCKNGVAFLGPPSEAMWALGDKIASTVVAQTLQVPTLPWSGSGLTVEWTEDDLQQGKRISVPEDVYDKGCVKDVDEGLEAAERIGFPLMIKASEGGGGKGIRKAESAEDFPILFRQVQSEIPGSPIFLMKLAQHARHLEVQILADQYGNAVSLFGRDCSIQRRHQKIVEEAPATIAPLAIFEFMEQCAIRLAKTVGYVSAGTVEYLYSQDGSFHFLELNPRLQVEHPCTEMIADVNLPAAQLQIAMGVPLHRLKDIRLLYGESPWGVTPISFETPSNPPLARGHVIAARITSENPDEGFKPSSGTVQELNFRSSKNVWGYFSVAATGGLHEFADSQFGHCFSWGENREEAISNMVVALKELSIRGDFRTTVEYLINLLETESFQNNDIDTGWLDYLIAEKVQAEKPDIMLGVVCGALNVADAMFRTCMTDFLHSLERGQVLPADSLLNLVDVELIYGGVKYILKVARQSLTMFVLIMNGCHIEIDAHRLNDGGLLLSYNGNSYTTYMKEEVDSYRITIGNKTCVFEKENDPTVLRSPSAGKLTQYTVEDGGHVEAGSSYAEMEVMKMIMTLNVQERGRVKYIKRPGAVLEAGCVVARLELDDPSKVHPAEPFTGELPAQQTLPILGEKLHQVFHSVLENLTNVMSGFCLPEPVFSIKLKEWVQKLMMTLRHPSLPLLELQEIMTSVAGRIPAPVEKSVRRVMAQYASNITSVLCQFPSQQIATILDCHAATLQRKADREVFFINTQSIVQLVQRYRSGIRGYMKTVVLDLLRRYLRVEHHFQQAHYDKCVINLREQFKPDMSQVLDCIFSHAQVAKKNQLVIMLIDELCGPDPSLSDELISILNELTQLSKSEHCKVALRARQILIASHLPSYELRHNQVESIFLSAIDMYGHQFCPENLKKLILSETTIFDVLPTFFYHANKVVCMASLEVYVRRGYIAYELNSLQHRQLPDGTCVVEFQFMLPSSHPNRMTVPISITNPDLLRHSTELFMDSGFSPLCQRMGAMVAFRRFEDFTRNFDEVISCFANVPKDTPLFSEARTSLYSEDDCKSLREEPIHILNVSIQCADHLEDEALVPILRTFVQSKKNILVDYGLRRITFLIAQEKEFPKFFTFRARDEFAEDRIYRHLEPALAFQLELNRMRNFDLTAVPCANHKMHLYLGAAKVKEGVEVTDHRFFIRAIIRHSDLITKEASFEYLQNEGERLLLEAMDELEVAFNNTSVRTDCNHIFLNFVPTVIMDPFKIEESVRYMVMRYGSRLWKLRVLQAEVKINIRQTTTGSAVPIRLFITNESGYYLDISLYKEVTDSRSGNIMFHSFGNKQGPQHGMLINTPYVTKDLLQAKRFQAQTLGTTYIYDFPEMFRQALFKLWGSPDKYPKDILTYTELVLDSQGQLVEMNRLPGGNEVGMVAFKMRFKTQEYPEGRDVIVIGNDITFRIGSFGPGEDLLYLRASEMARAEGIPKIYVAANSGARIGMAEEIKHMFHVAWVDPEDPHKGFKYLYLTPQDYTRISSLNSVHCKHIEEGGESRYMITDIIGKDDGLGVENLRGSGMIAGESSLAYEEIVTISLVTCRAIGIGAYLVRLGQRVIQVENSHIILTGASALNKVLGREVYTSNNQLGGVQIMHYNGVSHITVPDDFEGVYTILEWLSYMPKDNHSPVPIITPTDPIDREIEFLPSRAPYDPRWMLAGRPHPTLKGTWQSGFFDHGSFKEIMAPWAQTVVTGRARLGGIPVGVIAVETRTVEVAVPADPANLDSEAKIIQQAGQVWFPDSAYKTAQAIKDFNREKLPLMIFANWRGFSGGMKDMYDQVLKFGAYIVDGLRQYKQPILIYIPPYAELRGGSWVVIDATINPLCIEMYADKESRGGVLEPEGTVEIKFRKKDLIKSMRRIDPAYKKLMEQLGEPDLSDKDRKDLEGRLKAREDLLLPIYHQVAVQFADFHDTPGRMLEKGVISDILEWKTARTFLYWRLRRLLLEDQVKQEILQASGELSHVHIQSMLRRWFVETEGAVKAYLWDNNQVVVQWLEQHWQAGDGPRSTIRENITYLKHDSVLKTIRGLVEENPEVAVDCVIYLSQHISPAERAQVVHLLSTMDSPAST

SEQ ID NO: 1458 - DNA, 4148 bp, Homo sapiens
gggcggcgcccagggcggtagcgtgaaacttggtggaagacgctgaccagtcgtgttggaatcaaaacagcggggaccctgcgccatgtcgcgactgatcgtgaagaatctcccgaatgggatgaaggaggagcgtttcaggcagctgtttgccgccttcggcacgctgacagactgcagcctgaagttcaccaaagatggcaagttccgcaagtttggttttattggcttcaagtccgaggaagaggcccagaaggcacagaagcatttcaacaagagcttcatcgacacatcccggatcacagtggagttctgcaagtcattcggggacccggccaaacccagagcctggagcaaacatgcccagaaaccaagccagcccaagcagcctccaaaagactctactactccagaaattaagaaagatgagaagaagaaaaaggtggcaggtcaactggagaagctgaaggaggatacagagttccaggagtttctgtcagttcatcagaggcgggcgcaggcagccacttgggcgaatgatggcctggatgctgagccctcgaaagggaagagcaagccggccagtgactacctgaacttcgactccgattctgggcaggagagtgaggaggagggagccggggaggacctggaagaagaggcaagcctcgaaccaaaggcagctgtgcagaaggagctgtcggacatggattacctgaaatccaagatggtgaaggctgggtcgtcctcttcctcggaggaagaggaaagtgaagatgaagccgtgcactgtgatgaagggagtgaggccgaggaagaggattcctccgccaccccagtcctgcaggaaagagacagcaagggtgcaggccaagagcaagggatgccagctgggaaaaagagaccaccggaggccagagccgagacagagaaaccagcaaaccagaaggaacccaccacctgccacaccgtgaagctgcggggagccccgttcaatgtcacagagaaaaatgttatggaattcctggcacccctgaaaccagtggccattcgaattgtgagaaacgctcatgggaataaaacaggatacatctttgtggatttcagcaatgaagaggaagtgaagcaagctctgaaatgcaaccgggagtacatgggtgggcgctacatcgaggtgttcagggaaaagaacgtccccaccaccaagggtgcaccaaagaataccaccaaatcctggcaaggccggatactcggggagaacgaagaggaggaggacctggccgaatccggaaggctctttgtacggaacctgccctacaccagcaccgaggaggatctggagaagctcttctccaaatatggtcccctgtctgagctccactaccccatcgacagcctgaccaagaaacccaagggttttgcattcatcaccttcatgttccctgagcacgctgtgaaggcctactcggaggtggacgggcaggtattccagggcaggatgctccacgtgttaccatctaccatcaagaaggaagccagcgaggatgccagtgccctgggatcgtcgtcctacaagaagaagaaggaggcccaggacaaagccaacagtgccagctctcacaactggaacacactattcatggggccgaatgccgtggccgatgccatcgcacagaagtacaacgccaccaagagtcaagtgtttgaccacgagaccaagggcagcgtggccgtgcgcgtggctctgggggaaacccagctcgtccaggaagtgcggcgttttctcatagacaacggggtcagcctggattccttcagccaggctgcagcagagcgaagcaagactgtgattctggtcaagaacctcccggcaggcaccctggcggccgagctgcaggagacgttcggccattttggcagcctgggccgcgtgctgctgccagagggcggaatcactgccatcgtggagttcctggagcccctggaggcccgcaaggccttcaggcatctggcctattccaagttccatcatgtccccctctatctggagtgggctccagttggcgtcttctccagcacagccccacagaagaaaaagctccaagacacaccttcagaacccatggaaaaggacccagcagagccagaaacagtgcctgatggcgaaaccccagaagatgaaaatccaacagaggaaggagcagacaactcttcagcaaagatggaagaggaggaggaggaagaggaagaagaagaagagagcctcccaggatgtactctgtttattaagaatctcaattttgacacaacagaagagaagctgaaggaagtgttttcaaaagtggggacagtgaagagctgctccatctccaagaagaagaacaaagcaggagtgctcctttccatggggtttggatttgtggaatacaggaagccggagcaagcccagaaagctctcaagcagctccagggtcacgtcgtggacggccacaagctggaagtgaggatctcggaacgagccactaagccagccgtgacattggctcggaagaaacaagttcccagaaagcagaccacctccaagatcctggtgcggaacatccccttccaggcccacagccgggagatccgagagctcttcagcacctttggggagttgaagacggtccgcctgccaaagaagatgactgggacaggcacacacagaggcttcggctttgtggacttcctcaccaagcaggatgcgaagagagccttcaacgccctgtgtcacagcacccacttgtacgggcggaggctggtgctggagtgggccgactccgaggtgaccctgcaggccctgcggcagaagacggccgctcactttcacgagcccccgaagaaaaagcggtctgtggtgttggacgagatcctggagcagctggaaggcagtgacagcgacagcgaggagcagacccttcagctgtgagctggcaccgagagggtgtgtggctccggggccctggggaccgggacagccgctccagcttctgcactcaccaccatgtgggctggggggcggggcggggagcggcaggcggccccaccctgcactggtccaaggtcggaggagacaggggatgaggaaggcctcaggccactgcccagcggcccaggcatcctgggtttcaccagtgacgcgttctagcagacactgactgcgcacctgctctgtagcagacacggaagagtccaagggagcagccacgttaggaagagagacttgggaacagctacacagggagctagaacccctgctccccctgtccccaccccaggagagtaaggggacgagggccagctctctggcatcaggctgcttggacatgaaaccccgtctccaagctcaagctgggagaccctggcccagtttccttatctccttgggcccagccttccccttgctagctagttcttacttcataaggttttagagagaaataaacgcagtaatgcatgaagagtgccgggcatggtgctgagccctgttcctgctctccctccagggctgctgagctagaattcccacctatgtctttccaagggactgttcacggcttgggacttggtctctgtcctgccccatcctcgtcacttgggaccacgagccctggttcagtcacccagggaagcctcccagcggctcatgaagcatcgagctccaagcccagatgccaagctccctggctgagctgaatgatgtcactcatggtggacgcgttctgctcacgggcccagagccctgtgaaatgcatcaaggtcctctccgctggccagcagcatccccaggcttctctcaggcgcccgtgttcacattttctccagcctgagacgcagcctcccgcctggaagggcctgtgccagcaccaggcagagggcaagacggagagggcagagcaagaactgcactgcatctcactgcagtctgaatctagacatcgccattccccgaggtgcgacctcagactaatgacatcctggctgagcctctgtttttctctctaggaaatgggggtgataattgtgcctacctcagatagacagtgccagaattaagtgagtcaagccaagtaaagcccagagaagattctcatcaaaaaaaaaaaaaa

SEQ ID NO: 1459 - protein, 960 aa, Homo sapiens
MSRLIVKNLPNGMKEERFRQLFAAFGTLTDCSLKFTKDGKFRKFGFIGFKSEEEAQKAQKHFNKSFIDTSRITVEFCKSFGDPAKPRAWSKHAQKPSQPKQPPKDSTTPEIKKDEKKKKVAGQLEKLKEDTEFQEFLSVHQRRAQAATWANDGLDAEPSKGKSKPASDYLNFDSDSGQESEEEGAGEDLEEEASLEPKAAVQKELSDMDYLKSKMVKAGSSSSSEEEESEDEAVHCDEGSEAEEEDSSATPVLQERDSKGAGQEQGMPAGKKRPPEARAETEKPANQKEPTTCHTVKLRGAPFNVTEKNVMEFLAPLKPVAIRIVRNAHGNKTGYIFVDFSNEEEVKQALKCNREYMGGRYIEVFREKNVPTTKGAPKNTTKSWQGRILGENEEEEDLAESGRLFVRNLPYTSTEEDLEKLFSKYGPLSELHYPIDSLTKKPKGFAFITFMFPEHAVKAYSEVDGQVFQGRMLHVLPSTIKKEASEDASALGSSSYKKKKEAQDKANSASSHNWNTLFMGPNAVADAIAQKYNATKSQVFDHETKGSVAVRVALGETQLVQEVRRFLIDNGVSLDSFSQAAAERSKTVILVKNLPAGTLAAELQETFGHFGSLGRVLLPEGGITAIVEFLEPLEARKAFRHLAYSKFHHVPLYLEWAPVGVFSSTAPQKKKLQDTPSEPMEKDPAEPETVPDGETPEDENPTEEGADNSSAKMEEEEEEEEEEEESLPGCTLFIKNLNFDTTEEKLKEVFSKVGTVKSCSISKKKNKAGVLLSMGFGFVEYRKPEQAQKALKQLQGHVVDGHKLEVRISERATKPAVTLARKKQVPRKQTTSKILVRNIPFQAHSREIRELFSTFGELKTVRLPKKMTGTGTHRGFGFVDFLTKQDAKRAFNALCHSTHLYGRRLVLEWADSEVTLQALRQKTAAHFHEPPKKKRSVVLDEILEQLEGSDSDSEEQTLQL

SEQ ID NO: 1460 - DNA, 9546 bp, Homo sapiens
cccccccgccagcccgggcccgctgcccccggcgcggcgtcgccgcggcgcctcccgcctgcccgccggccctcgcgccctcccccggcggcggcggcggcccggccgccccgcgctccccggcgaggcgccgccgcccggcccggcctcgcctcggacgcctcgctccgacatgccccgctctggcggccgggctcgcggaggatcatgactgcggcagcgaactgggtggcgaacggggcgagcctggaggattgtcactccaacctcttttcgctggctgaactcacgggaatcaaatggcgtaggtacaattttggagggcatggggactgtggacccataatttcagccccagcccaagatgatccaattctgttaagtttcatccgctgtctgcaagctaacctgctttgtgtatggcgtcgtgatgtcaaaccagattgcaaagagttatggatattctggtggggagatgaacccaacctagtgggtgtaatacatcatgaactgcaggttgtggaagaaggactctgggaaaatggcctttcctatgaatgtaggacgctgctcttcaaagcgatccacaatctgttagaaaggtgcctaatggataagaacttcgttaggattgggaaatggtttgtccgaccctacgaaaaggatgaaaagccagtcaacaaaagtgagcatttgtcctgtgctttcacattctttctgcatggagaaagtaatgtatgcacaagtgtggagattgcccagcaccagccaatttatttgatcaatgaggagcatatacacatggctcagtcttcacctgcaccatttcaagtactggtaagtccttatggcttaaatgggacgctaacaggccaagcatacaagatgtcagacccagccactcgtaagttgattgaggaatggcagtatttctacccgatggtgctaaaaaagaaagaagaatcgaaagaggaagacgagttgggatatgatgatgatttccctgtggcagttgaagtaattgttggtggtgttcggatggtttacccttcagcatttgttttgatctctcagaatgacatcccggttcctcagagtgttgccagtgctggaggccacattgcagttgggcagcaagggcttggtagtgtgaaggacccaagtaactgtgggatgcctctgacccctcccacctctccagaacaggctatcctaggtgagagtggaggtatgcagagtgctgccagtcacctggtttcccaagatggagggatgataacgatgcacagtccaaagagatcggggaagattcctccaaaactccacaatcatatggtccatcgagtctggaaggaatgcatcctcaacagaacccagtccaagaggagccaaatgtcaactccaactcttgaagaagagcctgctagcaatcctgctacttgggattttgtggatccaacccaaagagtcagctgttcttgttccaggcataagcttttaaaacgttgtgcagtcgggcccaatcgacctcccacagtatctcaaccagggttcagtgcaggaccatcatcatcttcatctttaccacctcctgcttcttctaagcacaaaacagcagaaagacaggaaaaaggagacaagctgcaaaagagacccttaataccatttcaccataggccctctgtggccgaagaattatgcatggagcaagatacaccaggacagaaactagggttggcagggatagactcctccttagaggtgtctagcagtaggaaatatgataagcaaatggccgtgccttccagaaatacaagcaagcaaatgaatctgaatcctatggattcacctcattcccctatatcccctctgccaccaacactcagccctcagccacgaggtcaggaaacagagagtttggacccaccatcggtccctgtgaatccagccctttatggaaatggactagaactccagcagttgtctactctggatgacagaactgtcctcgtaggccaaagactgcctctcatggcagaggtcagcgagacagccttatattgtgggattaggccctcgaacccggagtcatcagaaaagtggtggcatagttatcgtctcccacccagtgatgatgctgagttcaggcctccagagctccagggtgagagatgtgatgccaaaatggaggtaaactcagagagcactgcattgcaaagactcttagcacaacctaacaaacggtttaaaatctggcaagacaaacagccccagttgcagccactccacttccttgacccattgcctctatcacaacaacctggagacagtttgggagaagtgaatgacccatatacctttgaagatggtgacataaaatacatctttacagccaacaagaaatgcaaacaagggacggagaaagattccctgaaaaagaataagtcagaggatggatttggtaccaaggatgtcactacaccaggtcattccacgccggtgcctgatgggaaaaatgccatgtctattttcagttctgctactaaaacagatgtccggcaggataatgctgctggcagagctggctccagtagccttacacaggtaacagatttggcaccttccctgcatgacttagacaacatctttgataattctgatgacgacgaacttggggctgtatcacctgctctgcgctcatcaaaaatgcctgcagttgggacagaagaccgacctcttgggaaggatggaagagctgctgttccttatccaccaacagttgcagacttgcaaaggatgtttcccactccaccatctttggaacagcatcctgcattttctcctgtgatgaattataaagatgggatcagctcagagacagtgacagcattaggcatgatggagagccctatggtcagtatggtttcaacacaactcacagaattcaaaatggaagtggaagatggattaggaagtcccaagcccgaggaaattaaggacttttcatatgtgcacaaagttccatcctttcaaccttttgtgggatcctccatgtttgctccactgaagatgttgccgagccattgtttgctacctctgaagatacctgatgcctgtctgtttcggccttcatgggcaattcctcctaaaattgaacaactgcccatgccccctgcagccactttcattagagatggctacaataacgtgcctagtgttgggagcctagcagatccagactatctgaacacaccacagatgaacacacccgtgacgttgaacagcgctgccccagccagcaatagtggggcaggagtcctaccatctccagcaacccctcgcttctctgtccccacaccacgaacccccaggaccccaagaactcccagaggtgggggcactgccagtggtcaagggtctgttaagtatgatagcaccgatcaaggatcaccagcctccaccccctctactacacggcccctcaactctgtggagcccgccaccatgcagccaattcccgaagcccacagcctctatgttaccctgattctctccgattccgtgatgaatatctttaaagacagaaactttgacagctgttgcatctgtgcctgcaacatgaacatcaaaggggcggatgtcgggctttacatccccgattcttccaatgaggaccagtaccgctgtacctgtgggtttagtgcgattatgaaccgcaaacttggctacaattcaggactcttccttgaagatgagttggatatttttgggaagaattctgatattggtcaggctgcagagaggcgcttaatgatgtgtcagtccaccttccttcctcaggtggaaggaaccaaaaaaccccaggagccacccataagccttctcctcctcctccagaatcaacacacacaaccttttgcttcactgaatttcctggactacatttcctctaacaatcgccaaactcttccctgtgtaagctggagttatgaccgggtgcaagcagataataatgattactggacggaatgctttaatgcgttggagcaggggcggcagtatgtggataaccccactggtggaaaagtggacgaagctctggtgagaagtgccactgtgcactcttggcctcacagcaatgtgctggacatcagcatgctctcctcccaggatgtggttcgtatgctgttgtccctgcagccctttctccaagatgccatccaaaagaagcgcacgggcaggacctgggagaacatccagcatgtgcagggaccactcacttggcagcagttccataaaatggcaggacggggaacctacggttcggaagaatctcctgagccgttgcccatccccactctgctggtaggctatgacaaggatttcctcaccatctcgccattctccttgccgttttgggagaggctcttgttggacccatatgggggccaccgtgatgttgcctatattgtggtgtgtccagaaaatgaggccttgctcgaaggagccaaaactttcttcagggacttgagtgctgtatacgagatgtgtaggcttgggcagcacaagcccatctgcaaagtgctacgtgacgggatcatgcgcgtgggaaaaactgtggcacagaagctgacagatgagcttgtgagtgagtggtttaaccagccttggagcggcgaggagaatgacaatcattccagactcaaactttatgcgcaagtttgccgccatcacctagcaccttatttagccactctgcagcttgatagcagcctattgataccacctaaataccagaccccaccagcagcagcacagggacaagctacgccagggaatgctgggcccttagctccaaatggatcagcagctcccccagctggcagtgcatttaatcccacctcgaatagtagttctacaaatcctgcagcaagtagttctgcatctggttcctctgtgccaccggtctcatcgtctgcctctgctcctggtattagccagataagcactacctcttcttcaggattcagtggtagtgttggagggcagaaccccagcactgggggcatttctgcggatagaacgcaagggaacataggctgtggtggagacactgaccctgggcagagctcttctcagccctcacaggatggacaagagagtgttacagaaagggagagaataggaattcccacggagcctgactctgcagacagccatgcccaccctccagctgttgtcatttacatggtggacccgttcacgtatgctgcagaggaggactccacttctgggaacttttggctgttgagcttgatgcgctgctacacagaaatgctggataatttacctgagcatatgagaaattctttcattctccagattgtgccttgccagtacatgctgcagacaatgaaggatgagcaagttttctacattcaatacttgaagtccatggcattttcagtgtactgccagtgcaggcgaccactgcctacacagatccacattaaatccctcacgggatttgggcctgcagccagcattgagatgaccctcaagaaccctgagcggcccagcccaatccagctttactcccctccctttatattggccccaatcaaagacaagcagacagagctgggagagacgtttggtgaggcgagccagaaatacaatgtgctcttcgtgggctattgtctgtctcacgaccagcgctggcttttggcttcctgcactgacctccatggggaattattagagacctgcgttgtaaatattgctttaccaaacaggtcacggaggagtaaagtatctgcacgtaaaattggactacagaagttatgggagtggtgcatagggattgtccaaatgacatctctaccctggagagttgtaatcgggcgacttgggcgtcttggccatggggagcttaaagattggagtatcctccttggagaatgttcactacagacaatcagcaaaaagctcaaggatgtgtgccggatgtgtggaatctctgccgcagactctccttctatccttagtgcctgcctggttgccatggagccccaggggtcctttgtagtgatgccagatgctgtcacaatgggctctgtttttggccgaagtactgcactgaacatgcagtcatctcagctcaacacccctcaagatgcttcttgtacacacatcttggtgttcccaacatcatcaaccatccaggtggctccagccaactaccccaatgaagatgggtttagccccaacaatgatgatatgtttgttgaccttccattcccagatgatatggacaatgatattggcatattaatgactgggaacctccattcctctcccaactcttccccagtaccctccccaggctctccttctggaattggtgtgggctctcacttccagcatagtcggagccagggtgagcgtcttctttctagagaagcaccagaggagctaaagcagcagcccctggcccttgggtattttgtatcaactgccaaagctgagaatcttccccagtggttttggtcatcgtgtccccaggctcaaaaccagtgccctctcttcttaaaggcttcgctgcatcaccacatttcagtagcacagacagacgaacttctgcctgccaggaattctcagcgggttccacaccctcttgactccaaaaccacgtcggatgttttaaggtttgttttggagcagtacaacgctctgtcctggctcacgtgcaatccggccacccaggaccgtacttcctgccttcccgtccactttgtggtgctcactcagttgtacaatgccatcatgaatatactttaattggaaaagcacttgttctctctggctcagttccttctccctgcaacctcagtccaaggaacctgctacactctgcaaataacccacatccttttcttcagaccactctccacagtcctgcactgtgattccttctcagcaggcacatgtcaattctgcagtgttcattaccagagtgactccttgacacttctctcatggacctggaaacttccataagtggtgactttcagccagtgcggtggtgtgtgtagccccaaccactggtccccaggaagtggtggtggttgatggcttttcagcgggaaacagaagagacagtgtccttttgcacaagagtctgtgttttcagcctctgtatacaattgagggcagtctagccctttggatgaaatcctcttagttactggtgtatggcctgtgggttacctgaactccataatcggggactttttaaaaataagaaccagctcaagtacatggtttcatactggggtttctgtctccctagtgttcccatccagattagcatgagtgctttggttgacttcaaacctgtgtgtcaatgcagaaggtctggagacagcttcattttgtttatttattttaatttgttttgtcatatggtttttgtgactttatttttttaattcacaaggaccaggtacagtagctgaaacccaattcagatccaccataggattctttgactacatacctctgtcctagaagccggaaaaggagtaaaaacacattggggagatcatgcctaaaagtaatatattcaaaaccacccagcagtaggttttgttaacaacaaactggattttaaaagttctgccatgttaagtggccagcatttcatgaaggataacatttttatacagaaggcagtcaagctcaactcagagccatggaggcaagtaccttaattagttttatatagtcacaacggaaatatattttctagtgaattcttattggaagccaggtctctcctctcattagatcaaaagggacttatgtacatacaacaattgaaagtgtttgctcatgaaatcagttataaatatggtgaattttttctggaccataggaatattatttcaaagaaatattacaacttaaccattaaattagtacttgaagttgagcctttgtggtgggactttttaaaaaaatgcctttttaaagcattaatggctaattgaagtattttatgactcctcattcctggcccagagggttgtctttgaaaccctgtttctaacccttgtgttgtgtgtttctgtctgaggacagtgggtgtgtactggcctcccgggagccactgtgaccaggcctttgagctcttgtcatctgtggagagaatcatgcaaattttaaaagttcttccaagagacttccatgtcctggttattaacaaaaaaggaaaaatgtaataattgatatgattttgtaaaagtatttttcttgaaataatctaaagtttaaaacattatattaaaaaaaaaagttgtgtggtgggaatgtgaaagcagagaaataacttgtaaatggataattttgttctctgtaccaccagttgaagggggggttgactttcgcaatgtataggataaaaaatctgatatatcaaaccatttgtatctaatgtgtacagtgtaaaattgactttaaaaatattgcagtgctattttttcttaatcagaaaggaaaattctcaaggccttttgaagagcataagaagatgaagattgtaaacttgtataaaattatcttggtgagaagacaaattgtaaagtagatatttgtaatcttttaccactttggggttgcttttttcccggaattcatcagaactttgaattttttttttaaatgggctgtttttaatgcaggggcttttcttccctagaaacccaattctaagcagaaaaagaaaaaaaacacaaaaaataaaaaacccctacaaaaaaactttaaaaaaaatggcagcaaagggtagttttcatctggtgtcttttatttaagttttttaagttaagaaaagctggtgacatatttatacgtttttgtgcaaaaataaatgaatggcaatagattttaaaaaatcttattatgtacttctgtgtgaaaaagtctgtataatatttcccttaaatatgcattattttacttgtgagttttttactgaattaatctgaaatgtacaagccctggatttgctacagagtgagaagttattttatttttttttatttttaattttggaaattctgcagaaatcagaactcttaccatggtttgaacaaaaaaaggggaaatggggaggggaaaagggtgggattgtccagcatgcttgtatgtatatttcagaaccttttttaaatgtaaaagctgtacatttctgggaagttctgaatttcttttgtttccttttttccttcaagcattttgcagtgagcttcttttatatatagcaaacaatttgaaagaatacaaaaatatgtgaagttcatttaaaaaaataactacagtatagcgctggtacagtacactaaaagactttgataaaaagaaacaataataaaaggcctccattttaaatgtcattcatatataccttgtggatgagagctatatacttttacacacttttttagaggaataaattattgaattactgaaaaaaaaaaaaaaaaa

SEQ ID NO: 1461 - protein, 2210 aa, Homo sapiens
MTAAANWVANGASLEDCHSNLFSLAELTGIKWRRYNFGGHGDCGPIISAPAQDDPILLSFIRCLQANLLCVWRRDVKPDCKELWIFWWGDEPNLVGVIHHELQVVEEGLWENGLSYECRTLLFKAIHNLLERCLMDKNFVRIGKWFVRPYEKDEKPVNKSEHLSCAFTFFLHGESNVCTSVEIAQHQPIYLINEEHIHMAQSSPAPFQVLVSPYGLNGTLTGQAYKMSDPATRKLIEEWQYFYPMVLKKKEESKEEDELGYDDDFPVAVEVIVGGVRMVYPSAFVLISQNDIPVPQSVASAGGHIAVGQQGLGSVKDPSNCGMPLTPPTSPEQAILGESGGMQSAASHLVSQDGGMITMHSPKRSGKIPPKLHNHMVHRVWKECILNRTQSKRSQMSTPTLEEEPASNPATWDFVDPTQRVSCSCSRHKLLKRCAVGPNRPPTVSQPGFSAGPSSSSSLPPPASSKHKTAERQEKGDKLQKRPLIPFHHRPSVAEELCMEQDTPGQKLGLAGIDSSLEVSSSRKYDKQMAVPSRNTSKQMNLNPMDSPHSPISPLPPTLSPQPRGQETESLDPPSVPVNPALYGNGLELQQLSTLDDRTVLVGQRLPLMAEVSETALYCGIRPSNPESSEKWWHSYRLPPSDDAEFRPPELQGERCDAKMEVNSESTALQRLLAQPNKRFKIWQDKQPQLQPLHFLDPLPLSQQPGDSLGEVNDPYTFEDGDIKYIFTANKKCKQGTEKDSLKKNKSEDGFGTKDVTTPGHSTPVPDGKNAMSIFSSATKTDVRQDNAAGRAGSSSLTQVTDLAPSLHDLDNIFDNSDDDELGAVSPALRSSKMPAVGTEDRPLGKDGRAAVPYPPTVADLQRMFPTPPSLEQHPAFSPVMNYKDGISSETVTALGMMESPMVSMVSTQLTEFKMEVEDGLGSPKPEEIKDFSYVHKVPSFQPFVGSSMFAPLKMLPSHCLLPLKIPDACLFRPSWAIPPKIEQLPMPPAATFIRDGYNNVPSVGSLADPDYLNTPQMNTPVTLNSAAPASNSGAGVLPSPATPRFSVPTPRTPRTPRTPRGGGTASGQGSVKYDSTDQGSPASTPSTTRPLNSVEPATMQPIPEAHSLYVTLILSDSVMNIFKDRNFDSCCICACNMNIKGADVGLYIPDSSNEDQYRCTCGFSAIMNRKLGYNSGLFLEDELDIFGKNSDIGQAAERRLMMCQSTFLPQVEGTKKPQEPPISLLLLLQNQHTQPFASLNFLDYISSNNRQTLPCVSWSYDRVQADNNDYWTECFNALEQGRQYVDNPTGGKVDEALVRSATVHSWPHSNVLDISMLSSQDVVRMLLSLQPFLQDAIQKKRTGRTWENIQHVQGPLTWQQFHKMAGRGTYGSEESPEPLPIPTLLVGYDKDFLTISPFSLPFWERLLLDPYGGHRDVAYIVVCPENEALLEGAKTFFRDLSAVYEMCRLGQHKPICKVLRDGIMRVGKTVAQKLTDELVSEWFNQPWSGEENDNHSRLKLYAQVCRHHLAPYLATLQLDSSLLIPPKYQTPPAAAQGQATPGNAGPLAPNGSAAPPAGSAFNPTSNSSSTNPAASSSASGSSVPPVSSSASAPGISQISTTSSSGFSGSVGGQNPSTGGISADRTQGNIGCGGDTDPGQSSSQPSQDGQESVTERERIGIPTEPDSADSHAHPPAVVIYMVDPFTYAAEEDSTSGNFWLLSLMRCYTEMLDNLPEHMRNSFILQIVPCQYMLQTMKDEQVFYIQYLKSMAFSVYCQCRRPLPTQIHIKSLTGFGPAASIEMTLKNPERPSPIQLYSPPFILAPIKDKQTELGETFGEASQKYNVLFVGYCLSHDQRWLLASCTDLHGELLETCVVNIALPNRSRRSKVSARKIGLQKLWEWCIGIVQMTSLPWRVVIGRLGRLGHGELKDWSILLGECSLQTISKKLKDVCRMCGISAADSPSILSACLVAMEPQGSFVVMPDAVTMGSVFGRSTALNMQSSQLNTPQDASCTHILVFPTSSTIQVAPANYPNEDGFSPNNDDMFVDLPFPDDMDNDIGILMTGNLHSSPNSSPVPSPGSPSGIGVGSHFQHSRSQGERLLSREAPEELKQQPLALGYFVSTAKAENLPQWFWSSCPQAQNQCPLFLKASLHHHISVAQTDELLPARNSQRVPHPLDSKTTSDVLRFVLEQYNALSWLTCNPATQDRTSCLPVHFVVLTQLYNAIMNIL

SEQ ID NO: 1462 - DNA, 3440 bp, Homo sapiens
gctttcagagcatcctcactccgcccagttcggtgccagctgcgtgggctccagcttcgatcgttttccttggaatgctccaaaactcagcagcgactaagggaattccattggaatttgccgggcgtgctctcaccccgcacggcacccgcgccgtcagtcctcggatcccatcacttcagcccgaagattgcaactttgcagagacgaagaaatagcatggcatgaaatatggctcagttctattacaaaagaaatgttaatgctccctatagagaccgcatccctctaaggatagtaagagcagaatcagaactctcgccatcagaaaaagcctacttgaatgctgtggaaaagggagattatgccagtgtcaagaaatccctagaggaagctgaaatttattttaaaatcaatattaattgcattgatcctctcggaagaactgctctcctcattgcaattgaaaatgagaacttggagctcatcgaactactcttaagctttaatgtctatgttggagatgctctattacatgctatcagaaaagaagtcgtcggagctgttgagctgttattgaaccacaaaaaacctagtggagaaaaacaggtgcctcctatactccttgataagcagttctctgaattcactccagacattacaccaatcattttggcagcccatacaaataattatgagataataaaactcttggttcagaaaggagtctcagtgcctcgaccccacgaggtccgctgtaactgtgtggaatgcgtgtccagttcagatgtggacagcctccgtcactcacgctccagactcaacatctacaaggccttggccagtccctctctcattgcactgtcaagcgaagatccttttctcacagcctttcagttaagttgggaacttcaggaactgagcaaggtggaaaatgaattcaagtcggagtatgaagagctgtcacggcagtgcaaacaatttgctaaggacctactggatcagacgagaagttccagagaactggaaatcattcttaattaccgagatgacaatagtctcatagaagaacaaagtggaaatgatcttgcaagactaaaattggccattaagtaccgtcaaaaagagtttgttgcccagcccaattgtcaacagctgctggcatctcgctggtacgatgagtttccaggctggaggagaagacactgggcagtgaagatggtgacatgtttcataataggacttctttttcctgtcttctctgtgtgctacctgatagctcccaaaagcccacttggactgttcatcaggaagccatttatcaagtttatctgccacacagcctcctatttgacttttttgttcctgctgctgcttgcctctcagcacatcgacaggtcagacttgaacaggcaaggtccaccaccaaccatcgtcgagtggatgatattaccgtgggtcctgggcttcatatggggagaaattaaacagatgtgggatggcggacttcaggactacatccatgattggtggaatctaatggactttgtaatgaactccttatatttagcaacaatctccttgaaaattgttgcatttgtaaagtacagtgcccttaatccacgagaatcatgggacatgtggcatcccactctggtggcagaggctttatttgctattgcaaacatcttcagttctctgcgtctgatctcactgtttactgcaaattctcacctgggacctctgcaaatatctctgggaagaatgctcctggacattttgaagtttctattcatatactgccttgtgttgctagcatttgcaaatggcctaaatcaattgtacttctattatgaagaaacgaaagggttaacctgcaaaggcataagatgtgaaaagcagaataatgcattttcaacgttatttgagacactgcagtccctgttttggtcaatatttgggctcatcaatttatatgtgaccaatgtcaaagcacagcatgaatttactgagtttgttggtgccaccatgtttgggacatacaatgtcatctctctggttgttctactcaacatgttaatagctatgatgaataattcttaccaactgattgctgaccatgcagatatagaatggaaatttgcacgaacaaagctttggatgagttattttgaagaaggaggtactctgcctactcccttcaatgtcatcccgagccccaagtctctctggtacctgatcaaatggatctggacacacttgtgcaagaaaaagatgagaagaaagccagaaagttttggaacaatagggaggcgagctgctgataacttgagaagacatcaccaataccaagaagttatgaggaacctggtgaagcgatacgttgctgcaatgattagagatgctaaaactgaagaaggcctgaccgaagagaactttaaggaactaaagcaagacatttctagtttccgctttgaagtcctgggattactaagaggaagcaaactttccacaatacaatctgcgaatgcctcgaaggagtcttcaaattcggcagactcagatgaaaagagtgatagcgaaggtaatagcaaggacaagaaaaagaatttcagcctttttgatttaaccaccctgattcatccgagatcagcagcaattgcctctgaaagacataacataagcaatggctctgccctggtggttcaggagccgcccagggagaagcagagaaaagtgaattttgtgaccgatatcaaaaactttgggttatttcatagacgatcaaaacaaaatgctgctgagcaaaatgcaaaccaaatcttctctgtttcagaagaagttgctcgtcaacaggctgcaggaccacttgagagaaatattcaactggaatctcgaggattagcttcacggggtgacctgagcattcccggtctcagtgaacaatgtgtgttagtagaccatagagaaaggaatacggacacactggggttacaggtaggaaagagagtgtgtccattcaagtcagagaaggtggtggtggaggacacggttcctataataccaaaggagaaacatgcaaaagaagaggactctagtatagactatgatctaaacctcccagacacagtcacccacgaagattacgtgaccacaagattgtgatacttgaaggaggaagcgtttaccatacacatacgtattttccgtagtgctctgggtgggggaaaatgtttaaattgtattagcaaatgctaacttacactttatagcatttatcagctgtggcatattacctgtaacatgtttaaattaaggcaaaggcaatcaaaaacctttttgttttgtagcctgcttttgctttcacaatttgtcttacaattgtttttgttaataaataaatgcaccttgaaaaaaaaaaaaaaaaaaaaaaaaaaaaa

SEQ ID NO: 1463 - protein, 977 aa, Homo sapiens
MAQFYYKRNVNAPYRDRIPLRIVRAESELSPSEKAYLNAVEKGDYASVKKSLEEAEIYFKININCIDPLGRTALLIAIENENLELIELLLSFNVYVGDALLHAIRKEVVGAVELLLNHKKPSGEKQVPPILLDKQFSEFTPDITPIILAAHTNNYEIIKLLVQKGVSVPRPHEVRCNCVECVSSSDVDSLRHSRSRLNIYKALASPSLIALSSEDPFLTAFQLSWELQELSKVENEFKSEYEELSRQCKQFAKDLLDQTRSSRELEIILNYRDDNSLIEEQSGNDLARLKLAIKYRQKEFVAQPNCQQLLASRWYDEFPGWRRRHWAVKMVTCFIIGLLFPVFSVCYLIAPKSPLGLFIRKPFIKFICHTASYLTFLFLLLLASQHIDRSDLNRQGPPPTIVEWMILPWVLGFIWGEIKQMWDGGLQDYIHDWWNLMDFVMNSLYLATISLKIVAFVKYSALNPRESWDMWHPTLVAEALFAIANIFSSLRLISLFTANSHLGPLQISLGRMLLDILKFLFIYCLVLLAFANGLNQLYFYYEETKGLTCKGIRCEKQNNAFSTLFETLQSLFWSIFGLINLYVTNVKAQHEFTEFVGATMFGTYNVISLVVLLNMLIAMMNNSYQLIADHADIEWKFARTKLWMSYFEEGGTLPTPFNVIPSPKSLWYLIKWIWTHLCKKKMRRKPESFGTIGRRAADNLRRHHQYQEVMRNLVKRYVAAMIRDAKTEEGLTEENFKELKQDISSFRFEVLGLLRGSKLSTIQSANASKESSNSADSDEKSDSEGNSKDKKKNFSLFDLTTLIHPRSAAIASERHNISNGSALVVQEPPREKQRKVNFVTDIKNFGLFHRRSKQNAAEQNANQIFSVSEEVARQQAAGPLERNIQLESRGLASRGDLSIPGLSEQCVLVDHRERNTDTLGLQVGKRVCPFKSEKVVVEDTVPIIPKEKHAKEEDSSIDYDLNLPDTVTHEDYVTTRL

SEQ ID NO: 1464 - DNA, 1137 bp, Homo sapiens
atgatggctgcctgtgacccccgccacggccgatacctcaccgtggctgctgtcttccatggtcggatatccatgaaggaggtcgatgagcagatgcttaacgtgcagaacaagaacagcagctactttgtggaatggatccccaacaacgtcaagacagctgtctgtgacatcccacctcgtggcctcaagatggcagtcaccttcattggcaatagctcggccatccaggagctcttcaagcgcatcttggagcagttcactgccatgttcggcaggaaggccttcctccactggtacacaggcgagggcatggactagatggagttcaccgaggctgagagcaacgtgaacgacctcgtctctgagtatcagagtaccaggatgccaccgcagaagaggaggaggattttgttgaggaggccgaagacgaggcctatgacagagcccccatcacctcaggcttttcagttcccttagccatcttactcaactgcccctttcctctccctcagaatttgtgtttgctgcctctatcttgttttttgttttttcttctggggaggtctagaacagtgcctggcacatagtaggcactcaataaatacttgtttgttgaatgtctcctctctctttccactctgggaaacctaggtttctgccattctgggtgaccctgtatttccttctggtgcccattccttccatctgtccagttaatatttctctcttaaaaatctccaagaagctgggtctcatccagatgccatttagaaccaaccaggtgctgaaaacccatgtagataatggccaccatcctaagcccaaagtagaagatggtagaaggcagtgggtagaagtcactatataaggaaggggatgggattttccattctaaaagttttggagagggaaatccaggctattaaagtcactaatttctaagtatgtccatttcccatctcagcttcaagagaggtgtcagcagtattatctccactttcaatctccctctaagctctactctttggaggtgtctgtcccactctgtcaagtggaatcctttcctttccaactctacctccctcactcgagctcctttcccctgatcagagaaagggatcaaggagtggggga

SEQ ID NO: 1465 - protein, 106 aa, Homo sapiens
MMAACDPRHGRYLTVAAVFHGRISMKEVDEQMLNVQNKNSSYFVEWIPNNVKTAVCDIPPRGLKMAVTFIGNSSAIQELFKRILEQFTAMFGRKAFLHWYTGEGMD

SEQ ID NO: 1466 - DNA, 664 bp, Homo sapiens
ttgcctgacatcggtttcacctccaccacggtccccaagatgattgtggacatccagtctcacagcagagtcatctcctatgcaggctgcctgactcagatgtctctctttgccatttttggaggcatggaagagagacatgctcctgagtgtgatggcctatgaccggtttgtagccatctgtcaccctctatatcattcagccatcatgaacccgtgtttctgtggcttcctagttttgttgtctttttttttctgtcctcagtcttttagactcccagctgcacaacttgattgccttacaagtgacctgcttcaaggatgtggaaattcctaatttcttctgtgacccttctcaactcccccatcttgcatgttgtgacaccttcaccaataagataatcatgtatttccctgctgccatatttggttttcttcccatctcagggacccttttctcttactctaaaattgtttcctccattctgagggtttcatcatcaggtgggaagtataaagccttctccacctgtgggtctcacctgtcagttgtttgctgagtttatggaacaggcgttggaggttacctcagttcagatgatgtgtcatcttcccccagaaagggtgcagtggcctcagtgatgtacacggtggtcacccccat

SEQ ID NO: 1467 - DNA, 429 bp, Homo sapiens
atgcgtaggggacctccgcgtccccgacacccgactgggacacggccgcgggctccttcgtccctcaccgccagccagggaggctctgcatgcccacgtccacttcacagccgaggaagctgcggctcgcggaggtgcctggcacgcggcgggaagcagcagagctcgcgcccagcagtcagctctggtgacgccgaggacaccgcgtgggccgggttgtcagggcgcgggggcgagaggcgggtaaatatttggggctgtaaccggggcttcggcgactcctcgtcaccgcggttccagggcgggcgcgtggcgagggcggtgcctgggggcaggggcctcctcggagggcggcggggacagacccgtcgccccggctccgcagccccgccccggccccgcctccgctccggccgccgaaggctataa

SEQ ID NO: 1468 - protein, 142 aa, Homo sapiens
MRRGPPRPRHPTGTRPRAPSSLTASQGGSACPRPLHSRGSCGSRRCLARGGKQQSSRPAVSSGDAEDTAWAGLSGRGGERRVNIWGCNRGFGDSSSPRFQGGRVARAVPGGRGLLGGRRGQTRRPGSAAPPRPRLRSGRRRL

SEQ ID NO: 1469 - DNA, 895 bp, Homo sapiens
gcggccgcgtcgaccggcgcggctggagcgcagcgccgaagggactggcagggctgaagtgtgcgggacagcaagcccccgaatagccccggctgccacctcgcaggacccaaggccacgcgcgccgggcccagctgagccgcctcatgaagccgcccgcggaggacctgtcggacgcgctgtgcgagtttgacgcggtgctggccgacttcgcgtcgcccttccacgagcgccacttccactacgaggagcacctggagcgcatgaagcggcgcagcagcgccagtgtcagcgacagcagcggcttcagcgactcggagagtgcagattcactttataggaacagcttcagcttcagtgatgaaaaactgaattctccaacagactctaccccagctcttctctctgccactgtcactcctcagaaagctaaattaggagacacaaaagagctagaagccttcattgctgatcttgacaaaactttagcaagtatgtgaaacaagaagttctgggtcctttcatcataagggagaagcttcagaaagttccgaggacctgctaaaatcagctactagaatctgctgccagaggggacaaagacgtgcactcaaccttctaccaggccactctcaggctcaccttaaaatcagcccttgatcccatttctgggcaatttagacagtgaaactgactttgtttacctgcttgcagcatattagaacagacgatccatgctaatattgtattttctcttaaaacatagctttcctgtaatttaaagtgcttttatgaaaatatttgtaattaattatatatagttggaaatagcagtaagctttcccattataatatatttttgtatacaaataaaatttgaactgaacctcgtgcc

SEQ ID NO: 1470 - protein, 117 aa, Homo sapiens
MKPPAEDLSDALCEFDAVLADFASPFHERHFHYEEHLERMKRRSSASVSDSSGFSDSESADSLYRNSFSFSDEKLNSPTDSTPALLSATVTPQKAKLGDTKELEAFIADLDKTLASM

SEQ ID NO: 1471 - DNA, 3453 bp, Homo sapiens
cacggtgcctgcacgggacgccgctcgatccccgagccccctcgccgtccccgacagcccccccggcgccatgcaatcccggcttctactcctcggggcacccggaggccacggcggcccggcctcgcggcgcatgcggctgctcctgcggcaggtggtgcagcgcaggccgggtggcgacaggcagcggccggaggtcagactgttgcacgccggctcgggggccgacacaggtgatacagttaatattggagatgtatcctacaagttgaaaattcctaagaatccagaacttgtgccacagaactacatttcagactctctggctcaatctgtagttcagcatctaagatggataatgcagaaggatcttttggggcaagatgtttttctaataggacctcctgggcctcttcgacgctctattgctatgcagtacttggagctgaccaaacgggaggtcgaatacattgccctgtcaagggacaccactgaaactgatctcaaacagcgacgagagatccgtgcaggcacagccttttacattgatcagtgtgcagttcgtgcagccacagaaggcagaactctcattttggaaggtttggaaaaggcagagaggaatgttttgcctgttttgaacaacttgctggaaaacagagagatgcagcttgaagatggacgcttcctgatgtctgctgagcgttacgacaaacttctccgagatcataccaaaaaagagttggattcttggaaaattgtccgagttagtgaaaatttccgagtgattgccttgggcttgccagtgccaaggtattctgggaatccattagacccccctcttcgttctcgatttcaagccagggatatttattatttacccttcaaggaccaacttaagttgttatattcaattggagccaatgtttctgctgagaaagtttctcagctcttgtcctttgccacaactctgtgttcccaagaatcttctactcttggacttccagactttcctttagatagtttagcagctgcggttcaaatcttggattcctttcctatgatgccaatcaaacatgcaatccagtggctttatccatatagtattttactaggtcatgaagggaagatggctgtggaaggtgttttaaagcgctttgaacttcaagattcaggaagctctctacttcctaaagagattgtaaaagtagagaagatgatggaaaaccatgtgtcccaagcttctgtgaccatccggattgcagataaagaggtgaccattaaggtgccagccgggaccaggctattaagtcaaccttgtgcgtcagaccgtttcatacagactttgagccataagcagctacaggctgaaatgatgcagtctcacatggttaaagatatatgtttaattggaggaaagggttgtggaaaaacagtgatcgctaagaactttgccgataccttaggatacaacatagaacctattatgctctatcaggatatgacagcgcgtgatctgctacagcagagatacacccttccaaatggagacactgcctggcggtcctcaccccttgtgaatgctgctctggaaggcaagctggtcctgctggatggcattcaccgggtgaatgcgggcacgcttgctgtattgcaaaggttaatccatgatcgagagctaagcctctatgatggttctaggctgctgagagaagacaggtatatgcgtttaaaggaggagctgcaactgtctgatgaacagctacagaagagatccatttttcctatccatccctccttcagaatcattgccttggcagaaccccctgttattggaagcacagcacaccagtggctgggaccagaattcttaaccatgttctttttccattacatgaaaccacttgtgaaaagtgaagaaatccaagtgattaaggaaaaggtcccaaatgtacctcaggaagctctggataagttattatcatttacacacaaactcagagaaacacaggatccaacggcacaatcattagcggcatcactttctaccagacaactgttgcgaatttctcgtcggctgtcacagtatcctaatgaaaatcttcacagtgctgttactaaagcctgcctttccaggtttttacccagtcttgctaggtcagcattagaaaaaaatctggcagatgctacaatagaaataaatactgatgacaatttggagccagaactgaaggattacaaatgtgaagtaacatctggaactctgaggattggtgctgttagtgcaccgatctataatgcacatgagaaaatgaaagtgcctgatgttcttttctatgacaacattcagcatgtgatagtgatggaagatatgctgaaagactttctccttggagaacacttattattggttggcaaccagggtgtaggaaaaaacaagattgttgacagattccttcacctgctcaacagaccccgagaatatattcagctacacagggataccacagtacaaactcttacgcttcagccttcggttaaagacggacttattgtatatgaagactcacctttggttaaagcagtaaagttgggtcatattctggtagtagatgaggctgacaaagctccaacaaatgtcacgtgtattttaaaaactctagtagaaaatggagaaatgattctagcagatggaagacgcattgttgcaaattctgctaatgtgaatggaagagaaaatgttgtagtgattcatcctgattttaggatgattgttctggcaaatagacctggatttcctttcctaggcaatgatttcttcggtaccttaggtgatatttttagctgccatgcagttgataaccccaaaccccactcggagctcgagatgctcagacagtatggaccaaatgtgcctgagcccatccttcagaagcttgtggctgcctttggagagctgaggagtttggctgaccaagggattattaactatccttattctaccagagaagttgtcaacatagtcaaacatttacagaaatttccgactgaaggtctctccagtgtagttcgaaatgtgtttgactttgattcctacaacaatgacatgagggagatattgattaacactttacacaaatacgggatacctatcggagcaaagcctaccagtgtgcagctggcaaaggagtaaggcaaattcagtactcttctgattcttaaatgctgatagttcttgatttatcattccattctacaaaactgagttgctatggaaattactttccatgagtaagcttttcaaatacatgtatatgttgctgtttgctggctgcttttcagttaaatagcattatttataggcctgtaaattgaaaattttgattattatgtatgtcccatgagtagatgtaataaataaagggaaatatttgtttctttaaaaaaaaaaaaaaa

SEQ ID NO: 1472 - protein, 1039 aa, Homo sapiens
MQSRLLLLGAPGGHGGPASRRMRLLLRQVVQRRPGGDRQRPEVRLLHAGSGADTGDTVNIGDVSYKLKIPKNPELVPQNYISDSLAQSVVQHLRWIMQKDLLGQDVFLIGPPGPLRRSIAMQYLELTKREVEYIALSRDTTETDLKQRREIRAGTAFYIDQCAVRAATEGRTLILEGLEKAERNVLPVLNNLLENREMQLEDGRFLMSAERYDKLLRDHTKKELDSWKIVRVSENFRVIALGLPVPRYSGNPLDPPLRSRFQARDIYYLPFKDQLKLLYSIGANVSAEKVSQLLSFATTLCSQESSTLGLPDFPLDSLAAAVQILDSFPMMPIKHAIQWLYPYSILLGHEGKMAVEGVLKRFELQDSGSSLLPKEIVKVEKMMENHVSQASVTIRIADKEVTIKVPAGTRLLSQPCASDRFIQTLSHKQLQAEMMQSHMVKDICLIGGKGCGKTVIAKNFADTLGYNIEPIMLYQDMTARDLLQQRYTLPNGDTAWRSSPLVNAALEGKLVLLDGIHRVNAGTLAVLQRLIHDRELSLYDGSRLLREDRYMRLKEELQLSDEQLQKRSIFPIHPSFRIIALAEPPVIGSTAHQWLGPEFLTMFFFHYMKPLVKSEEIQVIKEKVPNVPQEALDKLLSFTHKLRETQDPTAQSLAASLSTRQLLRISRRLSQYPNENLHSAVTKACLSRFLPSLARSALEKNLADATIEINTDDNLEPELKDYKCEVTSGTLRIGAVSAPIYNAHEKMKVPDVLFYDNIQHVIVMEDMLKDFLLGEHLLLVGNQGVGKNKIVDRFLHLLNRPREYIQLHRDTTVQTLTLQPSVKDGLIVYEDSPLVKAVKLGHILVVDEADKAPTNVTCILKTLVENGEMILADGRRIVANSANVNGRENVVVIHPDFRMIVLANRPGFPFLGNDFFGTLGDIFSCHAVDNPKPHSELEMLRQYGPNVPEPILQKLVAAFGELRSLADQGIINYPYSTREVVNIVKHLQKFPTEGLSSVVRNVFDFDSYNNDMREILINTLHKYGIPIGAKPTSVQLAKE

SEQ ID NO: 1473 - DNA, 7169 bp, Homo sapiens
cacggtgcctgcacgggacgccgctcgatccccgagccccctcgccgtccccgacagcccccccggcgccatgcaatcccggcttctactcctcggggcacccggaggccacggcggcccggcctcgcggcgcatgcggctgctcctgcggcaggtggtgcagcgcaggccgggtggcgacaggcagcggccggaggtcagactgttgcacgccggctcgggggccgacacaggtgatacagttaatattggagatgtatcctacaagttgaaaattcctaagaatccagaacttgtgccacagaactacatttcagactctctggctcaatctgtagttcagcatctaagatggataatgcagaaggatcttttggggcaagatgtttttctaataggacctcctgggcctcttcgacgctctattgctatgcagtacttggagctgaccaaacgggaggtcgaatacattgccctgtcaagggacaccactgaaactgatctcaaacagcgacgagagatccgtgcaggcacagccttttacattgatcagtgtgcagttcgtgcagccacagaaggcagaactctcattttggaaggtttggaaaaggcagagaggaatgttttgcctgttttgaacaacttgctggaaaacagagagatgcagcttgaagatggacgcttcctgatgtctgctgagcgttacgacaaacttctccgagatcataccaaaaaagagttggattcttggaaaattgtccgagttagtgaaaatttccgagtgattgccttgggcttgccagtgccaaggtattctgggaatccattagacccccctcttcgttctcgatttcaagccagggatatttattatttacccttcaaggaccaacttaagttgttatattcaattggagccaatgtttctgctgagaaagtttctcagctcttgtcctttgccacaactctgtgttcccaagaatcttctactcttggacttccagactttcctttagatagtttagcagctgcggttcaaatcttggattcctttcctatgatgccaatcaaacatgcaatccagtggctttatccatatagtattttactaggtcatgaagggaagatggctgtggaaggtgttttaaagcgctttgaacttcaagattcaggaagctctctacttcctaaagagattgtaaaagtagagaagatgatggaaaaccatgtgtcccaagcttctgtgaccatccggattgcagataaagaggtgaccattaaggtgccagccgggaccaggctattaagtcaaccttgtgcgtcagaccgtttcatacagactttgagccataagcagctacaggctgaaatgatgcagtctcacatggttaaagatatatgtttaattggaggaaagggttgtggaaaaacagtgatcgctaagaactttgccgataccttaggatacaacatagaacctattatgctctatcaggatatgacagcgcgtgatctgctacagcagagatacacccttccaaatggagacactgcctggcggtcctcaccccttgtgaatgctgctctggaaggcaagctggtcctgctggatggcattcaccgggtgaatgcgggcacgcttgctgtattgcaaaggttaatccatgatcgagagctaagcctctatgatggttctaggctgctgagagaagacaggtatatgcgtttaaaggaggagctgcaactgtctgatgaacagctacagaagagatccatttttcctatccatccctccttcagaatcattgccttggcagaaccccctgttattggaagcacagcacaccagtggctgggaccagaattcttaaccatgttctttttccattacatgaaaccacttgtgaaaagtgaagaaatccaagtgattaaggaaaaggtcccaaatgtacctcaggaagctctggataagttattatcatttacacacaaactcagagaaacacaggatccaacggcacaatcattagcggcatcactttctaccagacaactgttgcgaatttctcgtcggctgtcacagtatcctaatgaaaatcttcacagtgctgttactaaagcctgcctttccaggtttttacccagtcttgctaggtcagcattagaaaaaaatctggcagatgctacaatagaaataaatactgatgacaatttggagccagaactgaaggattacaaatgtgaagtaacatctggaactctgaggattggtgctgttagtgcaccgatctataatgcacatgagaaaatgaaagtgcctgatgttcttttctatgacaacattcagcatgtgatagtgatggaagatatgctgaaagactttctccttggagaacacttattattggttggcaaccagggtgtaggaaaaaacaagattgttgacagattccttcacctgctcaacagaccccgagaatatattcagctacacagggataccacagtacaaactcttacgcttcagccttcggttaaagacggacttattgtatatgaagactcacctttggttaaagcagtaaagttgggtcatattctggtagtagatgaggctgacaaagctccaacaaatgtcacgtgtattttaaaaactctagtagaaaatggagaaatgattctagcagatggaagacgcattgttgcaaattctgctaatgtgaatggaagagaaaatgttgtagtgattcatcctgattttaggatgattgttctggcaaatagacctggatttcctttcctaggcaatgatttcttcggtaccttaggtgatatttttagctgccatgcagttgataaccccaaaccccactcggagctcgagatgctcagacagtatggaccaaatgtgcctgagcccatccttcagaagcttgtggctgcctttggagagctgaggagtttggctgaccaagggattattaactatccttattctaccagagaagttgtcaacatagtcaaacatttacagaaatttccgactgaaggtctctccagtgtagttcgaaatgtgtttgactttgattcctacaacaatgacatgagggagatattgattaacactttacacaaatacgggatacctatcggagcaaagcctaccagtgtgcagctggcaaaggagttgactctgccagaacaaacgttcatgggctactggacaattggtcaggcaagaagtgggatgcaaaaactcttgtgtccagtggaaactcatcatatagacataaagggtccagcacttataaatatacaggagtatccaatagaaagacatgaagaaagatccctaaactttactgaagaatgtgcctcatggagaataccattggatgaaattaatataatctgtgacattgctacatcacatgaaaatgagcaaaatactctctatgtagttacatgcaatcccgcttccctgtactttatgaatatgactgggaaaagtggcttctttgtggacttttttgatatcttcccaagaacagccaatggcgtttggcacccttttgtgacagtggcaccgctgggaagtcctctcaaaggtcaagtggttctccatgagcagcagagtaatgttatcctgttgttagatactactggccgggcccttcatcgtctcatcctcccttccgagaagtttacatctaagaaacctttctggtggaacaaagaagaagctgaaacttataaaatgtgtaaagaattttcacacaaaaactggctggtgttctacaaagaaaaagggaacagcctgactgtgctggatgttctagaagggcgaactcacaccatctcacttcccatcaacctcaagacagttttccttgtagcagaggacaaatggcttctggtggagagcaaaacaaatcagaaatatcttttaactaagcctgcacacatcgaatctgagggtagtggggtttgccagttgtatgtgctgaaagaggagccgcccagcacagggtttggagttacacaagaaacagagttcagcatacctcataaaatttccagtgatcaactatcatctgaacatctaagttcagctgtggaacaaaagattgcctctcccaacagaattctctcagatgagaaaaattatgctacaatagttgttggttttccagatctcatgtcacccagtgaagtttattcttggaagagaccatcatctttgcataaacgaagtggcactgatacatcattctatagaggaaagaagaaaagggggactccaaaacaaagcaattgtgtgactcttttagatacgaatcaggtagtgaggattttacccccaggagaagtccctctaaaagatatctacccaaaagatgttactcctccacaaacatctggttatatagaagtcactgatcttcaatcaaagaaactccgatatatccctattcccagatcagaatctctctcgccgtataccacatggctgtcgaccatttcagacacagatgcactgctggctgagtgggacaaaagcggtgttgttactgttgatatgggaggtcacatcaggctttgggaaactggacttgaacgtctgcagcgatcactcatggaatggagaaacatgattggacaagatgacagaaatatgcagataacaatcaacagagacagtggtgaagatgtaagctcccccaaacacgggaaggaggacccagacaacatgcctcacgtgggcggcaacacttgggctggcggaacagggggaagagacacggcaggcctgggtggcaaaggaggcccttaccggctggatgcaggccatacggtgtaccaggtctctcaggctgagaaagatgcagttcccgaagaggtcaagagagctgctagagagatgggccagagagcattccagcagaggctaaaggagatccaaatgagtgaatacgatgctgcaacctatgaaaggttttcaggtgctgttcggcgacaggtgcactccctccgaatcatcctggataatttacaggctaaaggtaaagaaagacaatggctaagacatcaagctactggagaattagatgatgccaagatcattgatgggctgactggagaaaaagccatctacaaacgtcggggtgagctggagccacaacttggcagcccacaacagaaacccaagcgtctgcgcctggtggtagatgtgtctggtagcatgtaccgtttcaacaggatggatggccggcttgagcgcacaatggaggctgtgtgtatggtcatggaagccttcgagaactatgaggagaagttccagtatgacatcgttggacactctggagatggctacaacattggtctggttccaatgaacaaaatccccaaggacaataagcaaagactagaaattctgaagacaatgcatgcccactctcagttctgcatgagtggggaccacacgttagaagggacagaacatgccatcaaggaaattgtcaaagaagaagctgatgagtactttgtcatagtcttgagtgatgcaaatctgtcacgatatggaatacatcctgctaagtttgctcaaatcctcacaagagaccctcaagtaaatgcttttgccatttttattggctctttaggtgatcaagcaaccaggcttcagagaactttaccagctggtcggtctttcgttgccatggataccaaggatatccctcagattttacaacagatcttcacctccaccatgttgtcgagtgtctaagaagtgcccttcatcaccctgatgacaccaggatttgaaataagacaggaataaagagtattctgaaaaaaagaagatatggatgaagtgaacccatgcagtgactggatgattccggcattcctgggtcttcctacacttgctccgtaatgagaattcagagaagcagccagaaggagacttaaacatggaaagatactccactgatgagtttagaagtgattagggcaagctagttgacctgcactttatcaaaggttggggttaaaggaaggtggttttgagaactatgtgtttggtctatttccaaaaacctgagggggagaaaatactttgcttttgccttaacacatcatctggtcacgttagaaaagtgaccccatcaaactgagcctttgatgtcacattctgacacaagatgcaagtctgtgcaaaacccaccaaaatgctcctatccaacaattatttttattttctccctgctctgtattgaccagaaaacaatgattttataatatttaacccaccaaaaagtccctccaacagcaatatcttatgaaaggctggctgttctcaataatttcattttcttggccaaagccaaaaggaatcaaaaaatccttggagtgcttgcctttccacgtgacttttaaaaggctcttaaagagcaaatgtcctcttctccttgctgctagagtgggaggagaaagatgtcttgccttaaaagtttactgtttcttctgttcttctagcatctctcaaaaaattcacagtactccattttggggtccaaactgtaatgctcaaaataataaatgcttacacgaaaattatttattgagaatattcatataaaaattacctaaagcaaagtaaaaaaagtaaaatcaaggtggtatatttgaagtgaatggtgattggaaatttttagctgtaacaaaaagaaagaaaacaactttttttaaagcctcattctcttttctttcaaaatgtaccttattcccacacactcttgggctgacctttattttatcaataagctcaatattactttgtttaaaataagatgcttcagcaaaagtcattctctctttaaccatataatttaaaaactcctcttcacgattgatagcaaaatcagaaacgttagggcaccagtgagttgaaaaaactggtcttaagttggaaaaactattattaataatattatcctatccatccatatctattgaaattgtacaggtccataatttcattttaattaattataggaaagaagaaaagataatacccatttgttctatcacccctctccctatcattaactatcaaataaataaataaaagcaatctgatttccaacgtggtactaaaaaaaaaa

SEQ ID NO: 1474 - protein, 1905 aa, Homo sapiens
MQSRLLLLGAPGGHGGPASRRMRLLLRQVVQRRPGGDRQRPEVRLLHAGSGADTGDTVNIGDVSYKLKIPKNPELVPQNYISDSLAQSVVQHLRWIMQKDLLGQDVFLIGPPGPLRRSIAMQYLELTKREVEYIALSRDTTETDLKQRREIRAGTAFYIDQCAVRAATEGRTLILEGLEKAERNVLPVLNNLLENREMQLEDGRFLMSAERYDKLLRDHTKKELDSWKIVRVSENFRVIALGLPVPRYSGNPLDPPLRSRFQARDIYYLPFKDQLKLLYSIGANVSAEKVSQLLSFATTLCSQESSTLGLPDFPLDSLAAAVQILDSFPMMPIKHAIQWLYPYSILLGHEGKMAVEGVLKRFELQDSGSSLLPKEIVKVEKMMENHVSQASVTIRIADKEVTIKVPAGTRLLSQPCASDRFIQTLSHKQLQAEMMQSHMVKDICLIGGKGCGKTVIAKNFADTLGYNIEPIMLYQDMTARDLLQQRYTLPNGDTAWRSSPLVNAALEGKLVLLDGIHRVNAGTLAVLQRLIHDRELSLYDGSRLLREDRYMRLKEELQLSDEQLQKRSIFPIHPSFRIIALAEPPVIGSTAHQWLGPEFLTMFFFHYMKPLVKSEEIQVIKEKVPNVPQEALDKLLSFTHKLRETQDPTAQSLAASLSTRQLLRISRRLSQYPNENLHSAVTKACLSRFLPSLARSALEKNLADATIEINTDDNLEPELKDYKCEVTSGTLRIGAVSAPIYNAHEKMKVPDVLFYDNIQHVIVMEDMLKDFLLGEHLLLVGNQGVGKNKIVDRFLHLLNRPREYIQLHRDTTVQTLTLQPSVKDGLIVYEDSPLVKAVKLGHILVVDEADKAPTNVTCILKTLVENGEMILADGRRIVANSANVNGRENVVVIHPDFRMIVLANRPGFPFLGNDFFGTLGDIFSCHAVDNPKPHSELEMLRQYGPNVPEPILQKLVAAFGELRSLADQGIINYPYSTREVVNIVKHLQKFPTEGLSSVVRNVFDFDSYNNDMREILINTLHKYGIPIGAKPTSVQLAKELTLPEQTFMGYWTIGQARSGMQKLLCPVETHHIDIKGPALINIQEYPIERHEERSLNFTEECASWRIPLDEINIICDIATSHENEQNTLYVVTCNPASLYFMNMTGKSGFFVDFFDIFPRTANGVWHPFVTVAPLGSPLKGQVVLHEQQSNVILLLDTTGRALHRLILPSEKFTSKKPFWWNKEEAETYKMCKEFSHKNWLVFYKEKGNSLTVLDVLEGRTHTISLPINLKTVFLVAEDKWLLVESKTNQKYLLTKPAHIESEGSGVCQLYVLKEEPPSTGFGVTQETEFSIPHKISSDQLSSEHLSSAVEQKIASPNRILSDEKNYATIVVGFPDLMSPSEVYSWKRPSSLHKRSGTDTSFYRGKKKRGTPKQSNCVTLLDTNQVVRILPPGEVPLKDIYPKDVTPPQTSGYIEVTDLQSKKLRYIPIPRSESLSPYTTWLSTISDTDALLAEWDKSGVVTVDMGGHIRLWETGLERLQRSLMEWRNMIGQDDRNMQITINRDSGEDVSSPKHGKEDPDNMPHVGGNTWAGGTGGRDTAGLGGKGGPYRLDAGHTVYQVSQAEKDAVPEEVKRAAREMGQRAFQQRLKEIQMSEYDAATYERFSGAVRRQVHSLRIILDNLQAKGKERQWLRHQATGELDDAKIIDGLTGEKAIYKRRGELEPQLGSPQQKPKRLRLVVDVSGSMYRFNRMDGRLERTMEAVCMVMEAFENYEEKFQYDIVGHSGDGYNIGLVPMNKIPKDNKQRLEILKTMHAHSQFCMSGDHTLEGTEHAIKEIVKEEADEYFVIVLSDANLSRYGIHPAKFAQILTRDPQVNAFAIFIGSLGDQATRLQRTLPAGRSFVAMDTKDIPQILQQIFTSTMLSSV

SEQ ID NO: 1475 - DNA, 1649 bp, Homo sapiens
aatttttgtatttttagtagagacggggtttcaccatgttggttaggctggtgttgaactcctgacctcgtgatccgccctcctcggcctcccaaagtgctgggattacaggcgtgagccactgctcccggcgtttgggttttttaagctattcaaattaagactagactggaatctggagcagtgtgtgtgacaacccctctctgcacacccaactttccccgggccggctagtgactcaaagcgacagcccagatttaagaaaacgaaacctagtgcagctggggcacttccgggatctcgctatccggccgccacccgcagctgcagcacagtcatggcccaggcgtcgccgccccggcccgagagggtgctcggcgccagcagcccggaggcccggcccgcgcaggaggcgctcctccttcccaccggtgtctttcaggttgcagaaaagatggaaaaaaggacatgtgcactctgccccaaagatgtcgaatataatgtcctatactttgcacaatcagagaatatagctgctcatgagaattgtttgctgtattcttcaggacttgtggaatgtgaggatcaggatccacttaatcctgatagaagttttgatgtggaatcagtaaagaaagaaatccagagaggaaggaagttgaaatgcaaattttgtcataaaagaggagccaccgtgggatgtgatttaaaaaactgtaacaagaattaccactttttctgtgccaagaaggacgacgcagttccacagtctgatggagttcgaggaatttataaactgctttgccagcaacatgctcaattcccgatcatcgctcaaagtgctaaattttcaggagtgaaaagaaaaagaggaaggaagaaacccctctcaggcaatcatgtacagccacccgaaacaatgaaatgtaatacattcataagacaagtgaaagaagagcatggcagacacacagatgcaactgtgaaagttccttttcttaagaaatgcaaggaagcaggacttcttaattacttacttgaagaaatattagacaaagttcattcaattccagaaaaactcatggatgagactacttcagaatcagactatgaagaaatcgggagtgcactttttgactgtagattgttcgaagacacatttgtaaattttcaagcagcaatagagaaaaaaattcatgcatctcaacaaaggtggcagcagttgaaggaagagattgagctacttcaggacttaaaacaaaccttgtgctcttttcaagaaaatagagatcttatgtcaagttctacatcaatatcatccctgtcttattagggattaccgtttcctaagccaagagtcatgtcaaattgcaatcaggctcaaaaccagagaccaggctgtgaaatccacacatctttagaactagtcgtctcctcttggcctcagcagctcttccctgttcttactggttgacattttgatcactctttgcacactcttgtgttttttgctcactgtcacattcccagcacctagtatgctcagtaaatgtttgtggaataagtgcataaaatgttcttaacctttgattctacttacagcccatgatagcctcttagatataataaatttggattatactacttta

SEQ ID NO: 1476 - protein, 331 aa, Homo sapiens
MAQASPPRPERVLGASSPEARPAQEALLLPTGVFQVAEKMEKRTCALCPKDVEYNVLYFAQSENIAAHENCLLYSSGLVECEDQDPLNPDRSFDVESVKKEIQRGRKLKCKFCHKRGATVGCDLKNCNKNYHFFCAKKDDAVPQSDGVRGIYKLLCQQHAQFPIIAQSAKFSGVKRKRGRKKPLSGNHVQPPETMKCNTFIRQVKEEHGRHTDATVKVPFLKKCKEAGLLNYLLEEILDKVHSIPEKLMDETTSESDYEEIGSALFDCRLFEDTFVNFQAAIEKKIHASQQRWQQLKEEIELLQDLKQTLCSFQENRDLMSSSTSISSLSY

SEQ ID NO: 1477 - DNA, 1471 bp, Homo sapiens
agcccagtgcttccaccacaaccgatgtcaactctcctagcgcccctccgctcaccggtaaaccaggacagtggaggggcgccctgatgcgggcaagactcagccaaaggtggaaaagttgaaggggtgttcccagcagagaggatgacacaaaggcaccaaaccacaaaacgtcacacgtaaacatcatacgtggcaaccacaagccaatcagttggatatttcattcattggtatacatatggactgtaaggtgtctttcaggttgcagaaaagatggaaaaaaggacatgtgcactctgccccaaagatgtcgaatataatgtcctatactttgcacaatcagagaatatagctgctcatgagaattgtttgctgtattcttcaggacttgtggaatgtgaggatcaggatccacttaatcctgatagaagttttgatgtggaatcagtaaagaaagaaatccagagaggaaggaagttgaaatgcaaattttgtcataaaagaggagccaccgtgggatgtgatttaaaaaactgtaacaagaattaccactttttctgtgccaagaaggacgacgcagttccacagtctgatggagttcgaggaatttataaactgctttgccagcaacatgctcaattcccgatcatcgctcaaagtgctaaattttcaggagtgaaaagaaaaagaggaaggaagaaacccctctcaggcaatcatgtacagccacccgaaacaatgaaatgtaatacattcataagacaagtgaaagaagagcatggcagacacacagatgcaactgtgaaagttccttttcttaagaaatgcaaggaagcaggacttcttaattacttacttgaagaaatattagacaaagttcattcaattccagaaaaactcatggatgagactacttcagaatcagactatgaagaaatcgggagtgcactttttgactgtagattgttcgaagacacatttgtaaattttcaagcagcaatagagaaaaaaattcatgcatctcaacaaaggtggcagcagttgaaggaagagattgagctacttcaggacttaaaacaaaccttgtgctcttttcaagaaaatagagatcttatgtcaagttctacatcaatatcatccctgtcttattagggattaccgtttcctaagccaagagtcatgtcaaattgcaatcaggctcaaaaccagagaccaggctgtgaaatccacacatctttagaactagtcgtctcctcttggcctcagcagctcttccctgttcttactggttgacattttgatcactctttgcacactcttgtgttttttgctcactgtcacattcccagcacctagtatgctcagtaaatgtttgtggaataagtgcataaaatgttcttaacctttgattctacttacagcccatgatagcctcttagatataataaatttggattatactacttta

SEQ ID NO: 1478 - protein, 292 aa, Homo sapiens
MEKRTCALCPKDVEYNVLYFAQSENIAAHENCLLYSSGLVECEDQDPLNPDRSFDVESVKKEIQRGRKLKCKFCHKRGATVGCDLKNCNKNYHFFCAKKDDAVPQSDGVRGIYKLLCQQHAQFPIIAQSAKFSGVKRKRGRKKPLSGNHVQPPETMKCNTFIRQVKEEHGRHTDATVKVPFLKKCKEAGLLNYLLEEILDKVHSIPEKLMDETTSESDYEEIGSALFDCRLFEDTFVNFQAAIEKKIHASQQRWQQLKEEIELLQDLKQTLCSFQENRDLMSSSTSISSLSY

SEQ ID NO: 1479 - DNA, 4042 bp, Homo sapiens
gacccggcgggcccggcgccctggcgctcctcctcttcgctgccggtgggcaccgccgctcgctcgcacttctgcgcccattggagcttcggagatccctgcggtcccgcgggacggcgcggcagcagctgacctcgcagacaggatcttgctctcttgcccagactggaatacagtggtgtgaacacggctcactgcagcctcaacctcctggactcagagatgtcggcttatttataggaattgcttgaagccagagtcatggtggatgtcggaaagtggcccatcttcactctactctcccctcaagagatcgcgtctattcggaaggcgtgtgtcttcggcacctcagccagtgaagcactgtacgttactgacaatgatgaggtctttgtatttggactgaactatagtaactgtctaggaactggagataaccagagtacacttgtacccaaaaagctagaaggcttatgtggaaagaagattaaaagcctcagttacgggagtggaccacatgttcttctcagcaccgaagatggagtggtttatgcctggggccacaatggatatagccagcttgggaatgggacgaccaaccaaggcattgctcccgtccaggtctgtaccaatctcttgatcaagcaagtggtggaagtagcttgtggctcacatcattcaatggctctggcagctgatggagaggtgtttgcttggggttataacaactgtggccaagtgggatcaggttctacagcaaatcaaccaactcctcgaaaagttacaaactgtttacatattaagagggtagttggcattgcctgtggtcagacttcatccatggctgttctggacaatggcgaggtatatggctggggttacaatggcaacggtcagctgggcctgggaaacaatggcaaccagctgacccctgtgagagtggcagctttgcacagcgtgtgtgtgaaccagattgtctgcggttacgcacatactctagcactaacagatgagggcttgctgtatgcctggggagctaacacatatgggcagctgggaactggcaataaaaataacctgctaagcccagcacacatcatggtggagaaagaaagggtggtagagattgcagcctgtcactctgcccacacgtctgcagccaagacgcagggtgggcacgtgtacatgtggggccagtgccggggtcagtccgtgatcctcccgcacctcacccacttctcctgcaccgacgacgtgtttgcctgctttgccactcccgccgtctcgtggcgcctcctgtctgtggagcatgaagactttttaacagttgcagagtcactgaagaaagaatttgatagtccagaaactgctgatctgaagtttcgaattgatggaaaatatattcatgtccataaagctgttttgaaaatcaggtgtgagcattttcgatccatgttccagtcgtattggaatgaagacatgaaggaagtgatagaaatcgatcagttttcttacccagtgtatcgtgcctttctccagtacctctacacagacacagtcgacctgccgccagaagatgctataggtcttctggatttggcgacatcttactgtgaaaacagactgaaaaaactttgtcagcacattatcaagagaggaattactgtggagaatgccttttcgctattctctgctgcagtcagatatgatgcagaggatttagaagaattctgctttaagttttgcatcaatcatttgacagaagttacacagactgcagcattttggcaaatggatggccctctgctaaaggaattcattgctaaagccagtaaatgtggagcctttaagaactgaagcgcaaggctgctgggttctgtgtgagtgctctggggcactgttgaggatgtgtccagtttgtgctctacgggtgatgtgattctgcaggtaaaagaccatcaggttgtttttttccacatctgggacacagttgtttgtgtaggaacataacaagggtgtacggcttttcttgagcccattttaaacaacccttgtttccagataagtgtattttaaatgtgacctttcgtaaatttgggctggaacatgtaaaagggtgaaagttagtcgtttttggtcttcttttcatttttgattagaggaacttctgaacttggaaaggggaagttggcagcaactctcctgggccacgtatcaacaatcttctgacagcaggagcagtgatagttggggaattgtgagatgaatggagaggccccatcgtgaattaaagatgctgacctggggattgttaagtgctgccttagttgctagtttagtagccttactgtgaaggaataattaagattgtttcagacttttgtttgtgtgcttgcgttgatgacttttttaacttcaagataaatcaaagtaataagtttaacgtatattaaacctgttgaaatgataattatgtaaagataaatattctaggttagtcaagatttctcttaagatttaagtgcataaagaatagtaatttagaagtatccgtgaaaagttgataatgaaagaaatttgatgaaggtgaatattttataaattagaatctccactacttatccaatggtgttttatttcattaaggtagaacttgagaactcaagtttaaattgtcccccaccaccttcttctataaatgcaaacttaagaggaaaataatgacatgtatagtatactcttgccttcctaaattatgactgctgaatcatcatatctactatatatgactggaagaagtggttcttcaagtcaaccctcttacaagacttagtggaatttgctttatctactttaggccaaatccatcacacattggcttatgtgaaactttatcatctttcacttttggttttcctctgtttttaaacatcttaggtataacagcacaatttcaccttgaaaaagcaccaaaattatggtgttcctgaaaagatcctattaaaagacagtagtttatttgaactggttatggaaggtgactttgggatgtaagagtgttcaactgtgagtttcatcatgtgtgtccgttgagcttgcttttaagagcaatgttttgctttgctctctggtccatgaactcatttccatttgagtgagttcccttagtgaattttgtctcctgcttggaaagtctctcttctgaacctggagcctgaatacattttcagagccaaattacaagtgggtgaagacatgctacaactactatttttagcaatgtttttaaatttgtgtctattggggtgggaaggggagtgaggccctaaagataggaattcactgatagctgaaatagatacaagcctaggagccccagcccccttttcttgaccatatcacaagtgattgaagcccagtgaattagtcggttagaattcgttctacaacatgatagaacttttcttactagcttcagaaatgcacattgatttgtgctatgatgggtggtgtttgtaacaatcactgttctataggcttatgatctgagcaaaatgtgaacttcagtatgtttactattgctcttacttgaaaactttttttcaaaaaaagcacaaattaaagtagtaaattcatatccatagatagttcattcattcaacaaatatttaccaagttcctaatataagtgaaggaccacttctcatattagattactaagtcatttgtatgaatatgtgtggcagtgaagagaacaggtctttcaaaaagcatttgattattttttttaaatacactctcttatttttctacttgtttttttgttaatcatagcaggatatgacaactcttatttgaattgattttttcatctaatgtaataatggaagccaaagtattcatatttcttaagatagccctaaatgtactcttgaacttcttactggaacaatgtttgatactctagtatgtaagctgtatttatgtaatatttagaacgacatgttaataaacaaagtaacattaaaacaggaaaaaaaaa

SEQ ID NO: 1480 - protein, 531 aa, Homo sapiens
MVDVGKWPIFTLLSPQEIASIRKACVFGTSASEALYVTDNDEVFVFGLNYSNCLGTGDNQSTLVPKKLEGLCGKKIKSLSYGSGPHVLLSTEDGVVYAWGHNGYSQLGNGTTNQGIAPVQVCTNLLIKQVVEVACGSHHSMALAADGEVFAWGYNNCGQVGSGSTANQPTPRKVTNCLHIKRVVGIACGQTSSMAVLDNGEVYGWGYNGNGQLGLGNNGNQLTPVRVAALHSVCVNQIVCGYAHTLALTDEGLLYAWGANTYGQLGTGNKNNLLSPAHIMVEKERVVEIAACHSAHTSAAKTQGGHVYMWGQCRGQSVILPHLTHFSCTDDVFACFATPAVSWRLLSVEHEDFLTVAESLKKEFDSPETADLKFRIDGKYIHVHKAVLKIRCEHFRSMFQSYWNEDMKEVIEIDQFSYPVYRAFLQYLYTDTVDLPPEDAIGLLDLATSYCENRLKKLCQHIIKRGITVENAFSLFSAAVRYDAEDLEEFCFKFCINHLTEVTQTAAFWQMDGPLLKEFIAKASKCGAFKN

SEQ ID NO: 1481 - DNA, 4634 bp, Homo sapiens
atctttgatcaatgtacttgccagggagagcccaagtccttcaaacctcctccttttcaccttcatccttaactttgtgctagagcgagacccacacaacaacagccgaccctccccgccccacccccacccccaaaccagccctcgatcccagcccccggagaggactcgcatttcgacttgcgggacacttttgtgcgttcctctccagagcgcctctcgtgctcgcccctcttgcgctcgctctttattaccttcacctccttttctcccccttctctccctttctccttctcgttctctcccggagttgttgttgcccccctcgctccttctccccccttttttccccttcccctcccgggggtgtgtggcaacttttcctctcgcttctcctccgtctgtttccccttatatgtgaccatggcagtgccggcggctttgatccctccgacccagctggtcccccctcaacccccaatctccacgtctgcttcctcctctggcaccaccacctccacctcttcggcgacttcgtctccggctccttccatcggacccccggcgtcctctgggccaactctgttccgcccggagcccatcgcttcggcggcggcggcggcggccacagtcacctctaccggcggcggcggcggcggcggcggcagcggaggcggcggcggcagcagcggcaacggaggcggcggtggcggcggcggcggtggcagcaactgcaaccccaacctggcggccgcgagcaacggcagcggcggcggcggcggcggcatcagcgctggcggcggcgtcgcttccagcacccccatcaacgccagcaccggcagcagcagcagcagcagtagcagcagcagcagcagcagcagtagtagcagcagcagcagtagcagcagcagctgcggccccctccccgggaaacccgtgtactcaaccccgtccccagtggaaaacacccctcagaataatgagtgcaaaatggtggatctgaggggggccaaagtggcttccttcacggtggagggctgcgagctgatctgcctgccccaggctttcgacctgttcctgaagcacttggtggggggcttgcatacggtctacaccaagctgaagcggctggagatcacgccggtggtgtgcaatgtggaacaagttcgcatcctgaggggactgggcgccatccagccaggagtgaaccgctgcaaactcatctccaggaaggacttcgagaccctctacaatgactgcaccaacgcaagttctagacctggaaggcctcctaagaggactcaaagtgtcacctccccagagaactctcacatcatgccgcattctgtccctggtctcatgtctcctgggataattccaccaacagatgagaccccgctttctacaccaaccgcaagagacagccttgacaaactctctctaactgggcatggacaaccactgcctccaggttttccatctccttttctgtttcctgatggactgtcttccatcgagactcttctgactaacatacaggggctgttgaaagttgccatagataatgccagagctcaagagaaacaggtccaactggaaaaaactgagctgaagatggattttttaagggaaagagaactaagggaaacacttgagaagcagttggctatggaacaaaagaatagagccatagttcaaaagaggctaaagaaggagaagaaggcaaagagaaaattgcaggaagcacttgagtttgagacgaaacggcgtgaacaagcagaacagacgctaaaacaggcagcttcaacagatagtctcagggtcttaaatgactctctgaccccagagatagaggctgaccgcagtggcggcagaacagatgctgaaaggacaatacaagatggaagactgtatttgaaaactactgtcatgtactgaatctttcctgttgaagaaatccatgttatagaaaagaactttgcagtcagacattcgtcatgggaaagttcagaaaaaaataaagtccttttaagggaacttcctgaattttgtgtattaatgttctttaaaagtttaagtattctacaaaaaaaaaaaaagttttctccattgattttcacctgtggttcataccagagacctgagaatgtttgtaaatgtacaagtatcaaagttcttacagttaattactgcaacttgctgctggacaattgtatacagagttaaaggcaggtctgaataagacctagctttgtttttttctaatggaatgaaccattttcctcttctgaaaattctgtatctgagcacatcaagagactcttgtagcagtggttacccagacttacagaattatgtcctccagaaaccagcaagaacacttggaatgaacgaatgaacttgtagggggcatagaggattcttgaaaaaaaaaaatgcaagagtgattttctgttacattcaatttcaaactctctaattgtgggttttctcctgaagaattttttttcacatactttccaaaagaccaacaaatggatgttgacaacaacccaatgaaataacattttgcatatctgaaaagaagcattgaatataagccaaaagctttcactgaaggtttttttttcttaaaaataaaaaaaaatatataagtgtaacatgttttcattccaaactggtagtggtatatagaattaaagataataatgttgcttcttattcaaactgttggtcatatgtacagtatataaacataaaacacacaaggaaggtattatgtatgcagtagtatactagagtttaggaaaatgaaaattttagaaaatatgttttgtcaccctgttggtcagaaagatgtctttctggttttaacgcatgcaggcatgtaaatatttgtctggagtcacagtattaatgaatgagatcttaagcatctggtgacatcagaactctgtgtcagccacttttatttgtatattgaaccctagctagtgccccaagctgcactattgggaatggattgtggctgaacagcaaatcaaaacaccagaaatatttttatatgttaacgtcatattatgttaatgttgctgaaaacaaaacctaacaaaccttgatgtaccagtccaataccatgtagcgctgagtgataaagttaaaatgtgctgtgcttcccacccttgtcagagggaagggtggctatgtgttattttcactgtctttttgaaagttacagtatgtgttttcactttcgtgcagataactggaagtaaagcggcaaacagtgcttattacatgctaaagttaccttctctttgttttttgcatatctggaattacacctttaaagactgatatgaatcagtacggtcactatacattttatgatttttctgtcatcttaaaattgtatgatcgtaacattatttattaccacaaaacagcaaaatcttcaatgtctaagaaaactagcttaaaatgtttaaatatagttctgattgggtattaattacttgattaagaaaaaattaacattatagatactctggcattacgcttctataccttttaggtcttccttgcaatactggaacataattcttttgtgtagctcactattagccagctaagttcatctttttaataccataaaaaggttatatgtacagttcctattttagcttgcttacaaagggagcattatttttatttaaagtattgctagtaaatgatttgtagaaacttggttttctaagcatagttcttccataaccaccttttgttgtttgagcacaagggattcttttcctagttctatgtgtttgtttccctatatgcagtctttaaaggattacaacacttaaaattgaatggacttgtgtcaagctttttgcatcatacattttttgaaagatttttaaaaaagcctacaacttacatatgtagtagaatcagccattgctctgctcctggcatagagtcacctgtttgttatgtggattaaatagttttaaaatacatatttgaagacctttgagaatgctttagtgtttgatttgaaataaaaggaaattttagcaaggattaaagaaaaaagctatcagctgtatgttaagagagactcttactaacatgttgtaaatattacaattcatgaaatgttattgtaagtctgtaacttaattttttccctgttttagttatacaggttggtttggaaatttgtgttttggcataaacaagtaaaatgtgcccattttatggtttccatgcttttgtaatcctaaaaatattaatgtctagttgttctatattataaccacatttgcgctctatgcaagcccttggaacagaacatactcatcttcatgtaggacctatgaaaattgtctatttttatctatatatttaaagttttctaaaaatgataaaaggttattacgaattttgttgtacaaaatctgtacaaaaatctgtttttacatcataatgcaagaattggaaatttttctatggtagcctagttatttgagcctggtttcaatgtgagaaccacgtttactgttattgtatttaattttcttttccttttcaacaatctcctaataaaactgtctgaaatctcaaaaaaa

SEQ ID NO: 1482 - protein, 504 aa, Homo sapiens
MAVPAALIPPTQLVPPQPPISTSASSSGTTTSTSSATSSPAPSIGPPASSGPTLFRPEPIASAAAAAATVTSTGGGGGGGGSGGGGGSSGNGGGGGGGGGGSNCNPNLAAASNGSGGGGGGISAGGGVASSTPINASTGSSSSSSSSSSSSSSSSSSSSSSSSCGPLPGKPVYSTPSPVENTPQNNECKMVDLRGAKVASFTVEGCELICLPQAFDLFLKHLVGGLHTVYTKLKRLEITPVVCNVEQVRILRGLGAIQPGVNRCKLISRKDFETLYNDCTNASSRPGRPPKRTQSVTSPENSHIMPHSVPGLMSPGIIPPTDETPLSTPTARDSLDKLSLTGHGQPLPPGFPSPFLFPDGLSSIETLLTNIQGLLKVAIDNARAQEKQVQLEKTELKMDFLRERELRETLEKQLAMEQKNRAIVQKRLKKEKKAKRKLQEALEFETKRREQAEQTLKQAASTDSLRVLNDSLTPEIEADRSGGRTDAERTIQDGRLYLKTTVMY

SEQ ID NO: 1483 - DNA, 5240 bp, Homo sapiens
atctttgatcaatgtacttgccagggagagcccaagtccttcaaacctcctccttttcaccttcatccttaactttgtgctagagcgagacccacacaacaacagccgaccctccccgccccacccccacccccaaaccagccctcgatcccagcccccggagaggactcgcatttcgacttgcgggacacttttgtgcgttcctctccagagcgcctctcgtgctcgcccctcttgcgctcgctctttattaccttcacctccttttctcccccttctctccctttctccttctcgttctctcccggagttgttgttgcccccctcgctccttctccccccttttttccccttcccctcccgggggtgtgtggcaacttttcctctcgcttctcctccgtctgtttccccttatatgtgaccatggcagtgccggcggctttgatccctccgacccagctggtcccccctcaacccccaatctccacgtctgcttcctcctctggcaccaccacctccacctcttcggcgacttcgtctccggctccttccatcggacccccggcgtcctctgggccaactctgttccgcccggagcccatcgcttcggcggcggcggcggcggccacagtcacctctaccggcggcggcggcggcggcggcggcagcggaggcggcggcggcagcagcggcaacggaggcggcggtggcggcggcggcggtggcagcaactgcaaccccaacctggcggccgcgagcaacggcagcggcggcggcggcggcggcatcagcgctggcggcggcgtcgcttccagcacccccatcaacgccagcaccggcagcagcagcagcagcagtagcagcagcagcagcagcagcagtagtagcagcagcagcagtagcagcagcagctgcggccccctccccgggaaacccgtgtactcaaccccgtccccagtggaaaacacccctcagaataatgagtgcaaaatggtggatctgaggggggccaaagtggcttccttcacggtggagggctgcgagctgatctgcctgccccaggctttcgacctgttcctgaagcacttggtggggggcttgcatacggtctacaccaagctgaagcggctggagatcacgccggtggtgtgcaatgtggaacaagttcgcatcctgaggggactgggcgccatccagccaggagtgaaccgctgcaaactcatctccaggaaggacttcgagaccctctacaatgactgcaccaacgcaagttctagacctggaaggcctcctaagaggactcaaagtgtcacctccccagagaactctcacatcatgccgcattctgtccctggtctcatgtctcctgggataattccaccaacaggtctgacagcagccgctgcagcagctgctgctgctaccaatgcagctattgctgaagcaatgaaggtgaaaaaaatcaaattagaagccatgagcaactatcatgccagtaataaccaacatggagcagactctgaaaacggggacatgaattcaagtgtcggactggaacttccttttatgatgatgccccaccctctaattcctgtcagcctacctccagcatctgtcaccatggcaatgagccagatgaaccacctcagcaccattgcaaatatggcagcagcagcacaagttcagagtcccccatccagagttgagacatcagttattaaggagcgtgttcctgatagcccctcacctgccccctctctggaggaggggagaaggcctggcagtcacccatcatcacatcgcagcagcagcgtgtccagctcccctgctcggactgagagctcttctgacagaatcccggtccatcagaatgggttgtccatgaaccagatgctgatgggcttatcaccaaatgtacttcctgggcccaaagagggagatttggccggtcatgacatgggacatgagtcaaaaaggatgcatattgaaaaagatgagaccccgctttctacaccaaccgcaagagacagccttgacaaactctctctaactgggcatggacaaccactgcctccaggttttccatctccttttctgtttcctgatggactgtcttccatcgagactcttctgactaacatacaggggctgttgaaagttgccatagataatgccagagctcaagagaaacaggtccaactggaaaaaactgagctgaagatggattttttaagggaaagagaactaagggaaacacttgagaagcagttggctatggaacaaaagaatagagccatagttcaaaagaggctaaagaaggagaagaaggcaaagagaaaattgcaggaagcacttgagtttgagacgaaacggcgtgaacaagcagaacagacgctaaaacaggcagcttcaacagatagtctcagggtcttaaatgactctctgaccccagagatagaggctgaccgcagtggcggcagaacagatgctgaaaggacaatacaagatggaagactgtatttgaaaactactgtcatgtactgaatctttcctgttgaagaaatccatgttatagaaaagaactttgcagtcagacattcgtcatgggaaagttcagaaaaaaataaagtccttttaagggaacttcctgaattttgtgtattaatgttctttaaaagtttaagtattctacaaaaaaaaaaaaagttttctccattgattttcacctgtggttcataccagagacctgagaatgtttgtaaatgtacaagtatcaaagttcttacagttaattactgcaacttgctgctggacaattgtatacagagttaaaggcaggtctgaataagacctagctttgtttttttctaatggaatgaaccattttcctcttctgaaaattctgtatctgagcacatcaagagactcttgtagcagtggttacccagacttacagaattatgtcctccagaaaccagcaagaacacttggaatgaacgaatgaacttgtagggggcatagaggattcttgaaaaaaaaaaatgcaagagtgattttctgttacattcaatttcaaactctctaattgtgggttttctcctgaagaattttttttcacatactttccaaaagaccaacaaatggatgttgacaacaacccaatgaaataacattttgcatatctgaaaagaagcattgaatataagccaaaagctttcactgaaggtttttttttcttaaaaataaaaaaaaatatataagtgtaacatgttttcattccaaactggtagtggtatatagaattaaagataataatgttgcttcttattcaaactgttggtcatatgtacagtatataaacataaaacacacaaggaaggtattatgtatgcagtagtatactagagtttaggaaaatgaaaattttagaaaatatgttttgtcaccctgttggtcagaaagatgtctttctggttttaacgcatgcaggcatgtaaatatttgtctggagtcacagtattaatgaatgagatcttaagcatctggtgacatcagaactctgtgtcagccacttttatttgtatattgaaccctagctagtgccccaagctgcactattgggaatggattgtggctgaacagcaaatcaaaacaccagaaatatttttatatgttaacgtcatattatgttaatgttgctgaaaacaaaacctaacaaaccttgatgtaccagtccaataccatgtagcgctgagtgataaagttaaaatgtgctgtgcttcccacccttgtcagagggaagggtggctatgtgttattttcactgtctttttgaaagttacagtatgtgttttcactttcgtgcagataactggaagtaaagcggcaaacagtgcttattacatgctaaagttaccttctctttgttttttgcatatctggaattacacctttaaagactgatatgaatcagtacggtcactatacattttatgatttttctgtcatcttaaaattgtatgatcgtaacattatttattaccacaaaacagcaaaatcttcaatgtctaagaaaactagcttaaaatgtttaaatatagttctgattgggtattaattacttgattaagaaaaaattaacattatagatactctggcattacgcttctataccttttaggtcttccttgcaatactggaacataattcttttgtgtagctcactattagccagctaagttcatctttttaataccataaaaaggttatatgtacagttcctattttagcttgcttacaaagggagcattatttttatttaaagtattgctagtaaatgatttgtagaaacttggttttctaagcatagttcttccataaccaccttttgttgtttgagcacaagggattcttttcctagttctatgtgtttgtttccctatatgcagtctttaaaggattacaacacttaaaattgaatggacttgtgtcaagctttttgcatcatacattttttgaaagatttttaaaaaagcctacaacttacatatgtagtagaatcagccattgctctgctcctggcatagagtcacctgtttgttatgtggattaaatagttttaaaatacatatttgaagacctttgagaatgctttagtgtttgatttgaaataaaaggaaattttagcaaggattaaagaaaaaagctatcagctgtatgttaagagagactcttactaacatgttgtaaatattacaattcatgaaatgttattgtaagtctgtaacttaattttttccctgttttagttatacaggttggtttggaaatttgtgttttggcataaacaagtaaaatgtgcccattttatggtttccatgcttttgtaatcctaaaaatattaatgtctagttgttctatattataaccacatttgcgctctatgcaagcccttggaacagaacatactcatcttcatgtaggacctatgaaaattgtctatttttatctatatatttaaagttttctaaaaatgataaaaggttattacgaattttgttgtacaaaatctgtacaaaaatctgtttttacatcataatgcaagaattggaaatttttctatggtagcctagttatttgagcctggtttcaatgtgagaaccacgtttactgttattgtatttaattttcttttccttttcaacaatctcctaataaaactgtctgaaatctcaaaaaaa

SEQ ID NO: 1484 - protein, 706 aa, Homo sapiens
MAVPAALIPPTQLVPPQPPISTSASSSGTTTSTSSATSSPAPSIGPPASSGPTLFRPEPIASAAAAAATVTSTGGGGGGGGSGGGGGSSGNGGGGGGGGGGSNCNPNLAAASNGSGGGGGGISAGGGVASSTPINASTGSSSSSSSSSSSSSSSSSSSSSSSSCGPLPGKPVYSTPSPVENTPQNNECKMVDLRGAKVASFTVEGCELICLPQAFDLFLKHLVGGLHTVYTKLKRLEITPVVCNVEQVRILRGLGAIQPGVNRCKLISRKDFETLYNDCTNASSRPGRPPKRTQSVTSPENSHIMPHSVPGLMSPGIIPPTGLTAAAAAAAAATNAAIAEAMKVKKIKLEAMSNYHASNNQHGADSENGDMNSSVGLELPFMMMPHPLIPVSLPPASVTMAMSQMNHLSTIANMAAAAQVQSPPSRVETSVIKERVPDSPSPAPSLEEGRRPGSHPSSHRSSSVSSSPARTESSSDRIPVHQNGLSMNQMLMGLSPNVLPGPKEGDLAGHDMGHESKRMHIEKDETPLSTPTARDSLDKLSLTGHGQPLPPGFPSPFLFPDGLSSIETLLTNIQGLLKVAIDNARAQEKQVQLEKTELKMDFLRERELRETLEKQLAMEQKNRAIVQKRLKKEKKAKRKLQEALEFETKRREQAEQTLKQAASTDSLRVLNDSLTPEIEADRSGGRTDAERTIQDGRLYLKTTVMY

SEQ ID NO: 1485 - DNA, 4796 bp, Homo sapiens
atctttgatcaatgtacttgccagggagagcccaagtccttcaaacctcctccttttcaccttcatccttaactttgtgctagagcgagacccacacaacaacagccgaccctccccgccccacccccacccccaaaccagccctcgatcccagcccccggagaggactcgcatttcgacttgcgggacacttttgtgcgttcctctccagagcgcctctcgtgctcgcccctcttgcgctcgctctttattaccttcacctccttttctcccccttctctccctttctccttctcgttctctcccggagttgttgttgcccccctcgctccttctccccccttttttccccttcccctcccgggggtgtgtggcaacttttcctctcgcttctcctccgtctgtttccccttatatgtgaccatggcagtgccggcggctttgatccctccgacccagctggtcccccctcaacccccaatctccacgtctgcttcctcctctggcaccaccacctccacctcttcggcgacttcgtctccggctccttccatcggacccccggcgtcctctgggccaactctgttccgcccggagcccatcgcttcggcggcggcggcggcggccacagtcacctctaccggcggcggcggcggcggcggcggcagcggaggcggcggcggcagcagcggcaacggaggcggcggtggcggcggcggcggtggcagcaactgcaaccccaacctggcggccgcgagcaacggcagcggcggcggcggcggcggcatcagcgctggcggcggcgtcgcttccagcacccccatcaacgccagcaccggcagcagcagcagcagcagtagcagcagcagcagcagcagcagtagtagcagcagcagcagtagcagcagcagctgcggccccctccccgggaaacccgtgtactcaaccccgtccccagtggaaaacacccctcagaataatgagtgcaaaatggtggatctgaggggggccaaagtggcttccttcacggtggagggctgcgagctgatctgcctgccccaggctttcgacctgttcctgaagcacttggtggggggcttgcatacggtctacaccaagctgaagcggctggagatcacgccggtggtgtgcaatgtggaacaagttcgcatcctgaggggactgggcgccatccagccaggagtgaaccgctgcaaactcatctccaggaaggacttcgagaccctctacaatgactgcaccaacgcaagttctagacctggaaggcctcctaagaggactcaaagtgtcacctccccagagaactctcacatcatgccgcattctgtccctggtctcatgtctcctgggataattccaccaacaggtctgacagcagccgctgcagcagctgctgctgctaccaatgcagctattgctgaagcaatgaaggtgaaaaaaatcaaattagaagccatgagcaactatcatgccagtaataaccaacatggagcagactctgaaaacggggacatgaattcaagtgtcgatgagaccccgctttctacaccaaccgcaagagacagccttgacaaactctctctaactgggcatggacaaccactgcctccaggttttccatctccttttctgtttcctgatggactgtcttccatcgagactcttctgactaacatacaggggctgttgaaagttgccatagataatgccagagctcaagagaaacaggtccaactggaaaaaactgagctgaagatggattttttaagggaaagagaactaagggaaacacttgagaagcagttggctatggaacaaaagaatagagccatagttcaaaagaggctaaagaaggagaagaaggcaaagagaaaattgcaggaagcacttgagtttgagacgaaacggcgtgaacaagcagaacagacgctaaaacaggcagcttcaacagatagtctcagggtcttaaatgactctctgaccccagagatagaggctgaccgcagtggcggcagaacagatgctgaaaggacaatacaagatggaagactgtatttgaaaactactgtcatgtactgaatctttcctgttgaagaaatccatgttatagaaaagaactttgcagtcagacattcgtcatgggaaagttcagaaaaaaataaagtccttttaagggaacttcctgaattttgtgtattaatgttctttaaaagtttaagtattctacaaaaaaaaaaaaagttttctccattgattttcacctgtggttcataccagagacctgagaatgtttgtaaatgtacaagtatcaaagttcttacagttaattactgcaacttgctgctggacaattgtatacagagttaaaggcaggtctgaataagacctagctttgtttttttctaatggaatgaaccattttcctcttctgaaaattctgtatctgagcacatcaagagactcttgtagcagtggttacccagacttacagaattatgtcctccagaaaccagcaagaacacttggaatgaacgaatgaacttgtagggggcatagaggattcttgaaaaaaaaaaatgcaagagtgattttctgttacattcaatttcaaactctctaattgtgggttttctcctgaagaattttttttcacatactttccaaaagaccaacaaatggatgttgacaacaacccaatgaaataacattttgcatatctgaaaagaagcattgaatataagccaaaagctttcactgaaggtttttttttcttaaaaataaaaaaaaatatataagtgtaacatgttttcattccaaactggtagtggtatatagaattaaagataataatgttgcttcttattcaaactgttggtcatatgtacagtatataaacataaaacacacaaggaaggtattatgtatgcagtagtatactagagtttaggaaaatgaaaattttagaaaatatgttttgtcaccctgttggtcagaaagatgtctttctggttttaacgcatgcaggcatgtaaatatttgtctggagtcacagtattaatgaatgagatcttaagcatctggtgacatcagaactctgtgtcagccacttttatttgtatattgaaccctagctagtgccccaagctgcactattgggaatggattgtggctgaacagcaaatcaaaacaccagaaatatttttatatgttaacgtcatattatgttaatgttgctgaaaacaaaacctaacaaaccttgatgtaccagtccaataccatgtagcgctgagtgataaagttaaaatgtgctgtgcttcccacccttgtcagagggaagggtggctatgtgttattttcactgtctttttgaaagttacagtatgtgttttcactttcgtgcagataactggaagtaaagcggcaaacagtgcttattacatgctaaagttaccttctctttgttttttgcatatctggaattacacctttaaagactgatatgaatcagtacggtcactatacattttatgatttttctgtcatcttaaaattgtatgatcgtaacattatttattaccacaaaacagcaaaatcttcaatgtctaagaaaactagcttaaaatgtttaaatatagttctgattgggtattaattacttgattaagaaaaaattaacattatagatactctggcattacgcttctataccttttaggtcttccttgcaatactggaacataattcttttgtgtagctcactattagccagctaagttcatctttttaataccataaaaaggttatatgtacagttcctattttagcttgcttacaaagggagcattatttttatttaaagtattgctagtaaatgatttgtagaaacttggttttctaagcatagttcttccataaccaccttttgttgtttgagcacaagggattcttttcctagttctatgtgtttgtttccctatatgcagtctttaaaggattacaacacttaaaattgaatggacttgtgtcaagctttttgcatcatacattttttgaaagatttttaaaaaagcctacaacttacatatgtagtagaatcagccattgctctgctcctggcatagagtcacctgtttgttatgtggattaaatagttttaaaatacatatttgaagacctttgagaatgctttagtgtttgatttgaaataaaaggaaattttagcaaggattaaagaaaaaagctatcagctgtatgttaagagagactcttactaacatgttgtaaatattacaattcatgaaatgttattgtaagtctgtaacttaattttttccctgttttagttatacaggttggtttggaaatttgtgttttggcataaacaagtaaaatgtgcccattttatggtttccatgcttttgtaatcctaaaaatattaatgtctagttgttctatattataaccacatttgcgctctatgcaagcccttggaacagaacatactcatcttcatgtaggacctatgaaaattgtctatttttatctatatatttaaagttttctaaaaatgataaaaggttattacgaattttgttgtacaaaatctgtacaaaaatctgtttttacatcataatgcaagaattggaaatttttctatggtagcctagttatttgagcctggtttcaatgtgagaaccacgtttactgttattgtatttaattttcttttccttttcaacaatctcctaataaaactgtctgaaatctcaaaaaaa

SEQ ID NO: 1486 - protein, 558 aa, Homo sapiens
MAVPAALIPPTQLVPPQPPISTSASSSGTTTSTSSATSSPAPSIGPPASSGPTLFRPEPIASAAAAAATVTSTGGGGGGGGSGGGGGSSGNGGGGGGGGGGSNCNPNLAAASNGSGGGGGGISAGGGVASSTPINASTGSSSSSSSSSSSSSSSSSSSSSSSSCGPLPGKPVYSTPSPVENTPQNNECKMVDLRGAKVASFTVEGCELICLPQAFDLFLKHLVGGLHTVYTKLKRLEITPVVCNVEQVRILRGLGAIQPGVNRCKLISRKDFETLYNDCTNASSRPGRPPKRTQSVTSPENSHIMPHSVPGLMSPGIIPPTGLTAAAAAAAAATNAAIAEAMKVKKIKLEAMSNYHASNNQHGADSENGDMNSSVDETPLSTPTARDSLDKLSLTGHGQPLPPGFPSPFLFPDGLSSIETLLTNIQGLLKVAIDNARAQEKQVQLEKTELKMDFLRERELRETLEKQLAMEQKNRAIVQKRLKKEKKAKRKLQEALEFETKRREQAEQTLKQAASTDSLRVLNDSLTPEIEADRSGGRTDAERTIQDGRLYLKTTVMY

SEQ ID NO: 1487 - DNA, 558 bp, Homo sapiens
atgctcctcaagaccattggcaggggcgtgttcgtcaaggtgaagctaacagggcacatactgactgggacacaggtggttacaaaaatcatctataaaatgagtggcttccctagcctctctctacagaaagaggtagaaatcatgaaggtcccgaatcacctgaacatcattaaactcaaccaggtgattggcaggtggacaccctatttagtgatggaatatgccctcgaaggagtgcttttccaccaaatacaccatcacagccacatcaaagatgacaagaaggcccgggccatgtttaagcagacaccgtccaccctccagtacagctacagaaagaaaatcgtgaactgggacctgaagccgcagaacatcctactgcatgaagaacataacttaaatatagtcaactttggtttcagcaccacatttgcagaaggagagatgctgggagccttttatgggacttgctcttatgttgccccagaactcttcctgggccatggttaccaagtccctaacaccttatttctctctctaaggcaggtcttttag

SEQ ID NO: 1488 - protein, 185 aa, Homo sapiens [sequence omitted]

SEQ ID NO: 1489 - DNA, 2760 bp, Homo sapiens
ccaggatttctctcttcctatttcaggaggactctcacaggctcccacagcctgtgttaagctgaggtttcccctagatctcgtatatccccaacacatacctccacgcacacacatccccaagaacctcgagctcacaccaacagacacacgcgcgcatacacactcgctctcgcttgtccatctccctcccgggggagccggcgcgcgctcccacctttgccgcacactccggcgagccgagcccgcagcgctccaggattctgcggctcggaactcggattgcagctctgaacccccatggtggttttttaaacacttcttttccttctcttcctcgttttgattgcaccgtttccatctgggggctagaggagcaaggcagcagccttcccagccagcccttgttggcttgccatcgtccatctggcttataaaagtttgctgagcgcagtccagagggctgcgctgctcgtcccctcggctggcagaagggggtgacgctgggcagcggcgaggagcgcgccgctgcctctggcgggctttcggcttgaggggcaaggtgaagagcgcaccggccgtggggtttaccgagctggatttgtatgttgcaccatgccttcttggatcggggctgtgattcttcccctcttggggctgctgctctccctccccgccggggcggatgtgaaggctcggagctgcggagaggtccgccaggcgtacggtgccaagggattcagcctggcggacatcccctaccaggagatcgcaggggaacacttaagaatctgtcctcaggaatatacatgctgcaccacagaaatggaagacaagttaagccaacaaagcaaactcgaatttgaaaaccttgtggaagagacaagccattttgtgcgcaccacttttgtgtccaggcataagaaatttgacgaatttttccgagagctcctggagaatgcagaaaagtcactaaatgatatgtttgtacggacctatggcatgctgtacatgcagaattcagaagtcttccaggacctcttcacagagctgaaaaggtactacactgggggtaatgtgaatctggaggaaatgctcaatgacttttgggctcggctcctggaacggatgtttcagctgataaaccctcagtatcacttcagtgaagactacctggaatgtgtgagcaaatacactgaccagctcaagccatttggagacgtgccccggaaactgaagattcaggttacccgcgccttcattgctgccaggacctttgtccaggggctgactgtgggcagagaagttgcaaaccgagtttccaaggtcagcccaaccccagggtgtatccgtgccctcatgaagatgctgtactgcccatactgtcgggggcttcccactgtgaggccctgcaacaactactgtctcaacgtcatgaagggctgcttggcaaatcaggctgacctcgacacagagtggaatctgtttatagatgcaatgctcttggtggcagagcgactggaggggccattcaacattgagtcggtcatggacccgatagatgtcaagatttctgaagccattatgaacatgcaagaaaacagcatgcaggtgtctgcaaaggtctttcagggatgtggtcagcccaaacctgctccagccctcagatctgcccgctcagctcctgaaaattttaatacacgtttcaggccctacaatcctgaggaaagaccaacaactgctgcaggcacaagcttggaccggctggtcacagacataaaagagaaattgaagctctctaaaaaggtctggtcagcattaccctacactatctgcaaggacgagagcgtgacagcgggcacgtccaacgaggaggaatgctggaacgggcacagcaaagccagatacttgcctgagatcatgaatgatgggctcaccaaccagatcaataatcccgaggtggatgtggacatcactcggcctgacactttcatcagacagcagattatggctctccgtgtgatgaccaacaaactaaaaaacgcctacaatggcaatgatgtcaatttccaggacacaagtgatgaatccagtggctcagggagtggcagtgggtgcatggatgacgtgtgtcccacggagtttgagtttgtcaccacagaggcccccgcagtggatcccgaccggagagaggtggactcttctgcagcccagcgtggccactccctgctctcctggtctctcacctgcattgtcctggcactgcagagactgtgcagataatcttgggtttttggtcagatgaaactgcattttagctatctgaatggccaactcacttcttttcttacactcttggacaatggaccatgccacaaaaacttaccgttttctatgagaagagagcagtaatgcaatctgcctccctttttgttttcccaaagagtaccgggtgccagactgaactgcttcctctttccttcagctatctgtggggaccttgtttattctagagagaattcttactcaaatttttcgtaccaggagattttcttaccttcatttgcttttatgctgcagaagtaaaggaatctcacgttgtgagggtttttttttttctcatttaaaataaaaaaggaagaaagaaaataattttccttgtaaaatcgggccaaaccccaagacagctacattttcaacaaaaaagcaaacagagaaaaataaatgaactttaacactgtaagttcagcattgacagcc

SEQ ID NO: 1490 - protein, 555 aa, Homo sapiens
MPSWIGAVILPLLGLLLSLPAGADVKARSCGEVRQAYGAKGFSLADIPYQEIAGEHLRICPQEYTCCTTEMEDKLSQQSKLEFENLVEETSHFVRTTFVSRHKKFDEFFRELLENAEKSLNDMFVRTYGMLYMQNSEVFQDLFTELKRYYTGGNVNLEEMLNDFWARLLERMFQLINPQYHFSEDYLECVSKYTDQLKPFGDVPRKLKIQVTRAFIAARTFVQGLTVGREVANRVSKVSPTPGCIRALMKMLYCPYCRGLPTVRPCNNYCLNVMKGCLANQADLDTEWNLFIDAMLLVAERLEGPFNIESVMDPIDVKISEAIMNMQENSMQVSAKVFQGCGQPKPAPALRSARSAPENFNTRFRPYNPEERPTTAAGTSLDRLVTDIKEKLKLSKKVWSALPYTICKDESVTAGTSNEEECWNGHSKARYLPEIMNDGLTNQINNPEVDVDITRPDTFIRQQIMALRVMTNKLKNAYNGNDVNFQDTSDESSGSGSGSGCMDDVCPTEFEFVTTEAPAVDPDRREVDSSAAQRGHSLLSWSLTCIVLALQRLCR

SEQ ID NO: 1491 - DNA, 1410 bp, Homo sapiens
atgggattcgctcgggcggagggcgctgggccaggacgtgggcgggcgcggggtggccgccgctcccccaagcttaagtcccgcgcagcccggggtggtgccggaagcccgtgcctgtggctccgggggaggggagggctcggtgggtccctgaagactgtcctccccgcgcgacgtcgcaggcgaagcagccccaggcaggacctcaaaaagcgacctgcagagtccgagcccctgaccgcccgcctgccgctcccggcttcgccgtgcacacgtctcccgctctccccggttcgtttttcgccacagctgctggattcgcgtctcgccagtggcgctccccgcgctgcattaggtagcgccgcgcggagcccggccctggccggaagcccaagagaggcgcagatccccggcggcgcgctgggctcgggaggcccctgggcgcacctgcccgggcggagcggagcggggcggggcgggcgcagggcgcgggcccggacgctggagggggctgtggctctcccgcgtccccgctgctcgggctgcgcggcgcccgcctccccccgccgaggggccggcccagacccggggaggggcggtggccactgcacttcccgctcgccggcctcagaggcggcggcgctggccccggcgtcgaggcggccatggcgacccggagcccgctccccacccaccccgcctgctccgccctcccctccgccccgcgccacctttgatggctcggacctcagccggccaccgccagccctgctcgcgcgcccgcgccgccgccgcccgcgggtattaatagccggcgccgccgcgccctcggccgccgggggcttgggagccgccgatcccggagcccgagccgggagagggagccgccgcagccgccggcgctgtggaggtaggaggcgcgcggtgaacaatgaccgcggcgggagggcgggggccggcggggtccgggccgcgggcggcaacttgtgcgagtccaggctcccgcagcgcacggccgcggctgcgggcgaaggtgggcgcgtggtccccgaggtcctgccctgcgcagtcgggcggcgggtcgggcccgggcagccccggccaccatcgcaggagctcgggggcctcggggctccgggctgccccctgcgcccctctcccctcacctccgccgacgtcgggctgcggggctccgcgccggtccccgctcgcctcccccgaccccggcgcccttcccccgtttccttccgtcctacccgcccgctgacagcgctggacgccgcttccggacctcgggccgcaatctcggcccctgaggccggttgcgggccggggaggtggccgctggcgcggatgccgccgggtgcccgccgctcgcccacgcgcggcgcgagggttcccggcgggtga

SEQ ID NO: 1492 - protein, 469 aa, Homo sapiens
MGFARAEGAGPGRGRARGGRRSPKLKSRAARGGAGSPCLWLRGRGGLGGSLKTVLPARRRRRSSPRQDLKKRPAESEPLTARLPLPASPCTRLPLSPVRFSPQLLDSRLASGAPRAALGSAARSPALAGSPREAQIPGGALGSGGPWAHLPGRSGAGRGGRRARARTLEGAVALPRPRCSGCAAPASPRRGAGPDPGRGGGHCTSRSPASEAAALAPASRRPWRPGARSPPTPPAPPSPPPRATFDGSDLSRPPPALLARPRRRRPRVLIAGAAAPSAAGGLGAADPGARAGRGSRRSRRRCGGRRRAVNNDRGGRAGAGGVRAAGGNLCESRLPQRTAAAAGEGGRVVPEVLPCAVGRRVGPGQPRPPSQELGGLGAPGCPLRPSPLTSADVGLRGSAPVPARLPRPRRPSPVSFRPTRPLTALDAASGPRAAISAPEAGCGPGRWPLARMPPGARRSPTRGARVPGG

SEQ ID NO: 1493 - DNA, 1337 bp, Homo sapiens
gcggccgctgcccgctttgcgccgctcctccctgcgcgagtagcgctggccccggcgtcgaggcggccatggcgacccggagcccgctccccacccaccccgcctgctccgccctcccctccgccccgcgccacctttgatggctcggacctcagccggccaccgccagccctgctcgcgcgcccgcgccgccgccgcccgcgggtattaatagccggcgccgccgcgccctcggccgccgggggcttgggagccgccgatcccggagcccgagccgggagagggagccgccgcagccgccggcgctgtggagatattctctaagccgctttcatcatgggagaaatagagcagaggccgaccccaggatcacgactgggggccccggaaaattcggggatcagtaccttggaacgtggacagaagccgcccccaacaccttcaggaaaactcgtgtccatcaaaatccagatgctggatgacacccaggaggcatttgaagttccaatggtgtcctcatcctccttcctcaaagccatcggctcctcctggacgggttgggtactgagatgctccatgaagcccaagcaccattcacatctaattgagaagtttggagaggacagaattctcactcatcttacaggctctatttcttacacaaactgggctggaagtagaagcttagcggtcacagtcactgaagagcttcttaatcttttttgagtcaggacttgaagtcctgtttcattatttcattcaaagaaattgattggcaatggccagagttaaattcaaaggtgacattaacacatttcagtgcccaataagtgatttttctgctgggtaggagtagatacagatgtgatctcagatacgtgaagctgcatacagaggggcccatccactcctaaacgggtctccaggaggcttggtttgatctactagatttggtgcctcttaaagggaagcaatacagcttttctgctgtgggttgtttgccactaggggaagattcatttctattccagccataaattagaccaaagagagggatttggtttattgctagtgcagaagttaaaaaccatcttcctttcctgagtggtctcttaattagattctttagtttttaaatgttaactggaattgctgaagtttaattcctgaaagggtttagtttttaaaaggagtacctcatttaccatattactgtgttctgagaaatctacagtaatttttgtgtaacttttttattcaaagaatggattgttaattgtaaagccatttagaaaggcgaataaagtcagatctactttaaaaaaaaaaaaaaaaaa

SEQ ID NO: 1494 - protein, 129 aa, Homo sapiens
MGEIEQRPTPGSRLGAPENSGISTLERGQKPPPTPSGKLVSIKIQMLDDTQEAFEVPMVSSSSFLKAIGSSWTGWVLRCSMKPKHHSHLIEKFGEDRILTHLTGSISYTNWAGSRSLAVTVTEELLNLF

SEQ ID NO: 1495 - DNA, 5028 bp, Homo sapiens
gcggccgctgcccgctttgcgccgctcctccctgcgcgagtagcgctggccccggcgtcgaggcggccatggcgacccggagcccgctccccacccaccccgcctgctccgccctcccctccgccccgcgccacctttgatggctcggacctcagccggccaccgccagccctgctcgcgcgcccgcgccgccgccgcccgcgggtattaatagccggcgccgccgcgccctcggccgccgggggcttgggagccgccgatcccggagcccgagccgggagagggagccgccgcagccgccggcgctgtggagatattctctaagccgctttcatcatgggagaaatagagcagaggccgaccccaggatcacgactgggggccccggaaaattcggggatcagtaccttggaacgtggacagaagccgcccccaacaccttcaggaaaactcgtgtccatcaaaatccagatgctggatgacacccaggaggcatttgaagttccacaaagagctcctgggaaggtgctgctggatgcagtttgcaaccacctcaacctcgtggaaggtgactattttggcctcgagtttcctgatcacaaaaagatcacggtgtggctggatctcctaaaacccattgtgaaacagattagaaggccaaagcacgttgttgttaagtttgtggtgaaattctttccgcctgaccacacacaactccaagaagaactcacaaggtacctgttcgcgctgcaggtgaagcaggacttggctcaaggcaggttgacgtgtaatgacaccagcgcagctctcttgatttcacacattgtgcaatctgagattggggattttgatgaagccttggacagagagcacttagcaaaaaataaatacatacctcagcaagacgcactagaggacaaaatcgtggaatttcaccataaccacattggacaaacaccagcagaatcagatttccagctcctagagattgcccgtcggctagagatgtatggaatccggttgcacccggccaaggacagggaaggcacgaagatcaatctggccgttgccaacacgggaattctagtgtttcagggtttcactaagatcaatgccttcaactgggccaaggtgcggaagctgagcttcaagaggaagcgctttctcatcaagctccggccagatgccaatagtgcgtaccaggataccttggaattcctgatggccagtcgggatttctgcaagtccttctggaaaatctgtgttgaacatcatgccttctttagactttttgaagagcccaaaccaaagcccaagcccgtcctctttagccgggggtcatcatttcggttcagtggtcggactcagaagcaggttctcgactatgttaaagaaggaggacataagaaggtgcagtttgaaaggaagcacagcaagattcattctatccggagccttgcttcacagcctacagaactgaattcggaagtgctggagcagtctcagcagagcaccagccttacatttggagaaggtgccgaatctccagggggccagagctgccggcgaggaaaggaaccgaaggtttccgccggggagccggggtcgcacccgagccctgcgccgaggagaagccccgcgggtaacaagcaggcggacggagccgcctcggcgcccacggaggaagaggaggaggtcgttaaggataggacccagcagagtaaacctcagcccccgcagccaagcacaggctccctgactggcagtcctcacctttccgagctgtctgtgaactcgcaggggggagtggcccctgccaacgtgaccttgtctcccaacctgagccccgacaccaagcaggcctctcccttgatcagcccgctgctgaatgaccaggcctgcccccggacggacgatgaggatgagggccggaggaagagattcccaactgataaagcgtacttcatagctaaggaagtgtctaccaccgagcgaacatatctgaaggatctcgaagttatcacttcgtggtttcagagcacagtgagcaaagaggacgccatgccggaagcactgaaaagtctcatattcccgaattttgaacctttgcacaaatttcatactaattttctcaaggaaattgagcaacgacttgccctgtgggaaggccgctcaaatgcccaaatcagagattaccaaagaatcggcgatgtcatgctgaagaacattcagggcatgaagcacctggcggctcacctgtggaagcacagcgaggccttggaggccctggagaatggaatcaagagctcccggcggctggagaacttctgcagagactttgagctgcagaaggtgtgttacctaccgctcaacaccttcctcctgcggccactgcaccggctcatgcactacaagcaggtcctggagcggctgtgcaaacaccacccgccgagccacgccgacttcagggactgccgagccgctttggcagagatcacggagatggtggcacagctccacggtacgatgatcaagatggagaatttccagaagctgcacgaactcaagaaagatttgattggcattgacaatcttgtggttccgggaagggagttcatccgtctgggcagcctcagcaagctctcggggaaggggctccagcagcgcatgttcttcctgttcaacgacgtcctgctatacacgagccgggggctgacggcctccaatcagtttaaagtccacgggcagctcccgctctatggcatgacgattgaggagagcgaagacgagtggggggtgccccactgcctgaccctccggggccagcggcagtccatcatcgtggccgccagttctcggtccgagatggagaagtgggttgaggacatccagatggccattgacctggcggagaagagcagcagccccgcccctgagttcctggccagcagcccccctgacaacaagtcccctgatgaagccaccgcggctgaccaggagtcagaggatgacctgagcgcctcgcgcacatcgctggagcgccaggccccgcaccgcggcaacacaatggtgcacgtgtgctggcaccgcaacaccagcgtctccatggtggacttcagcatcgcagtggagaatcagttgtctggaaacctgctgaggaaattcaaaaacagcaacgggtggcagaagctgtgggtggtgttcacaaacttctgcctgttcttctacaaatcacaccaggacaatcatccccttgccagcctgcctctgctcggctactcgctcaccatcccctctgagtccgagaacatccagaaagactacgtgttcaagctgcacttcaagtcccacgtctactacttcagggcggaaagcgagtacacgttcgaaaggtggatggaagtgatccgcagtgccaccagctctgcctcgcgaccccacgtgttgagtcacaaagagtctcttgtgtattgatggccggacacactcgtttccgcagtggctgctttcctggaagacgtttcctttcttctgtattaatgaagcctggtaaaattaacacctgtctgaaaatcaaaaacatggcttcccagcagctctcctgtctccacagccgcgttttttaaccccgacctctcagcgtctgaatgaacagcgctcccacctccagtcctggcatccgctgggggcgctgttctttagctagtgccagtattaaaacattgtcattacgagagtgccaaatgacatcttccctccaccctgcccctgaaaaacagtacacacacatccgttcaacacaagacagggcaagtgtttttcttcctaaaaaaagttctttcttttattattttcacctattggctgctgcattttacgaagtggacttcccggtgtttgtttgtttgtttgcaatacactcagtgcagccttaagcaaatgagatcattttcagatttcattttttttttcagtctttctacttttgtaataataggaagttagtaggactcacttctctgattaataagcaatttgcagcacacagcgttccactgcggggtttcacgctcacctgaaaacacctgttcccaacctacttcttggtgcaagttgaccaaatcgttttaagtggtaactctttccaaccgtagcagggttgttttctgttaagcaaagccgagatccagtgcaatacctggactgtcaccgtcctgtgagtggtgtacacaatgggaagataataagccgtggtgttttgctgtctgtctgtgtcacaagcatgaaaacccgtgtgtcattgatcagcaccatttgtggtatgttccgtgatgagcgtttagtgagcctgctggctgcagagcactatgaaatcatggtacgtagtccccggcacctgtcgttattcctatatcctcctgcaactgtggtttgaaactgcgcattctctagtagtatatatcgtgcctgtcttcaaaaacatttccctttttatactcattccccccaggcatggggtagtgtcagtcggactgcacagggaacacggtttccagtggctttggcccctactcgggaaacgtctgcctgttctcgatggtgatggggtggctgccattcccttggttttcctaagccctttctaacgagagtctcaaacaagcggaggcgagggccaattcaaccccattctttccagcgccccgcaccatagcacctgcccacctgagaaccaggaacgcaccctctctgtggagctctgactggtgtagctggaaacaaacagcaacttgcaaacggacgaagagcctgccgtgtgttaatcatttgccttacaagatgtaccagacggtttccagtactaacaaagggaataaaaatacctcacgccacaatccagcatattgatgttttaaggcaaaacaaaaaaaaaaaaaaaaaaaaaaaaaaaaaaaaaaaaaaaaaaaaaaaaaaaaaaaaaaaaaaaaaaaaaaaaaaaaaaaaaaaaaaaaaaaaaaaaaaaaaaaa

SEQ ID NO: 1496 - protein, 1045 aa, Homo sapiens
MGEIEQRPTPGSRLGAPENSGISTLERGQKPPPTPSGKLVSIKIQMLDDTQEAFEVPQRAPGKVLLDAVCNHLNLVEGDYFGLEFPDHKKITVWLDLLKPIVKQIRRPKHVVVKFVVKFFPPDHTQLQEELTRYLFALQVKQDLAQGRLTCNDTSAALLISHIVQSEIGDFDEALDREHLAKNKYIPQQDALEDKIVEFHHNHIGQTPAESDFQLLEIARRLEMYGIRLHPAKDREGTKINLAVANTGILVFQGFTKINAFNWAKVRKLSFKRKRFLIKLRPDANSAYQDTLEFLMASRDFCKSFWKICVEHHAFFRLFEEPKPKPKPVLFSRGSSFRFSGRTQKQVLDYVKEGGHKKVQFERKHSKIHSIRSLASQPTELNSEVLEQSQQSTSLTFGEGAESPGGQSCRRGKEPKVSAGEPGSHPSPAPRRSPAGNKQADGAASAPTEEEEEVVKDRTQQSKPQPPQPSTGSLTGSPHLSELSVNSQGGVAPANVTLSPNLSPDTKQASPLISPLLNDQACPRTDDEDEGRRKRFPTDKAYFIAKEVSTTERTYLKDLEVITSWFQSTVSKEDAMPEALKSLIFPNFEPLHKFHTNFLKEIEQRLALWEGRSNAQIRDYQRIGDVMLKNIQGMKHLAAHLWKHSEALEALENGIKSSRRLENFCRDFELQKVCYLPLNTFLLRPLHRLMHYKQVLERLCKHHPPSHADFRDCRAALAEITEMVAQLHGTMIKMENFQKLHELKKDLIGIDNLVVPGREFIRLGSLSKLSGKGLQQRMFFLFNDVLLYTSRGLTASNQFKVHGQLPLYGMTIEESEDEWGVPHCLTLRGQRQSIIVAASSRSEMEKWVEDIQMAIDLAEKSSSPAPEFLASSPPDNKSPDEATAADQESEDDLSASRTSLERQAPHRGNTMVHVCWHRNTSVSMVDFSIAVENQLSGNLLRKFKNSNGWQKLWVVFTNFCLFFYKSHQDNHPLASLPLLGYSLTIPSESENIQKDYVFKLHFKSHVYYFRAESEYTFERWMEVIRSATSSASRPHVLSHKESLVY

SEQ ID NO: 1497 - DNA, 1381 bp, Homo sapiens
gccacggccgttgggagcctgagactcaaacatggcagcgccaccttctccaggaaggacggccgaccaagcagaccaggtatgcaccttcctcttcaaaaagcctggacggaaaggggctgcaggcctcagaaagcgcccggcctgcgaccccgagcacggagagagcagcagcagcggggacgagggcgacacagtggctcagcccccgcgggtggcaccgaggccccggggcctccacagctggcagaaggcggctcacggcgacaggaggggcgaggaggcggcgcctgagagcctcgacgtggtgtacaggtccacccgctcggcgaagcctgtggggccagaggacatgggggccaccgctgacttcgagcaggacaccgagaaggagcaccatacgccgaccatcctcaagtgcagccagcgggtccaggaggcactgcggggtcgggagcacgaccacatctaccggggaatccacagctacctgaggtacctgaagcccaaggacacgtccatgggcaactcctcctcggggatggcgaggaagggccccatacgtgcgccagggcatctgcgcgccactgtgcgctgggattaccagcctgacatctgcaaggactacaaggagactggcttctgtggcttcggggacagctgcaaattcctccacgaccgttccgattacaagctcgggtgggagattgaacgggagcttgaagagggtcgctactgtatctgcgaggacgaaaaccatgaagtgggaagcgaggaagaggaaataccattcaggtgtttcatatgtcgccaggccttccaaaacccagtcgtcaccaagtgcaggcattatttctgcgagagctgcgcgctggagcacttccgggccaccccgcgctgctacatctgtgaccagccaaccggcggcatctttaaccccgccaaagaactgatggcgaaactgcaaaagcttcaggctgcagaaggaaaaaagagataagaaagactcaagtctgtatgtacactggggagaagcagcctgttgagtaagatgagagagatgacagtcttcctgcaatcccatgcctgagtatgtaaccaaaagaattgaaatccggatctcaaagaggtatgtgcactcccatgttcactgcagaattatttgcaaaagccaagaggtgtaaacaacccaagtgtccatggatggatgaatggacaaacaaaatgcgatacacacacacaatggaatgctattaagccttaacgggaaggaaatccttttaaagatttaaactgatccttttaaggatcacatgctacaactagaatgaaccttgaagacgacactgctaagtgaaataaactagtcacaaaatgaaaa

SEQ ID NO: 1498 - protein, 322 aa, Homo sapiens
MAAPPSPGRTADQADQVCTFLFKKPGRKGAAGLRKRPACDPEHGESSSSGDEGDTVAQPPRVAPRPRGLHSWQKAAHGDRRGEEAAPESLDVVYRSTRSAKPVGPEDMGATADFEQDTEKEHHTPTILKCSQRVQEALRGREHDHIYRGIHSYLRYLKPKDTSMGNSSSGMARKGPIRAPGHLRATVRWDYQPDICKDYKETGFCGFGDSCKFLHDRSDYKLGWEIERELEEGRYCICEDENHEVGSEEEEIPFRCFICRQAFQNPVVTKCRHYFCESCALEHFRATPRCYICDQPTGGIFNPAKELMAKLQKLQAAEGKKR

SEQ ID NO: 1499 - DNA, 4624 bp, Homo sapiens
tcggcgctcgcgggctcggcgggctgtgcgcgcccactccggctccagcggccagcgcgcgcgggcccaggccgcccggctccagcccagcagtagcggcagcagcggcggcggcggcagtgcgcgcgaggccctgcgcccccagcagctcctccctggcgccgtgcatggagacgcggcccgccacccgccgctgagcccccgccgcccggccgggacccgccagggctggggtggcctcgggctccggccggccccgccgcccgagggctgcgcgcggcccgcgggcctcgccgccccgcgcggatcgtcgcggcccggccgtcccgtcccaggaagtggccgtcctgagcgccatggctcactccccggtgcagtcgggcctgcccggcatgcagaacctaaaggcagacccagaagagctttttacaaaactagagaaaattgggaagggctcctttggagaggtgttcaaaggcattgacaatcggactcagaaagtggttgccataaagatcattgatctggaagaagctgaagatgagatagaggacattcaacaagaaatcacagtgctgagtcagtgtgacagtccatatgtaaccaaatattatggatcctatctgaaggatacaaaattatggataataatggaatatcttggtggaggctccgcactagatctattagaacctggcccattagatgaaacccagatcgctactatattaagagaaatactgaaaggactcgattatctccattcggagaagaaaatccacagagacattaaagcggccaacgtcctgctgtctgagcatggcgaggtgaagctggcggactttggcgtggctggccagctgacagacacccagatcaaaaggaacaccttcgtgggcaccccattctggatggcacccgaggtcatcaaacagtcggcctatgactcgaaggcagacatctggtccctgggcataacagctattgaacttgcaagaggggaaccacctcattccgagctgcaccccatgaaagttttattcctcattccaaagaacaacccaccgacgttggaaggaaactacagtaaacccctcaaggagtttgtggaggcctgtttgaataaggagccgagctttagacccactgctaaggagttattgaagcacaagtttatactacgcaatgcaaagaaaacttcctacttgaccgagctcatcgacaggtacaagagatggaaggccgagcagagccatgacgactcgagctccgaggattccgacgcggaaacagatggccaagcctcggggggcagtgattctggggactggatcttcacaatccgagaaaaagatcccaagaatctcgagaatggagctcttcagccatcggacttggacagaaataagatgaaagacatcccaaagaggcctttctctcagtgtttatctacaattatttctcctctgtttgcagagttgaaggagaagagccaggcgtgcggagggaacttggggtccattgaagagctgcgaggggccatctacctagcggaggaggcgtgccctggcatctccgacaccatggtggcccagctcgtgcagcggctccagagatactctctaagtggtggaggaacttcatcccactgaaattcctttggcatttggggttttgtttttccttttttccttcttcatcctcctccttttttaaaagtcaacgagagccttcgctgactccaccgaagaggtgcgccactgggagccaccccagcgccaggcgcccgtccagggacacacacagtcttcactgtgctgcagccagatgaagtctctcagatgggtggggagggtcagctccttccagcgatcattttattttattttattacttttgtttttaattttaaccatagtgcacatattccaggaaagtgtctttaaaaacaaaaacaaaccctgaaatgtatatttgggattatgataaggcaactaaagacatgaaacctcaggtatcctgctttaagttgataactccctctgggagctggagaatcgctctggtggatgggtgtacagatttgtatataatgtcatttttacggaaaccctttcggcgtgcataaggaatcactgtgtacaaactggccaagtgcttctgtagataacgtcagtggagtaaatattcgacaggccataacttgagtctattgccttgcctttattacatgtacattttgaattctgtgaccagtgatttgggttttattttgtatttgcagggtttgtcattaataattaatgcccctctcttacagaacactcctatttgtacctcaacaaatgcaaattttccccgtttgccctacgccccttttggtacacctagaggttgatttcctttttcatcgatggtactatttcttagtgttttaaattggaacatatcttgcctcatgaagctttaaattataattttcagtttctccccatgaagcgctctcgtctgacatttgtttggaatcgtgccactgctggtctgcgccagatgtaccgtcctttccaatacgattttctgttgcaccttgtagtggattctgcatatcatctttcccacctaaaaatgtctgaatgcttacacaaataaattttataacacgcttattttgcatactccttgaaatgtgactcttcagaggacagggcacctgctgtgtatgtgtggccgtgcgtgtgtactcgtggctgtgtgtgtgtgatgagacactttggaagactccagggagaagtccccaggcctggagctgccgagtgcccaggtcagcgccctggactgcttgcgcacttgctcaccgagatgatgcagttggaggttgctgatctgtgcgattgctgtagcggttgccggggaccttaagagttattttgcttctctggaaggggcctatgcttgctaggcaggcagccagtgtgtctgtttttcttggtttgctgtgggaccttgcttggcgagggggaaaatctctgggtttctggagtgggagggttcgtgcagcagctgttgactggtacatgaagcattcttttatgtttgttgaagctgatgattgacatctcccgtgggtgtgccagttcttgtggagttaagacaggatttttggaagcaaggaagttagtgggtgagcttggggatgtagctcagctatctgctggtctagtggcctctaagctatagggaggggacagagccctgagctacagatgcttgagtgggttattgtgtcggtttgctagtgcagtctggtttttaagctctaaaattgaggtattttattagaagtggatttgggttgaactcttaatttgtataagggatatattttggttggggaaatagaactgagttgctaattcttattgtactcattactccatacaagaatgttatgttgaataataaaattggagaagatttcattttgtgtttccagggagtattctgtgtggggaactgtttccttacgtgaggccggcggcataagtcaaagatgagttttgtccttgcgaatcacacagattgagtctgtgttccccagggtgtgccgttacctgatttttaagtgagccagggcggacagcagcttttctgatttacagagttcttcagatttacaaatggacaatgacatcacagtttttagcactgaagccagtctcatgctagtaacagtgggtgagccgctcgagggactgggttctaatgaatactggtatgaacggggagtctctgcagtcgccagacaaatcatactcagccccttcccccgtagagcaacaagtggttcttttagagttgactggcagcatttcctgtcgggggaggtggggtttgatggagttagaaagctcgcctctgtgtacattctctcctgggctgttactttctgtagacgcacaaaatcagccccaatgtttttaagggcatcttagccaaggaagctggcttttgtgtcgccacttccaggcctgcattaagagagagcccaggcaccagggctaccactggaacctgcctcagcgtcaactgctgctggtctgtagccaggcccagcctttgagacgggtttactgtcaccagtagcctctcagtgccagccctgagctgctcctggctcagctgcccagagcctgcagcctggggaggtactcagcctctgggagacgagggccgtggactgggtggctggtagctcctgcgtttttgagctgtgtcctggctggctgctgccaatgaggtggacaccagtgtggtttggggtgcactggccacttcttgctgggttctgattttcttggaagtgcatctgccttccttatccaatagttttatccctgcattgctcttgtgaagtggctggtttggttctgtatgtagcattttgtacctttcctctggcaaaacactgtcagtttataaacattttttatatttccctcctttaaaaacagcttgtgtatttctgctataaaatgtgtcagcaaaggcagagtgacctaatagggcatgttcttaagcacagggactgtatcatgcaggggccaataaagctcaagaaaacgag

SEQ ID NO: 1500 - protein, 431 aa, Homo sapiens
MAHSPVQSGLPGMQNLKADPEELFTKLEKIGKGSFGEVFKGIDNRTQKVVAIKIIDLEEAEDEIEDIQQEITVLSQCDSPYVTKYYGSYLKDTKLWIIMEYLGGGSALDLLEPGPLDETQIATILREILKGLDYLHSEKKIHRDIKAANVLLSEHGEVKLADFGVAGQLTDTQIKRNTFVGTPFWMAPEVIKQSAYDSKADIWSLGITAIELARGEPPHSELHPMKVLFLIPKNNPPTLEGNYSKPLKEFVEACLNKEPSFRPTAKELLKHKFILRNAKKTSYLTELIDRYKRWKAEQSHDDSSSEDSDAETDGQASGGSDSGDWIFTIREKDPKNLENGALQPSDLDRNKMKDIPKRPFSQCLSTIISPLFAELKEKSQACGGNLGSIEELRGAIYLAEEACPGISDTMVAQLVQRLQRYSLSGGGTSSH

SEQ ID NO: 1501 - DNA, 4539 bp, Homo sapiens
ggagccaggctgcagtggtggggaggaccgggcaggtccagatgactttgaagggactccagaggaaggagagagtggaggaggagggctttgggttagggagagtgctttcgtttgttttaaatgggagaaactggagcatgttgccaagggcagagagccagcagagaggggtgaatggaagaaggagcgagaagggggttactgacgaagccttatcctggaggagagaaggatggactccagagcccagctttggggactggccttgaataaaaggagggccactctacctcatcctggagggagcacgaacctaaaggcagacccagaagagctttttacaaaactagagaaaattgggaagggctcctttggagaggtgttcaaaggcattgacaatcggactcagaaagtggttgccataaagatcattgatctggaagaagctgaagatgagatagaggacattcaacaagaaatcacagtgctgagtcagtgtgacagtccatatgtaaccaaatattatggatcctatctgaaggatacaaaattatggataataatggaatatcttggtggaggctccgcactagatctattagaacctggcccattagatgaaacccagatcgctactatattaagagaaatactgaaaggactcgattatctccattcggagaagaaaatccacagagacattaaagcggccaacgtcctgctgtctgagcatggcgaggtgaagctggcggactttggcgtggctggccagctgacagacacccagatcaaaaggaacaccttcgtgggcaccccattctggatggcacccgaggtcatcaaacagtcggcctatgactcgaaggcagacatctggtccctgggcataacagctattgaacttgcaagaggggaaccacctcattccgagctgcaccccatgaaagttttattcctcattccaaagaacaacccaccgacgttggaaggaaactacagtaaacccctcaaggagtttgtggaggcctgtttgaataaggagccgagctttagacccactgctaaggagttattgaagcacaagtttatactacgcaatgcaaagaaaacttcctacttgaccgagctcatcgacaggtacaagagatggaaggccgagcagagccatgacgactcgagctccgaggattccgacgcggaaacagatggccaagcctcggggggcagtgattctggggactggatcttcacaatccgagaaaaagatcccaagaatctcgagaatggagctcttcagccatcggacttggacagaaataagatgaaagacatcccaaagaggcctttctctcagtgtttatctacaattatttctcctctgtttgcagagttgaaggagaagagccaggcgtgcggagggaacttggggtccattgaagagctgcgaggggccatctacctagcggaggaggcgtgccctggcatctccgacaccatggtggcccagctcgtgcagcggctccagagatactctctaagtggtggaggaacttcatcccactgaaattcctttggcatttggggttttgtttttccttttttccttcttcatcctcctccttttttaaaagtcaacgagagccttcgctgactccaccgaagaggtgcgccactgggagccaccccagcgccaggcgcccgtccagggacacacacagtcttcactgtgctgcagccagatgaagtctctcagatgggtggggagggtcagctccttccagcgatcattttattttattttattacttttgtttttaattttaaccatagtgcacatattccaggaaagtgtctttaaaaacaaaaacaaaccctgaaatgtatatttgggattatgataaggcaactaaagacatgaaacctcaggtatcctgctttaagttgataactccctctgggagctggagaatcgctctggtggatgggtgtacagatttgtatataatgtcatttttacggaaaccctttcggcgtgcataaggaatcactgtgtacaaactggccaagtgcttctgtagataacgtcagtggagtaaatattcgacaggccataacttgagtctattgccttgcctttattacatgtacattttgaattctgtgaccagtgatttgggttttattttgtatttgcagggtttgtcattaataattaatgcccctctcttacagaacactcctatttgtacctcaacaaatgcaaattttccccgtttgccctacgccccttttggtacacctagaggttgatttcctttttcatcgatggtactatttcttagtgttttaaattggaacatatcttgcctcatgaagctttaaattataattttcagtttctccccatgaagcgctctcgtctgacatttgtttggaatcgtgccactgctggtctgcgccagatgtaccgtcctttccaatacgattttctgttgcaccttgtagtggattctgcatatcatctttcccacctaaaaatgtctgaatgcttacacaaataaattttataacacgcttattttgcatactccttgaaatgtgactcttcagaggacagggcacctgctgtgtatgtgtggccgtgcgtgtgtactcgtggctgtgtgtgtgtgatgagacactttggaagactccagggagaagtccccaggcctggagctgccgagtgcccaggtcagcgccctggactgcttgcgcacttgctcaccgagatgatgcagttggaggttgctgatctgtgcgattgctgtagcggttgccggggaccttaagagttattttgcttctctggaaggggcctatgcttgctaggcaggcagccagtgtgtctgtttttcttggtttgctgtgggaccttgcttggcgagggggaaaatctctgggtttctggagtgggagggttcgtgcagcagctgttgactggtacatgaagcattcttttatgtttgttgaagctgatgattgacatctcccgtgggtgtgccagttcttgtggagttaagacaggatttttggaagcaaggaagttagtgggtgagcttggggatgtagctcagctatctgctggtctagtggcctctaagctatagggaggggacagagccctgagctacagatgcttgagtgggttattgtgtcggtttgctagtgcagtctggtttttaagctctaaaattgaggtattttattagaagtggatttgggttgaactcttaatttgtataagggatatattttggttggggaaatagaactgagttgctaattcttattgtactcattactccatacaagaatgttatgttgaataataaaattggagaagatttcattttgtgtttccagggagtattctgtgtggggaactgtttccttacgtgaggccggcggcataagtcaaagatgagttttgtccttgcgaatcacacagattgagtctgtgttccccagggtgtgccgttacctgatttttaagtgagccagggcggacagcagcttttctgatttacagagttcttcagatttacaaatggacaatgacatcacagtttttagcactgaagccagtctcatgctagtaacagtgggtgagccgctcgagggactgggttctaatgaatactggtatgaacggggagtctctgcagtcgccagacaaatcatactcagccccttcccccgtagagcaacaagtggttcttttagagttgactggcagcatttcctgtcgggggaggtggggtttgatggagttagaaagctcgcctctgtgtacattctctcctgggctgttactttctgtagacgcacaaaatcagccccaatgtttttaagggcatcttagccaaggaagctggcttttgtgtcgccacttccaggcctgcattaagagagagcccaggcaccagggctaccactggaacctgcctcagcgtcaactgctgctggtctgtagccaggcccagcctttgagacgggtttactgtcaccagtagcctctcagtgccagccctgagctgctcctggctcagctgcccagagcctgcagcctggggaggtactcagcctctgggagacgagggccgtggactgggtggctggtagctcctgcgtttttgagctgtgtcctggctggctgctgccaatgaggtggacaccagtgtggtttggggtgcactggccacttcttgctgggttctgattttcttggaagtgcatctgccttccttatccaatagttttatccctgcattgctcttgtgaagtggctggtttggttctgtatgtagcattttgtacctttcctctggcaaaacactgtcagtttataaacattttttatatttccctcctttaaaaacagcttgtgtatttctgctataaaatgtgtcagcaaaggcagagtgacctaatagggcatgttcttaagcacagggactgtatcatgcaggggccaataaagctcaagaaaacgag

SEQ ID NO: 1502 - protein, 443 aa, Homo sapiens
MDSRAQLWGLALNKRRATLPHPGGSTNLKADPEELFTKLEKIGKGSFGEVFKGIDNRTQKVVAIKIIDLEEAEDEIEDIQQEITVLSQCDSPYVTKYYGSYLKDTKLWIIMEYLGGGSALDLLEPGPLDETQIATILREILKGLDYLHSEKKIHRDIKAANVLLSEHGEVKLADFGVAGQLTDTQIKRNTFVGTPFWMAPEVIKQSAYDSKADIWSLGITAIELARGEPPHSELHPMKVLFLIPKNNPPTLEGNYSKPLKEFVEACLNKEPSFRPTAKELLKHKFILRNAKKTSYLTELIDRYKRWKAEQSHDDSSSEDSDAETDGQASGGSDSGDWIFTIREKDPKNLENGALQPSDLDRNKMKDIPKRPFSQCLSTIISPLFAELKEKSQACGGNLGSIEELRGAIYLAEEACPGISDTMVAQLVQRLQRYSLSGGGTSSH

SEQ ID NO: 1503 - DNA, 6923 bp, Homo sapiens
cgcgctgcctgagctgagccgccgtaggtgaggggcccgcgtccccgcccgccctgggcgccgcgcctggcactgatcctgccggtcgcccactgtcgccgccgccgccgcccgcgggcaccatgacagctctgagcgctggggttacagactgtggttttgtgcttgctcaccaaagctaacctcagcatgctcaaaaggaagcagagttccagggtggaagcccagccagtcactgactttggtcctgatgagtctctgtcggataatgctgacatcctctggattaacaaaccatgggttcactctttgctgcgcatctgtgccatcatcagcgtcatttctgtttgtatgaatacgccaatgaccttcgagcactatcctccacttcagtatgtgaccttcactttggatacattattgatgtttctctacacggcagagatgatagcaaaaatgcacatccggggcattgtcaagggggatagttcctatgtgaaagatcgctggtgtgtttttgatggatttatggtcttttgcctttgggtttctttggtgctacaggtgtttgaaattgctgatatagttgatcagatgtcaccttggggcatgttgcggattccacggccactgattatgatccgagcattccggatttatttccgatttgaactgccaaggaccagaattacaaatattttaaagcgatcgggagaacaaatatggagtgtttccatttttctacttttctttctacttctttatggaattttaggagttcagatgtttggaacatttacttatcactgtgttgtaaatgacacaaagccagggaatgtaacctggaatagtttagctattccagacacacactgctcaccagagctagaagaaggctaccagtgcccacctggatttaaatgcatggaccttgaagatctgggacttagcaggcaagagctgggctacagtggctttaatgagataggaactagtatattcaccgtctatgaggccgcctcacaggaaggctgggtgttcctcatgtacagagcaattgacagctttccccgttggcgttcctacttctatttcatcactctcattttcttcctcgcctggcttgtgaagaacgtgtttattgctgttatcattgaaacatttgcagaaatcagagtacagtttcaacaaatgtggggatcgagaagcagcactacctcaacagccaccacccagatgtttcatgaagatgctgctggaggttggcagctggtagctgtggatgtcaacaagccccagggacgcgccccagcctgcctccagaaaatgatgcggtcatccgttttccacatgttcatcctgagcatggtgaccgtggacgtgatcgtggcggctagcaactactacaaaggagaaaacttcaggaggcagtacgacgagttctacctggcggaggtggcttttacagtactttttgatttggaagcacttctgaagatatggtgtttgggatttactggatatattagctcatctctccacaaattcgaactactactcgtaattggaactactcttcatgtatacccagatctttatcattcacaattcacgtactttcaggttctccgagtagttcggctgattaagatttcacctgcattagaagactttgtgtacaagatatttggtcctggaaaaaagcttgggagtttggttgtatttactgccagcctcttgattgttatgtcagcaattagtttgcagatgttctgctttgtcgaagaactggacagatttactacgtttccgagggcatttatgtccatgttccagatcctcacccaggaaggatgggtggacgtaatggaccaaactctaaatgctgtgggacatatgtgggcacccgtggttgccatctatttcattctctatcatctttttgccactctgatcctcctgagtttgtttgttgctgttattttggacaacttagaacttgatgaagacctaaagaagcttaaacaattaaagcaaagtgaagcaaatgcggacaccaaagaaaagctccctttacgcctgcgaatctttgaaaaatttccaaacagacctcaaatggtgaaaatctcaaagcttccttcagattttacagttcctaaaatcagggagagttttatgaagcagtttattgaccgccagcaacaggacacatgttgcctcctgagaagcctcccgaccacctcttcctcctcctgcgaccactccaaacgctcagcaattgaggacaacaaatacatcgaccaaaaacttcgcaagtctgttttcagcatcagggcaaggaaccttctggaaaaggagaccgcagtcactaaaatcttaagagcttgcacccgacagcgcatgctgagcggatcatttgaggggcagcccgcaaaggagaggtcaatcctcagcgtgcagcatcatatccgccaagagcgcaggtcactaagacatggatcaaacagccagaggatcagcaggggaaaatctcttgaaactttgactcaagatcattccaatacagtgagatatagaaatgcacaaagagaagacagtgaaataaagatgattcaggaaaaaaaggagcaagcagagatgaaaaggaaagtgcaagaagaggaactcagagagaaccacccatacttcgataagccactgttcattgtcgggcgagaacacaggttcagaaacttttgccgggtggtggtccgagcacgcttcaacgcatctaaaacagaccctgtcacaggagctgtgaaaaatacaaagtaccatcaactttatgatttgctgggattggtcacttacctggactgggtcatgatcatcgtaaccatctgctcttgcatttccatgatgtttgagtccccgtttcgaagagtcatgcatgcacctactttgcagattgctgagtatgtgtttgtgatattcatgagcattgagcttaatctgaagattatggcagatggcttatttttcactccaactgctgtcatcagggacttcggtggagtaatggacatatttatatatcttgtgagcttgatatttctttgttggatgcctcaaaatgtacctgctgaatcgggagctcagcttctaatggtccttcggtgcctgagacctctgcgcatattcaaactggtgccccagatgaggaaagttgttcgagaacttttcagcggcttcaaggaaatttttttggtctccattcttttgctgacattaatgctcgtttttgcaagctttggagttcagctttttgctggaaaactggccaagtgcaatgatcccaacattattagaagggaagattgcaatggcatattcagaattaatgtcagtgtgtcaaagaacttaaatttaaaattgaggcctggagagaaaaaacctggattttgggtgccccgtgtttgggcgaatcctcggaactttaatttcgacaatgtgggaaacgctatgctggcgttgtttgaagttctctccttgaaaggctgggtggaagtgagagatgttattattcatcgtgtggggccgatccatggaatctatattcatgtttttgtattcctgggttgcatgattggactgaccctttttgttggagtagttattgctaatttcaatgaaaacaaggggacggctttgctgaccgtcgatcagagaagatgggaagacctgaagagccgactgaagatcgcacagcctcttcatcttccgcctcgcccggataatgatggttttagagctaaaatgtatgacataacccagcatccattttttaagaggacaatcgcattactcgtcctggcccagtcggtgttgctctctgtcaagtgggacgtcgaggacccggtgaccgtacctttggcaacaatgtcagttgttttcaccttcatctttgttctggaggttaccatgaagatcatagcaatgtcgcctgctggcttctggcaaagcagaagaaaccgatacgatctcctggtgacgtcgcttggcgttgtatgggtggtgcttcactttgccctcctgaatgcatatacttacatgatgggcgcttgtgtgattgtatttaggtttttctccatctgtggaaaacatgtaacgctaaagatgctcctcttgacagtggtcgtcagcatgtacaagagcttctttatcatagtaggcatgtttctcttgctgctgtgttacgcttttgctggagttgttttatttggtactgtgaaatatggggagaatattaacaggcatgcaaatttttcttcggctggaaaagctattaccgtactgttccgaattgtcacaggtgaagactggaacaagattatgcatgactgtatggttcagcctccgttttgtactccagatgaatttacatactgggcaacagactgtggaaattatgctggggcacttatgtatttctgttcattttatgtcatcattgcctacatcatgctaaatctgcttgtagccataattgtggagaatttctccttgttttattccactgaggaggaccagcttttaagttacaatgatcttcgccactttcaaataatatggaacatggtggatgataaaagagagggggtgatccccacgttccgcgtcaagttcctgctgcggctactgcgtgggaggctggaggtggacctggacaaggacaagctcctgtttaagcacatgtgctacgaaatggagaggctccacaatggcggcgacgtcaccttccatgatgtcctgagcatgctttcataccggtccgtggacatccggaagagcttgcagctggaggaactcctggcgagggagcagctggagtacaccatagaggaggaggtggccaagcagaccatccgcatgtggctcaagaagtgcctgaagcgcatcagagctaaacagcagcagtcgtgcagtatcatccacagcctgagagagagtcagcagcaagagctgagccggtttctgaacccgcccagcatcgagaccacccagcccagtgaggacacgaatgccaacagtcaggacaacagcatgcaacctgagacaagcagccagcagcagctcctgagccccacgctgtcggatcgaggaggaagtcggcaagatgcagccgacgcagggaaaccccagaggaaatttgggcagtggcgtctgccctcagccccaaaaccaataagccattcagtgtcctcagtcaacttacggtttggaggaaggacaaccatgaaatctgtcgtgtgcaaaatgaaccccatgactgacgcggcttcctgcggttctgaagttaagaagtggtggacccggcagctgactgtggagagcgacgaaagtggggatgaccttctggatatttaggtggatgtcaatgtagatgaatttctagtggtggaaaccgttttctaataatgtccttgattgtccagtgagcaatctgtaattgatctataactgaattccagcttgtcacaagatgtttataaattgattttcatcctgccacagaaaggcataagctgcatgtatgatgggttactatcaatcattgctcaaaaaaatttttgtataatgacagtactgataatattagaaatgataccgcaagcaaatgtatatcacttaaaaatgtcatatattctgtctgcgtaaactaaggtatatattcatatgtgctctaatgcagtattatcaccgccccgcaaaagagtgctaagcccaaagtggctgatatttagggtacaggggttatagctttagttcacatctttcccatttccactagaaatatttctcttgagagaatttattatttatgattgatctgaaaaggtcagcactgaacttatgctaaaatgatagtagttttacaaactacagattctgaattttaaaaagtatcttctttttctcgtgttatatttttaaatatacacaagacatttggtgaccagaacaagttgatttctgtcctcagttatgttaatgaaactgttgcctccttctaagaaaattgtgtgtgcaagcaccaggcaaagaaatggactcaggatgcttagcggtttaaaacaaacctgtagataaatcacttgagtgacatagttgcgcaaagatgttaagtttcttaagaaaccttttaataactgagtttagcaaaaagaataaaactatatagctcaatttatttaaaaaaatctttgcatgtgtgatgttatcattggcttcatttcttacccaaggtatgtctgttttgccataaatcagcagagtcatttcattctgggtgatcctaacacaccattgctacgttagatttgaaatgacatctctgttaaaagaatcttctatggaaataatggtgccctgcaaaatcttcctttgaactcacaggttagggatcacacaacttacttaatcgttttttgtttttgttttttttccttatatgtcaatggcccatgtcctccgggaaaattagaaaagcaaaatgattacaaagtgctgttagatttcttgtgctgggccagccaagtagaagtggacttgacttggacctttaactattttattacagattggacatttgctgttcagatgttttttaacagagggattatctcagaatcctgtgacctccaggttgttttataatctatttttctctatttaacattcctcagatagataggcaaataggacattccttctgtgtcacagaagtatcgtggtagtggcagtctacagtttatatgattcattgtaactatgagataaagaacaaccagtcatgtggccaaaaggattagatttgatttgatgttcacttggagtttactttttgtacatacaagataaaataaatattggatttgtaaaat

SEQ ID NO: 1504 - protein, 1738 aa, Homo sapiens
MLKRKQSSRVEAQPVTDFGPDESLSDNADILWINKPWVHSLLRICAIISVISVCMNTPMTFEHYPPLQYVTFTLDTLLMFLYTAEMIAKMHIRGIVKGDSSYVKDRWCVFDGFMVFCLWVSLVLQVFEIADIVDQMSPWGMLRIPRPLIMIRAFRIYFRFELPRTRITNILKRSGEQIWSVSIFLLFFLLLYGILGVQMFGTFTYHCVVNDTKPGNVTWNSLAIPDTHCSPELEEGYQCPPGFKCMDLEDLGLSRQELGYSGFNEIGTSIFTVYEAASQEGWVFLMYRAIDSFPRWRSYFYFITLIFFLAWLVKNVFIAVIIETFAEIRVQFQQMWGSRSSTTSTATTQMFHEDAAGGWQLVAVDVNKPQGRAPACLQKMMRSSVFHMFILSMVTVDVIVAASNYYKGENFRRQYDEFYLAEVAFTVLFDLEALLKIWCLGFTGYISSSLHKFELLLVIGTTLHVYPDLYHSQFTYFQVLRVVRLIKISPALEDFVYKIFGPGKKLGSLVVFTASLLIVMSAISLQMFCFVEELDRFTTFPRAFMSMFQILTQEGWVDVMDQTLNAVGHMWAPVVAIYFILYHLFATLILLSLFVAVILDNLELDEDLKKLKQLKQSEANADTKEKLPLRLRIFEKFPNRPQMVKISKLPSDFTVPKIRESFMKQFIDRQQQDTCCLLRSLPTTSSSSCDHSKRSAIEDNKYIDQKLRKSVFSIRARNLLEKETAVTKILRACTRQRMLSGSFEGQPAKERSILSVQHHIRQERRSLRHGSNSQRISRGKSLETLTQDHSNTVRYRNAQREDSEIKMIQEKKEQAEMKRKVQEEELRENHPYFDKPLFIVGREHRFRNFCRVVVRARFNASKTDPVTGAVKNTKYHQLYDLLGLVTYLDWVMIIVTICSCISMMFESPFRRVMHAPTLQIAEYVFVIFMSIELNLKIMADGLFFTPTAVIRDFGGVMDIFIYLVSLIFLCWMPQNVPAESGAQLLMVLRCLRPLRIFKLVPQMRKVVRELFSGFKEIFLVSILLLTLMLVFASFGVQLFAGKLAKCNDPNIIRREDCNGIFRINVSVSKNLNLKLRPGEKKPGFWVPRVWANPRNFNFDNVGNAMLALFEVLSLKGWVEVRDVIIHRVGPIHGIYIHVFVFLGCMIGLTLFVGVVIANFNENKGTALLTVDQRRWEDLKSRLKIAQPLHLPPRPDNDGFRAKMYDITQHPFFKRTIALLVLAQSVLLSVKWDVEDPVTVPLATMSVVFTFIFVLEVTMKIIAMSPAGFWQSRRNRYDLLVTSLGVVWVVLHFALLNAYTYMMGACVIVFRFFSICGKHVTLKMLLLTVVVSMYKSFFIIVGMFLLLLCYAFAGVVLFGTVKYGENINRHANFSSAGKAITVLFRIVTGEDWNKIMHDCMVQPPFCTPDEFTYWATDCGNYAGALMYFCSFYVIIAYIMLNLLVAIIVENFSLFYSTEEDQLLSYNDLRHFQIIWNMVDDKREGVIPTFRVKFLLRLLRGRLEVDLDKDKLLFKHMCYEMERLHNGGDVTFHDVLSMLSYRSVDIRKSLQLEELLAREQLEYTIEEEVAKQTIRMWLKKCLKRIRAKQQQSCSIIHSLRESQQQELSRFLNPPSIETTQPSEDTNANSQDNSMQPETSSQQQLLSPTLSDRGGSRQDAADAGKPQRKFGQWRLPSAPKPISHSVSSVNLRFGGRTTMKSVVCKMNPMTDAASCGSEVKKWWTRQLTVESDESGDDLLDI

SEQ ID NO: 1505 - DNA, 907 bp, Homo sapiens
ataacggagaggagtagggaaataaagacctgtctggtccttccccacttccctaatccatctgtctcccttgctatgtctctaaaccttctccagccaggacatcggaggtacccagacattgttatgaaactccgcatgtgcccctggtggacgctgctggacccagcatgcacacttctcggctaagagtcaccctggatgaaccaccattgccagcggggagcatgttgcagctttcccacgcagtggatgagaacgaaggttacgaccattgtgtgggaggcgtctgtgtagcaattgctggaatcacttgtggcattgtagaaagactgagcgtgggaaagaagacgcattctgaagtcaccccgatttatgttaaattatcaccttgactactgctatagaacgaatgtttatgtcccccacccaaattcgtatgctaagacctaatagccaataagatagtattaatagatggggcctttgggaggtgagtggctcatgagggcagagtcctcaaaaccagataagtgcccgaataaaaggggccccagagagatcccttgcaccgtctaccatgtgaagtgtagaacacagcgagaaggccacctatgagccagaacgtgggccctcaccagaacccagttgtgctggcaccctgatcctggacttccagcctccaaaatgacgacaaagaagtttgtttttcctgagccatccacttcaaagtattctgtcatagctccccaaatagactaagacatctacttaaccttggtcaaacgtttaaccttggagtccacgcctctgaaatggtgacaataacactgtgtatttcctactttatgatcaggattaataaatgtaatttattaatcagaaattagtaatttctgattattaa

SEQ ID NO: 1506 - protein, 74 aa, Homo sapiens
MHTSRLRVTLDEPPLPAGSMLQLSHAVDENEGYDHCVGGVCVAIAGITCGIVERLSVGKKTHSEVTPIYVKLSP

SEQ ID NO: 1507 - DNA, 6511 bp, Homo sapiens
gaagtccggccttccgagagctagctgtccgccgcggcccccgcacgccgggcagccgtccctcgccgcctcgggcgcgccaccatggggccccggctcagcgtctggctgctgctgctgcccgccgcccttctgctccacgaggagcacagccgggccgctgcgaagggtggctgtgctggctctggctgtggcaaatgtgactgccatggagtgaagggacaaaagggtgaaagaggcctcccggggttacaaggtgtcattgggtttcctggaatgcaaggacctgaggggccacagggaccaccaggacaaaagggtgatactggagaaccaggactacctggaacaaaagggacaagaggacctccgggagcatctggctaccctggaaacccaggacttcccggaattcctggccaagacggcccgccaggccccccaggtattccaggatgcaatggcacaaagggggagagagggccgctcgggcctcctggcttgcctggtttcgctggaaatcccggaccaccaggcttaccagggatgaagggtgatccaggtgagatacttggccatgtgcccgggatgctgttgaaaggtgaaagaggatttcccggaatcccagggactccaggcccaccaggactgccagggcttcaaggtcctgttgggcctccaggatttaccggaccaccaggtcccccaggccctcccggccctccaggtgaaaagggacaaatgggcttaagttttcaaggaccaaaaggtgacaagggtgaccaaggggtcagtgggcctccaggagtaccaggacaagctcaagttcaagaaaaaggagacttcgccaccaagggagaaaagggccaaaaaggtgaacctggatttcaggggatgccaggggtcggagagaaaggtgaacccggaaaaccaggacccagaggcaaacccggaaaagatggtgacaaaggggaaaaagggagtcccggttttcctggtgaacccgggtacccaggactcataggccgccagggcccgcagggagaaaagggtgaagcaggtcctcctggcccacctggaattgttataggcacaggacctttgggagaaaaaggagagaggggctaccctggaactccggggccaagaggagagccaggcccaaaaggtttcccaggactaccaggccaacccggacctccaggcctccctgtacctgggcaggctggtgcccctggcttccctggtgaaagaggagaaaaaggtgaccgaggatttcctggtacatctctgccaggaccaagtggaagagatgggctcccgggtcctcctggttcccctgggccccctgggcagcctggctacacaaatggaattgtggaatgtcagcccggacctccaggtgaccagggtcctcctggaattccagggcagccaggatttataggcgaaattggagagaaaggtcaaaaaggagagagttgcctcatctgtgatatagacggatatcgggggcctcccgggccacagggacccccgggagaaataggtttcccagggcagccaggggccaagggcgacagaggtttgcctggcagagatggtgttgcaggagtgccaggccctcaaggtacaccagggctgataggccagccaggagccaagggggagcctggtgagttttatttcgacttgcggctcaaaggtgacaaaggagacccaggctttccaggacagcccggcatgccagggagagcgggttctcctggaagagatggccatccgggtcttcctggccccaagggctcgccgggttctgtaggattgaaaggagagcgtggcccccctggaggagttggattcccaggcagtcgtggtgacaccggcccccctgggcctccaggatatggtcctgctggtcccattggtgacaaaggacaagcaggctttcctggaggccctggatccccaggcctgccaggtccaaagggtgaaccaggaaaaattgttcctttaccaggcccccctggagcagaaggactgccggggtccccaggcttcccaggtccccaaggagaccgaggctttcccggaaccccaggaaggccaggcctgccaggagagaagggcgctgtgggccagccaggcattggatttccagggccccccggccccaaaggtgttgacggcttacctggagacatggggccaccggggactccaggtcgcccgggatttaatggcttacctgggaacccaggtgtgcagggccagaagggagagcctggagttggtctaccgggactcaaaggtttgccaggtcttcccggcattcctggcacacccggggagaaggggagcattggggtaccaggcgttcctggagaacatggagcgatcggaccccctgggcttcaggggatcagaggtgaaccgggacctcctggattgccaggctccgtggggtctccaggagttccaggaataggcccccctggagctaggggtccccctggaggacagggaccaccggggttgtcaggccctcctggaataaaaggagagaagggtttccccggattccctggactggacatgccgggccctaaaggagataaaggggctcaaggactccctggcataacgggacagtcggggctccctggccttcctggacagcagggggctcctgggattcctgggtttccaggttccaagggagaaatgggcgtcatggggacccccgggcagccgggctcaccaggaccagtgggtgctcctggattaccgggtgaaaaaggggaccatggctttccgggctcctcaggacccaggggagaccctggcttgaaaggtgataagggggatgtcggtctccctggcaagcctggctccatggataaggtggacatgggcagcatgaagggccagaaaggagaccaaggagagaaaggacaaattggaccaattggtgagaagggatcccgaggagaccctgggaccccaggagtgcctggaaaggacgggcaggcaggacagcctgggcagccaggacctaaaggtgatccaggtataagtggaaccccaggtgctccaggacttccgggaccaaaaggatctgttggtggaatgggcttgccaggaacacctggagagaaaggtgtgcctggcatccctggcccacaaggttcacctggcttacctggagacaaaggtgcaaaaggagagaaagggcaggcaggcccacctggcataggcatcccagggctgcgaggtgaaaagggagatcaagggatagcgggtttcccaggaagccctggagagaagggagaaaaaggaagcattgggatcccaggaatgccagggtccccaggccttaaagggtctcccgggagtgttggctatccaggaagtcctgggctacctggagaaaaaggtgacaaaggcctcccaggattggatggcatccctggtgtcaaaggagaagcaggtcttcctgggactcctggccccacaggcccagctggccagaaaggggagccaggcagtgatggaatcccggggtcagcaggagagaagggtgaaccaggtctaccaggaagaggattcccagggtttccaggggccaaaggagacaaaggttcaaagggtgaggtgggtttcccaggattagccgggagcccaggaattcctggatccaaaggagagcaaggattcatgggtcctccggggccccagggacagccggggttaccgggatccccaggccatgccacggaggggcccaaaggagaccgcggacctcagggccagcctggcctgccaggacttccgggacccatggggcctccagggcttcctgggattgatggagttaaaggtgacaaaggaaatccaggctggccaggagcacccggtgtcccagggcccaagggagaccctggattccagggcatgcctggtattggtggctctccaggaatcacaggctctaagggtgatatggggcctccaggagttccaggatttcaaggtccaaaaggtcttcctggcctccagggaattaaaggtgatcaaggcgatcaaggcgtcccgggagctaaaggtctcccgggtcctcctggccccccaggtccttacgacatcatcaaaggggagcccgggctccctggtcctgagggccccccagggctgaaagggcttcagggactgccaggcccgaaaggccagcaaggtgttacaggattggtgggtatacctggacctccaggtattcctgggtttgacggtgcccctggccagaaaggagagatgggacctgccgggcctactggtccaagaggatttccaggtccaccaggccccgatgggttgccaggatccatggggcccccaggcaccccatctgttgatcacggcttccttgtgaccaggcatagtcaaacaatagatgacccacagtgtccttctgggaccaaaattctttaccacgggtactctttgctctacgtgcaaggcaatgaacgggcccatggccaggacttgggcacggccggcagctgcctgcgcaagttcagcacaatgcccttcctgttctgcaatattaacaacgtgtgcaactttgcatcacgaaatgactactcgtactggctgtccacccctgagcccatgcccatgtcaatggcacccatcacgggggaaaacataagaccatttattagtaggtgtgctgtgtgtgaggcgcctgccatggtgatggccgtgcacagccagaccattcagatcccaccgtgccccagcgggtggtcctcgctgtggatcggctactcttttgtgatgcacaccagcgctggtgcagaaggctctggccaagccctggcgtcccccggctcctgcctggaggagtttagaagtgcgccattcatcgagtgtcacggccgtgggacctgcaattactacgcaaacgcttacagcttttggctcgccaccatagagaggagcgagatgttcaagaagcctacgccgtccaccttgaaggcaggggagctgcgcacgcacgtcagccgctgccaagtctgtatgagaagaacataatgaagcctgactcagctaatgtcacaacatggtgctacttcttcttctttttgttaacagcaacgaaccctagaaatatatcctgtgtacctcactgtccaatatgaaaaccgtaaagtgccttataggaatttgcgtaactaacacaccctgcttcattgacctctacttgctgaaggagaaaaagacagcgataagctttcaatagtggcataccaaatggcacttttgatgaaataaaatatcaatattttctgcaatccaatgcactgatgtgtgaagtgagaactccatcagaaaaccaaagggtgctaggaggtgtgggtgccttccatactgtttgcccattttcattcttgtattataattaattttctacccccagagataaatgtttgtttatatcactgtctagctgtttcaaaatttaggtcccttggtctgtacaaataatagcaatgtaaaaatggttttttgaacctccaaatggaattacagactcagtagccatatcttccaaccccccagtataaatttctgtctttctgctatgtgtggtactttgcagctgcttttgcagaaatcacaattttcctgtggaataaagatggtccaaaaatagtcaaaaattaaatatatatatatattagtaatttatatagatgtcagcaattaggcagatcaaggtttagtttaacttccactgttaaaataaagcttacatagttttcttcctttgaaagactgtgctgtcctttaacataggtttttaaagactaggatattgaatgtgaaacatccgttttcattgttcacttctaaaccaaaaattatgtgttgccaaaaccaaacccaggttcatgaatatggtgtctattatagtgaaacatgtactttgagcttattgtttttattctgtattaaatattttcagggttttaaacactaatcacaaactgaatgacttgacttcaaaagcaacaaccttaaaggccgtcatttcattagtattcctcattctgcatcctggcttgaaaaacagctctgttgaatcacagtatcagtattttcacacgtaagcacattcgggccatttccgtggtttctcatgagctgtgttcacagacctcagcagggcatcgcatggaccgcaggagggcagattcggaccactaggcctgaaatgacatttcactaaaagtctccaaaacatttctaagactactaaggccttttatgtaatttctttaaatgtgtatttcttaagaattcaaatttgtaataaaactatttgtataaaaattaagcttttattaatttgttgctagtattgccacagacgcattaaaagaaacttactgcacaagctgctaataaatttgtaagctttgcataccttaaaaaaaaaaaaaaaaaa

SEQ ID NO: 1508 - protein, 1669 aa, Homo sapiens
MGPRLSVWLLLLPAALLLHEEHSRAAAKGGCAGSGCGKCDCHGVKGQKGERGLPGLQGVIGFPGMQGPEGPQGPPGQKGDTGEPGLPGTKGTRGPPGASGYPGNPGLPGIPGQDGPPGPPGIPGCNGTKGERGPLGPPGLPGFAGNPGPPGLPGMKGDPGEILGHVPGMLLKGERGFPGIPGTPGPPGLPGLQGPVGPPGFTGPPGPPGPPGPPGEKGQMGLSFQGPKGDKGDQGVSGPPGVPGQAQVQEKGDFATKGEKGQKGEPGFQGMPGVGEKGEPGKPGPRGKPGKDGDKGEKGSPGFPGEPGYPGLIGRQGPQGEKGEAGPPGPPGIVIGTGPLGEKGERGYPGTPGPRGEPGPKGFPGLPGQPGPPGLPVPGQAGAPGFPGERGEKGDRGFPGTSLPGPSGRDGLPGPPGSPGPPGQPGYTNGIVECQPGPPGDQGPPGIPGQPGFIGEIGEKGQKGESCLICDIDGYRGPPGPQGPPGEIGFPGQPGAKGDRGLPGRDGVAGVPGPQGTPGLIGQPGAKGEPGEFYFDLRLKGDKGDPGFPGQPGMPGRAGSPGRDGHPGLPGPKGSPGSVGLKGERGPPGGVGFPGSRGDTGPPGPPGYGPAGPIGDKGQAGFPGGPGSPGLPGPKGEPGKIVPLPGPPGAEGLPGSPGFPGPQGDRGFPGTPGRPGLPGEKGAVGQPGIGFPGPPGPKGVDGLPGDMGPPGTPGRPGFNGLPGNPGVQGQKGEPGVGLPGLKGLPGLPGIPGTPGEKGSIGVPGVPGEHGAIGPPGLQGIRGEPGPPGLPGSVGSPGVPGIGPPGARGPPGGQGPPGLSGPPGIKGEKGFPGFPGLDMPGPKGDKGAQGLPGITGQSGLPGLPGQQGAPGIPGFPGSKGEMGVMGTPGQPGSPGPVGAPGLPGEKGDHGFPGSSGPRGDPGLKGDKGDVGLPGKPGSMDKVDMGSMKGQKGDQGEKGQIGPIGEKGSRGDPGTPGVPGKDGQAGQPGQPGPKGDPGISGTPGAPGLPGPKGSVGGMGLPGTPGEKGVPGIPGPQGSPGLPGDKGAKGEKGQAGPPGIGIPGLRGEKGDQGIAGFPGSPGEKGEKGSIGIPGMPGSPGLKGSPGSVGYPGSPGLPGEKGDKGLPGLDGIPGVKGEAGLPGTPGPTGPAGQKGEPGSDGIPGSAGEKGEPGLPGRGFPGFPGAKGDKGSKGEVGFPGLAGSPGIPGSKGEQGFMGPPGPQGQPGLPGSPGHATEGPKGDRGPQGQPGLPGLPGPMGPPGLPGIDGVKGDKGNPGWPGAPGVPGPKGDPGFQGMPGIGGSPGITGSKGDMGPPGVPGFQGPKGLPGLQGIKGDQGDQGVPGAKGLPGPPGPPGPYDIIKGEPGLPGPEGPPGLKGLQGLPGPKGQQGVTGLVGIPGPPGIPGFDGAPGQKGEMGPAGPTGPRGFPGPPGPDGLPGSMGPPGTPSVDHGFLVTRHSQTIDDPQCPSGTKILYHGYSLLYVQGNERAHGQDLGTAGSCLRKFSTMPFLFCNINNVCNFASRNDYSYWLSTPEPMPMSMAPITGENIRPFISRCAVCEAPAMVMAVHSQTIQIPPCPSGWSSLWIGYSFVMHTSAGAEGSGQALASPGSCLEEFRSAPFIECHGRGTCNYYANAYSFWLATIERSEMFKKPTPSTLKAGELRTHVSRCQVCMRRT

SEQ ID NO: 1509 - DNA, 630 bp, Homo sapiens
atgagggaggcagcccatcctcaccgccggtctcggtccgcgagacgcggggacagcgcggtgcgcggcccgcatgcaggggtgaccggagggccgtcccccccacgacccggaaagaaggagagcctcccgagagcgtgcagccctagcctgcacaaggcgctccaagtcggtgctctcgggccagggtctgggcgccgctcgggggtcgctctcacctcgggctcggcttcaggggctgctgcccgaacgcattggcccttccagaagcacccgccggcggcacaccggcagggcggccggccttgctgggctctctgggcgccggccccgggggctcgggcggcccctttcggtcctcggcctggatccgcgaacgcgcgggcgcgaggggttgggacgcgggagcctcttgagtgcggagcgcggagccctggtgtcccggcgcactgcagccacactcccgggccgcgcgctcccgccgcctcttacccgcgccgcagggtcctcccctttgaggcgccgcccgcgcaccgccgggggggagggggcagcgccaacaaattggggagctcggcccgccgcgctcaggtctccgcttggagccgccgcacccgggacggtgcgtag

SEQ ID NO: 1510 - protein, 209 aa, Homo sapiens
MREAAHPHRRSRSARRGDSAVRGPHAGVTGGPSPPRPGKKESLPRACSPSLHKALQVGALGPGSGRRSGVALTSGSASGAAARTHWPFQKHPPAAHRQGGRPCWALWAPAPGARAAPFGPRPGSANARARGVGTREPLECGARSPGVPAHCSHTPGPRAPAASYPRRRVLPFEAPPAHRRGGGGSANKLGSSARRAQVSAWSRRTRDGA

SEQ ID NO: 1511 - DNA, 6264 bp, Homo sapiens
gagtgtggctgcagtgcgccgggacaccagggctccgcgctccgcactcaagaggctcccgcgtcccaacccctcgcgcccgcgcgttcgcggatccaggccgaggaccgaaaggggccgcccgagcccccggggccggcgcccagagagcccagcaaggccggccgccctgccggtgtgccgccggcgggtgcttctggaagggccaatgcgttcgggcagcagcccctgaagccgagcccgaggctaagtgggactgaccggggcccagagtggacgaaccgccagcatggggagagaccagcgcgcggtggccggccctgccctacggcggtggctgctgctggggacagtgaccgtggggttcctcgcccagagcgtcttggcgggtgtgaagaagtttgatgtgccgtgtggaggaagagattgcagtgggggctgccagtgctaccctgagaaaggtggacgtggtcagcctgggccagtgggcccccaggggtacaatgggccaccaggattacaaggattcccgggactgcagggacgtaaaggagacaagggtgaaaggggagcccccggagtaacgggacccaagggcgacgtgggagcaagaggcgtttctggattccctggtgccgatggaattcctggacacccggggcaaggtgggcccaggggaaggccgggctacgatggctgcaacggaacccagggagactcaggtccacaggggccccccggctctgaggggttcaccgggcctcccgggccccaaggaccaaaagggcagaaaggtgagccttatgcactgcctaaagaggagcgcgacagatatcggggtgaacctggagagcctggattggtcggtttccagggacctcccggccgccctgggcatgtgggacagatgggtccagttggagctccagggagaccaggaccacctggaccccctggaccaaaaggacagcaaggcaacagaggacttggtttctacggagttaagggtgaaaagggtgacgtagggcagccgggacccaacgggattccatcagacaccctccaccccatcatcgcgcccacaggagtcaccttccacccagatcagtacaagggtgaaaaaggcagtgagggggaaccaggaataagaggcatttccttgaagggagaagaaggaatcatgggctttcctggactgaggggttaccctggcttgagtggtgaaaaaggatcaccaggacagaagggaagccgaggcctggatggctatcaagggcctgatggaccccggggacccaagggagaagccggagacccagggccccctggactacctgcctactcccctcacccttccctagcaaaaggtgccagaggtgacccgggattcccaggggcccaaggggagccaggaagccagggtgagccaggagacccgggcctcccaggtccccctggcctctccatcggagatggagatcagaggagaggcctgccgggtgagatgggacccaagggcttcatcggagaccccggcatccctgcgctctacgggggcccacctggacctgatggaaagcgagggcctccaggaccccccgggctccctggaccacctggacctgatggcttcctgtttgggctgaaaggagcaaaaggaagagcaggcttccctgggcttcccggctcccctggagcccgcggaccaaaggggtggaaaggtgacgctggggaatgcagatgtacagaaggcgacgaagctatcaaaggtcttccgggactgccaggacccaagggcttcgcaggcatcaacggggagccggggaggaaaggggacagaggagaccccggccaacacggcctccctgggttcccagggctcaagggagtgcctggcaacattggtgctcccggacccaaaggagcaaaaggagattccagaacaatcacaaccaaaggtgagcggggacagcccggcgtcccaggtgtgcccgggatgaaaggtgacgatggcagcccaggccgcgatgggctcgatggattccccggcctcccaggccctcccggtgatggcatcaagggccctccaggggacccaggctatccaggaatacctggaacgaagggtactccaggagaaatgggccccccaggactgggccttcccggcctcaaaggccaacgtggtttccctggagacgccggcttacctggaccaccaggcttcctgggccctcctggccccgcagggaccccaggacaaatagattgtgacacagatgtgaaaagggccgttggaggtgacagacaggaggccatccagccaggttgcataggagggcccaagggattgccaggcctgccaggacccccaggccccacaggtgccaaaggcctccgaggaatcccaggcttcgcaggagctgatggaggaccagggcccaggggcttgccaggagacgcaggtcgtgaagggttcccaggacccccagggttcataggaccccgaggatccaaaggtgcagtgggcctccctggcccagatggatccccaggtcccatcggcctgccagggccagatgggccccctggggaaaggggcctccctggagaagtcctgggagctcagcccgggccacggggagatgctggtgtgcctggacagcctgggcttaaaggccttcccggagacagaggcccccctggattcagaggaagccaagggatgcctgggatgccagggctgaagggccagccaggcctcccaggaccttccggccagccaggcctgtatgggcctccaggactgcatggattcccaggagctcctggccaagaggggcccttggggctgccaggaatcccaggccgtgaaggtctgcctggtgatagaggggaccctggggacacaggcgctcctggccctgtgggcatgaaaggtctctctggtgacagaggagatgctggcttcacaggggagcaaggccatccaggaagccctggatttaaaggaattgatggaatgcctgggacccccgggctaaaaggagatagaggctcacctgggatggatggtttccaaggcatgcctggactcaaagggagacccgggtttccagggagcaaaggcgaggctggatttttcggaatacccggtctgaagggtctggctggtgagccaggttttaaaggcagccgaggggaccctgggcccccaggaccacctcctgtcatcctgccaggaatgaaagacattaaaggagagaaaggagatgaagggcctatggggctgaaaggatacctgggcgcaaaaggtatccaaggaatgccaggcatcccagggctgtcaggaatccctgggctgcctgggaggcccggccacatcaaaggagtcaagggagacatcggagtccccggcatccccggtttgccaggattccctggggtggctggcccccctggaattacgggattcccaggattcataggaagccggggtgacaaaggtgccccagggagagcaggcctgtatggcgagattggcgcgactggtgatttcggtgacatcggggacactataaatttaccaggaagaccaggcctgaagggggagcggggcaccactggaataccaggtctgaagggattctttggagagaagggaacagaaggtgacatcggcttccctgggataacaggcgtgactggagtccaaggccctcctggacttaaaggacaaacaggctttccagggctgactgggcctccagggtcgcagggagagctggggcggattggactgcctggtggcaaaggagatgatggctggccgggagctccgggcttaccaggttttccgggactccgtgggatccgcggcttacacggcttgccaggcaccaagggctttccaggatccccaggttctgacatccacggagacccaggcttcccaggccctcctggggaaagaggtgacccaggagaggccaacacccttccaggccctgtgggagtcccaggacagaaaggagaccaaggagctccaggggaacgaggcccacctgggagcccaggacttcaggggttcccaggcatcacacccccttccaacatctctggggcacctggtgacaaaggggcgccagggatatttggcctgaaaggttatcggggcccaccagggccaccaggttctgctgctcttcctggaagcaaaggtgacacagggaacccaggagctccaggaaccccagggaccaaaggatgggccggggactccgggccccagggcaggcctggtgtgtttggtctcccaggagaaaaagggcccaggggtgaacaaggcttcatggggaacactggacccaccggggcggtgggcgacagaggccccaagggacccaagggagacccaggattccctggtgcccccgggactgtgggagcccccgggattgcaggaatcccccagaagattgccgtccaaccagggacagtgggtccccaggggaggcgaggcccccctggggcaccgggggagatggggccccagggcccccccggagaaccaggttttcgtggggctccagggaaagctgggccccaaggaagaggtggtgtgtctgctgttcccggcttccggggagatgaaggacccataggccaccaggggccgattggccaagaaggtgcaccaggccgtccagggagcccgggcctgccgggtatgccaggccgcagcgtcagcatcggctacctcctggtgaagcacagccagacggaccaggagcccatgtgcccagtgggcatgaacaaactctggagtggatacagcctgctgtacttcgagggccaggagaaggcgcacaaccaggacctggggctggcgggctcctgcctggcgcggttcagcaccatgcccttcctgtactgcaaccctggtgatgtctgctactatgccagccggaacgacaagtcctactggctctctaccactgcgccgctgcccatgatgcccgtggccgaggacgagatcaagccctacatcagccgctgttctgtgtgtgaggccccggccatcgccatcgcggtccacagtcaggatgtctccatcccacactgcccagctgggtggcggagtttgtggatcggatattccttcctcatgcacacggcggcgggagacgaaggcggtggccaatcactggtgtcaccgggcagctgtctagaggacttccgcgccacaccattcatcgaatgcaatggaggccgcggcacctgccactactacgccaacaagtacagcttctggctgaccaccattcccgagcagagcttccagggctcgccctccgccgacacgctcaaggccggcctcatccgcacacacatcagccgctgccaggtgtgcatgaagaacctgtgagccggcgcgtgccaggaagggccattttggtgcttattcttaacttattacctcaggtgccaacccaaaaattggttttatttttttcttaaaaaaaaaaaagtctaccaaaggaatttgcatccagcagcagcacttagacctgccagccactgtcaccgagcgggtgcaagcactcggggtccctggagggcaagccctgcccacagaaagccaggagcagccctggcccccatcagccctgctagacgcaccgcctgaaggcacagctaaccacttcgcacacacccatgtaaccactgcactttccaatgccacagacaactcacattgttcaactcccttctcggggtgggacagacgagacaacagcacacaggcagccagccgtggccagaggctcgaggggctcagggcctcaggcacccgtccccacacgagggccccgtgggtgggcctggccctgctttctacgccaatgttatgccagctccatgttctcccaaataccgttgatgtgaattattttaaaggcaaaaccgtgctctttattttaaaaaacactgataatcacactgcggtaggtcattcttttgccacatccctatagaccactgggtttggcaaaactcaggcagaagtggagacctttctagacatcattgtcagccttgctacttgaaggtacaccccatagggtcggaggtgctgtccccactgccccacgttgtccctgagatttaacccctccactgctgggggtgagctgtactcttctgactgccccctcctgtgtaacgactacaaaataaaacttggttctgaatatttttaaa

SEQ ID NO: 1512 - protein, 1712 aa, Homo sapiens
MGRDQRAVAGPALRRWLLLGTVTVGFLAQSVLAGVKKFDVPCGGRDCSGGCQCYPEKGGRGQPGPVGPQGYNGPPGLQGFPGLQGRKGDKGERGAPGVTGPKGDVGARGVSGFPGADGIPGHPGQGGPRGRPGYDGCNGTQGDSGPQGPPGSEGFTGPPGPQGPKGQKGEPYALPKEERDRYRGEPGEPGLVGFQGPPGRPGHVGQMGPVGAPGRPGPPGPPGPKGQQGNRGLGFYGVKGEKGDVGQPGPNGIPSDTLHPIIAPTGVTFHPDQYKGEKGSEGEPGIRGISLKGEEGIMGFPGLRGYPGLSGEKGSPGQKGSRGLDGYQGPDGPRGPKGEAGDPGPPGLPAYSPHPSLAKGARGDPGFPGAQGEPGSQGEPGDPGLPGPPGLSIGDGDQRRGLPGEMGPKGFIGDPGIPALYGGPPGPDGKRGPPGPPGLPGPPGPDGFLFGLKGAKGRAGFPGLPGSPGARGPKGWKGDAGECRCTEGDEAIKGLPGLPGPKGFAGINGEPGRKGDRGDPGQHGLPGFPGLKGVPGNIGAPGPKGAKGDSRTITTKGERGQPGVPGVPGMKGDDGSPGRDGLDGFPGLPGPPGDGIKGPPGDPGYPGIPGTKGTPGEMGPPGLGLPGLKGQRGFPGDAGLPGPPGFLGPPGPAGTPGQIDCDTDVKRAVGGDRQEAIQPGCIGGPKGLPGLPGPPGPTGAKGLRGIPGFAGADGGPGPRGLPGDAGREGFPGPPGFIGPRGSKGAVGLPGPDGSPGPIGLPGPDGPPGERGLPGEVLGAQPGPRGDAGVPGQPGLKGLPGDRGPPGFRGSQGMPGMPGLKGQPGLPGPSGQPGLYGPPGLHGFPGAPGQEGPLGLPGIPGREGLPGDRGDPGDTGAPGPVGMKGLSGDRGDAGFTGEQGHPGSPGFKGIDGMPGTPGLKGDRGSPGMDGFQGMPGLKGRPGFPGSKGEAGFFGIPGLKGLAGEPGFKGSRGDPGPPGPPPVILPGMKDIKGEKGDEGPMGLKGYLGAKGIQGMPGIPGLSGIPGLPGRPGHIKGVKGDIGVPGIPGLPGFPGVAGPPGITGFPGFIGSRGDKGAPGRAGLYGEIGATGDFGDIGDTINLPGRPGLKGERGTTGIPGLKGFFGEKGTEGDIGFPGITGVTGVQGPPGLKGQTGFPGLTGPPGSQGELGRIGLPGGKGDDGWPGAPGLPGFPGLRGIRGLHGLPGTKGFPGSPGSDIHGDPGFPGPPGERGDPGEANTLPGPVGVPGQKGDQGAPGERGPPGSPGLQGFPGITPPSNISGAPGDKGAPGIFGLKGYRGPPGPPGSAALPGSKGDTGNPGAPGTPGTKGWAGDSGPQGRPGVFGLPGEKGPRGEQGFMGNTGPTGAVGDRGPKGPKGDPGFPGAPGTVGAPGIAGIPQKIAVQPGTVGPQGRRGPPGAPGEMGPQGPPGEPGFRGAPGKAGPQGRGGVSAVPGFRGDEGPIGHQGPIGQEGAPGRPGSPGLPGMPGRSVSIGYLLVKHSQTDQEPMCPVGMNKLWSGYSLLYFEGQEKAHNQDLGLAGSCLARFSTMPFLYCNPGDVCYYASRNDKSYWLSTTAPLPMMPVAEDEIKPYISRCSVCEAPAIAIAVHSQDVSIPHCPAGWRSLWIGYSFLMHTAAGDEGGGQSLVSPGSCLEDFRATPFIECNGGRGTCHYYANKYSFWLTTIPEQSFQGSPSADTLKAGLIRTHISRCQVCMKNL

SEQ ID NO: 1513 - DNA, 8595 bp, Homo sapiens
ggaatcggacgccccaggcatatacaagctgagtttcagccatggaaaaactccatgggcatgtgtctgcccatccagacatcctctccttggagaaccggtgcctggctatgctccctgacttacagcccttggagaaactacatcagcatgtatctacccactcagatatcctctccttgaagaaccagtgcctagccacgcttcctgacctgaagaccatggaaaaaccacatggatatgtgtctgcccacccagacatcctctccttggagaaccagtgcctggccacactttctgacctgaagaccatggagaaaccacatggacatgtttctgcccacccagacatcctctccttggagaaccggtgcctggccaccctctctagtctaaagagcactgtgtctgccagccccttgttccagagtctacagatatctcacatgacgcaagctgatttgtaccgtgtgaacaacagcaattgcctgctctctgagcctccaagttggagggctcagcatttctctaagggactagacctttcaacctgccctatagccctgaaatccatctctgccacagagacagctcaggaagcaactttgggtcgttggtttgattcagaagagaagaaaggggcagagacccaaatgccttcttatagtctgagcttgggagaggaggaggaggtggaggatctggccgtgaagctcacctctggagactctgaatctcatccagagcctactgaccatgtccttcaggaaaagaagatggctctactgagcttgctgtgctctactctggtctcagaagtaaacatgaacaatacatctgaccccaccctggctgccatttttgaaatctgtcgtgaacttgccctcctggagcctgagtttatcctcaaggcatctttgtatgccaggcagcagctgaacgtccggaatgtggccaataacatcttggccattgctgctttcttgccggcgtgtcgcccccacctgcgacgatatttctgtgccattgtccagctgccttctgactggatccaggtggctgagctttaccagagcctggctgagggagataagaataagctggtgcccctgcccgcctgtctccgtactgccatgacggacaaatttgcccagtttgacgagtaccagctggctaagtacaaccctcggaagcaccgggccaagagacacccccgccggccaccccgctctccagggatggagcctccattttctcacagatgttttccaaggtacatagggtttctcagagaagagcagagaaagtttgagaaggccggtgatacagtgtcagagaaaaagaatcctccaaggttcaccctgaagaagctggttcagcgactgcacatccacaagcctgcccagcacgttcaagccctgctgggttacagatacccctccaacctacagctcttttctcgaagtcgccttcctgggccttgggattctagcagagctgggaagaggatgaagctgtctaggccagagacctgggagcgggagctgagcctacgggggaacaaagcgtcggtctgggaggaactcattgaaaatgggaagcttcccttcatggccatgcttcggaacctgtgcaacctgctgcgggttggaatcagttcccgccaccatgagctcattctccagagactccagcatgcgaagtcggtgatccacagtcggcagtttccattcagatttcttaacgcccatgatgccattgatgccctcgaggctcaactcagaaatcaagcattgccctttccttcgaatataacactgatgaggcggatactaactagaaatgaaaagaaccgtcccaggcggaggtttctttgccacctaagccgtcagcagcttcggatggcaatgaggatacctgtgttgtatgagcagctcaagagggagaagctgagagtacacaaggccagacagtggaaatatgatggtgagatgctgaacaggtaccgacaggccctagagacagctgtgaacctctctgtgaagcacagcctgcccctgctgccaggccgcactgtcttggtctatctgacagatgctaatgcagacaggctctgtccaaagagcaacccacaagggcccccgctgaactatgcactgctgttgattgggatgatgatcacgagggcggagcaggtggacgtcgtgctgtgtggaggtgacactctgaagactgcagtgcttaaggcagaagaaggcatcctgaagactgccatcaagctccaggctcaagtccaggagtttgatgaaaatgatggatggtccctgaatacttttgggaaatacctgctgtctctggctggccaaagggttcctgtggacagggtcatcctccttggccaaagcatggatgatggaatgataaatgtggccaaacagctttactggcagcgtgtgaattccaagtgcctctttgttggtatcctcctaagaagggtacaatacctgtcaacagatttgaatcccaatgatgtgacactctcaggctgtactgatgcgatactgaagttcattgcagagcatggggcctcccatcttctggaacatgtgggccaaatggacaaaatattcaagattccaccacccccaggaaagacaggggtccagtctctccggccactggaagaggacactccaagccccttggctcctgtttcccagcaaggatggcgcagcatccggcttttcatttcatccactttccgagacatgcatggggagcgggacctgctgctgaggtctgtgctgccagcactgcaggcccgagcggcccctcaccgtatcagccttcacggaatcgacctccgctggggcgtcactgaggaggagacccgtaggaacagacaactggaagtgtgccttggggaggtggagaacgcacagctgtttgtggggattctgggctcccgttatggatacattccccccagctacaaccttcctgaccatccacacttccactgggcccagcagtacccttcagggcgctctgtgacagagatggaggtgatgcagttcctgaaccggaaccaacgtctgcagccctctgcccaagctctcatctacttccgggattccagcttcctcagctctgtgccagatgcctggaaatctgactttgtttctgagtctgaagaggccgcacgtcggatctcagaactgaagagctacctaagcagacagaaagggatcacctgccgcagatacccctgtgagtgggggggtgtggcagctggccggccctatgttggcgggctggaggagtttgggcagttggttctgcaggatgtatggaatatgatccagaagctctacctgcagcctggggccctgctggagcagccagtgtccatcccagacgatgacttggtccaggccaccttccagcagctgcagaagccaccgagtcctgcccggccacgccttcttcaggacacagtgcaacggctgatgctgccccacggaaggctgagcctggtgacggggcagtcaggacagggcaagacagccttcctggcatctcttgtgtcagccctgcaggctcctgatggggccaaggtggcatcattagtcttcttccacttttctggggctcgtcctgaccagggtcttgccctcactctgctcagacgcctctgtacctatctgcgtggccaactaaaagagccaggtgccctccccagcacctaccgaagcctggtgtgggagctgcagcagaggctgctgcccaagtctgctgagtccctgcatcctggccagacccaggtcctgatcatcgatggggctgataggttagtggaccagaatgggcagctgatttcagactggatcccaaagaagcttccccggtgtgtacacctggtgctgagtgtgtctagtgatgcaggcctaggggagacccttgagcagagccagggtgcccacgtgctggccttggggcctctggaggcctctgctcgggcccggctggtgagagaggagctggccctgtacgggaagcggctggaggagtcaccatttaacaaccagatgcgactgctgctggtgaagcgggaatcaggccggccgctctacctgcgcttggtcaccgatcacctgaggctcttcacgctgtatgagcaggtgtctgagagactccggaccctgcctgccactgtccccctgctgctgcagcacatcctgagcacactggagaaggagcacgggcctgatgtccttccccaggccttgactgccctagaagtcacacggagtggtttgactgtggaccagctgcacggagtgctgagtgtgtggcggacactaccgaaggggactaagagctgggaagaagcagtggctgctggtaacagtggagacccctaccccatgggcccgtttgcctgcctcgtccagagtctgcgcagtttgctaggggagggccctctggagcgccctggtgcccggctgtgcctccctgatgggcccctgagaacagcagctaaacgttgctatgggaagaggccagggctagaggacacggcacacatcctcattgcagctcagctctggaagacatgtgacgctgatgcctcaggcaccttccgaagttgccctcctgaggctctgggagacctgccttaccacctgctccagagcgggaaccgtggacttctttcgaagttccttaccaacctccatgtggtggctgcacacttggaattgggtctggtctctcggctcttggaggcccatgccctctatgcttcttcagtccccaaagaggaacaaaagctccccgaggctgacgttgcagtgtttcgcaccttcctgaggcagcaggcttcaatcctcagccagtacccccggctcctgccccagcaggcagccaaccagcccctggactcacctctttgccaccaagcctcgctgctctcccggagatggcacctccaacacacactacgatggcttaataaaccccggaccatgaaaaatcagcaaagctccagcctgtctctggcagtttcctcatcccctactgctgtggccttctccaccaatgggcaaagagcagctgtgggcactgccaatgggacagtttacctgttggacctgagaacttggcaggaggagaagtctgtggtgagtggctgtgatggaatctctgcttgtttgttcctctccgatgatacactctttcttactgccttcgacgggctcctggagctctgggacctgcagcatggttgtcgggtgctgcagactaaggctcaccagtaccaaatcactggctgctgcctgagcccagactgccggctgctagccaccgtgtgcttgggaggatgcctaaagctgtgggacacagtccgtgggcagctggccttccagcacacctaccccaagtccctgaactgtgttgccttccacccagaggggcaggtaatagccacaggcagctgggctggcagcatcagcttcttccaggtggatgggctcaaagtcaccaaggacctgggggcacccggagcctctatccgtaccttggccttcaatgtgcctgggggggttgtggctgtgggccggctggacagtatggtggagctgtgggcctggcgagaaggggcacggctggctgccttccctgcccaccatggctttgttgctgctgcgcttttcctgcatgcgggttgccagttactgacggctggagaggatggcaaggttcaggtgtggtcagggtctctgggtcggccccgtgggcacctgggttccctttctctctctcctgccctctctgtggcactcagcccagatggtgatcgggtggctgttggatatcgagcggatggcattaggatctacaaaatctcttcaggttcccagggggctcagggtcaggcactggatgtggcagtgtccgccctggcctggctaagccccaaggtattggtgagtggtgcagaagatgggtccttgcagggctgggcactcaaggaatgctcccttcagtccctctggctcctgtccagattccagaagcctgtgctaggactggccacttcccaggagctcttggcttctgcctcagaggatttcacagtgcagctgtggccaaggcagctgctgacgcggccacacaaggcagaagactttccctgtggcactgagctgcggggacatgagggccctgtgagctgctgtagtttcagcactgatggaggcagcctggccaccgggggccgggatcggagtctcctctgctgggacgtgaggacacccaaaacccctgttttgatccactccttccctgcctgtcaccgtgactgggtcactggctgtgcctggaccaaagataacctactgatatcctgctccagtgatggctctgtggggctctgggacccagagtcaggacagcggcttggtcagttcctgggtcatcagagtgctgtgagcgctgtggcagctgtggaggagcacgtggtgtctgtgagccgggatgggaccttgaaagtgtgggaccatcaaggcgtggagctgaccagcatccctgctcactcaggacccattagccactgtgcagctgccatggagccccgtgcagctggacagcctgggtcagagcttctggtggtaaccgtcgggctagatggggccacacggttatggcatccactcttggtgtgccaaacccacaccctcctgggacacagcggcccagtccgtgctgctgctgtttcagaaacctcaggcctcatgctgaccgcctctgaggatggttctgtacggctctggcaggttcctaaggaagcagatgacacatgtataccaaggagttctgcagccgtcactgctgtggcttgggcaccagatggttccatggcagtatctggaaatcaagctggggaactaatcttgtggcaggaagctaaggctgtggccacagcacaggctccaggccacattggtgctctgatctggtcctcggcacacaccttttttgtcctcagtgctgatgagaaaatcagcgagtggcaagtgaaactgcggaagggttcggcacccggaaatttgagtcttcacctgaaccgaattctacaggaggacttaggggtgctgacaagtctggattgggctcctgatggtcactttctcatcttggccaaagcagatttgaagttactttgcatgaagccaggggatgctccatctgaaatctggagcagctatacagaaaatcctatgatattgtccacccacaaggagtatggcatatttgtcctgcagcccaaggatcctggagttctttctttcttgaggcaaaaggaatcaggagagtttgaagagaggctgaactttgatataaacttagagaatcctagtaggaccctaatatcgataactcaagccaaacctgaatctgagtcctcatttttgtgtgccagctctgatgggatcctatggaacctggccaaatgcagcccagaaggagaatggaccacaggtaacatgtggcagaaaaaagcaaacactccagaaacccaaactccagggacagacccatctacctgcagggaatctgatgccagcatggatagtgatgccagcatggatagtgagccaacaccacatctaaagacacggcagcgtagaaagattcactcgggctctgtcacagccctccatgtgctacctgagttgctggtgacagcttcgaaggacagagatgttaagctatgggagagacccagtatgcagctgctgggcctgttccgatgcgaagggtcagtgagctgcctggaaccttggctgggcgctaactccaccctgcagcttgccgtgggagacgtgcagggcaatgtgtactttctgaattgggaatgaagatgtgccactcgggaataatgataccccttgtgctagagatgcaaagcctgaagacactggtagcttttaataattataaaattaataatttcttgataattataaaaatgaagtgtcaaaaaatctcaagtgtaggcctgcctgtgttctcatgtggatttagaacaggaggatattctatgtgtatgtatatgtacattctaatgtgtgtctcttcttattcaacattaatccttactagaaccacaagaaagtgaatgaaatctttagtaggtactcttttgaaactaggttttagaattcttgcatcactcgcgggccctaggaccctaggatgccattcttgccaggaggaggaatgagagtgatgttggccaacattcaatttgaacagagcatggaagacctttcagttcatcgggaaagaatgagggagggagaataagtcagtcatgcatcagggcatttagaaagagctatgtttctgtcacagagacagcccttttctcagaactacccagaggaggccgggcatggtggctcacgcttgtaatcccagcactttgggaggccgaggtgggcagatcacgaggtcaggagatcaagaccatcctggctaacatagtgaaaccctgtctctactaaaaaatacaaaaagttagccagg

SEQ ID NO: 1514 - protein, 2627 aa, Homo sapiens
MEKLHGHVSAHPDILSLENRCLAMLPDLQPLEKLHQHVSTHSDILSLKNQCLATLPDLKTMEKPHGYVSAHPDILSLENQCLATLSDLKTMEKPHGHVSAHPDILSLENRCLATLSSLKSTVSASPLFQSLQISHMTQADLYRVNNSNCLLSEPPSWRAQHFSKGLDLSTCPIALKSISATETAQEATLGRWFDSEEKKGAETQMPSYSLSLGEEEEVEDLAVKLTSGDSESHPEPTDHVLQEKKMALLSLLCSTLVSEVNMNNTSDPTLAAIFEICRELALLEPEFILKASLYARQQLNVRNVANNILAIAAFLPACRPHLRRYFCAIVQLPSDWIQVAELYQSLAEGDKNKLVPLPACLRTAMTDKFAQFDEYQLAKYNPRKHRAKRHPRRPPRSPGMEPPFSHRCFPRYIGFLREEQRKFEKAGDTVSEKKNPPRFTLKKLVQRLHIHKPAQHVQALLGYRYPSNLQLFSRSRLPGPWDSSRAGKRMKLSRPETWERELSLRGNKASVWEELIENGKLPFMAMLRNLCNLLRVGISSRHHELILQRLQHAKSVIHSRQFPFRFLNAHDAIDALEAQLRNQALPFPSNITLMRRILTRNEKNRPRRRFLCHLSRQQLRMAMRIPVLYEQLKREKLRVHKARQWKYDGEMLNRYRQALETAVNLSVKHSLPLLPGRTVLVYLTDANADRLCPKSNPQGPPLNYALLLIGMMITRAEQVDVVLCGGDTLKTAVLKAEEGILKTAIKLQAQVQEFDENDGWSLNTFGKYLLSLAGQRVPVDRVILLGQSMDDGMINVAKQLYWQRVNSKCLFVGILLRRVQYLSTDLNPNDVTLSGCTDAILKFIAEHGASHLLEHVGQMDKIFKIPPPPGKTGVQSLRPLEEDTPSPLAPVSQQGWRSIRLFISSTFRDMHGERDLLLRSVLPALQARAAPHRISLHGIDLRWGVTEEETRRNRQLEVCLGEVENAQLFVGILGSRYGYIPPSYNLPDHPHFHWAQQYPSGRSVTEMEVMQFLNRNQRLQPSAQALIYFRDSSFLSSVPDAWKSDFVSESEEAARRISELKSYLSRQKGITCRRYPCEWGGVAAGRPYVGGLEEFGQLVLQDVWNMIQKLYLQPGALLEQPVSIPDDDLVQATFQQLQKPPSPARPRLLQDTVQRLMLPHGRLSLVTGQSGQGKTAFLASLVSALQAPDGAKVASLVFFHFSGARPDQGLALTLLRRLCTYLRGQLKEPGALPSTYRSLVWELQQRLLPKSAESLHPGQTQVLIIDGADRLVDQNGQLISDWIPKKLPRCVHLVLSVSSDAGLGETLEQSQGAHVLALGPLEASARARLVREELALYGKRLEESPFNNQMRLLLVKRESGRPLYLRLVTDHLRLFTLYEQVSERLRTLPATVPLLLQHILSTLEKEHGPDVLPQALTALEVTRSGLTVDQLHGVLSVWRTLPKGTKSWEEAVAAGNSGDPYPMGPFACLVQSLRSLLGEGPLERPGARLCLPDGPLRTAAKRCYGKRPGLEDTAHILIAAQLWKTCDADASGTFRSCPPEALGDLPYHLLQSGNRGLLSKFLTNLHVVAAHLELGLVSRLLEAHALYASSVPKEEQKLPEADVAVFRTFLRQQASILSQYPRLLPQQAANQPLDSPLCHQASLLSRRWHLQHTLRWLNKPRTMKNQQSSSLSLAVSSSPTAVAFSTNGQRAAVGTANGTVYLLDLRTWQEEKSVVSGCDGISACLFLSDDTLFLTAFDGLLELWDLQHGCRVLQTKAHQYQITGCCLSPDCRLLATVCLGGCLKLWDTVRGQLAFQHTYPKSLNCVAFHPEGQVIATGSWAGSISFFQVDGLKVTKDLGAPGASIRTLAFNVPGGVVAVGRLDSMVELWAWREGARLAAFPAHHGFVAAALFLHAGCQLLTAGEDGKVQVWSGSLGRPRGHLGSLSLSPALSVALSPDGDRVAVGYRADGIRIYKISSGSQGAQGQALDVAVSALAWLSPKVLVSGAEDGSLQGWALKECSLQSLWLLSRFQKPVLGLATSQELLASASEDFTVQLWPRQLLTRPHKAEDFPCGTELRGHEGPVSCCSFSTDGGSLATGGRDRSLLCWDVRTPKTPVLIHSFPACHRDWVTGCAWTKDNLLISCSSDGSVGLWDPESGQRLGQFLGHQSAVSAVAAVEEHVVSVSRDGTLKVWDHQGVELTSIPAHSGPISHCAAAMEPRAAGQPGSELLVVTVGLDGATRLWHPLLVCQTHTLLGHSGPVRAAAVSETSGLMLTASEDGSVRLWQVPKEADDTCIPRSSAAVTAVAWAPDGSMAVSGNQAGELILWQEAKAVATAQAPGHIGALIWSSAHTFFVLSADEKISEWQVKLRKGSAPGNLSLHLNRILQEDLGVLTSLDWAPDGHFLILAKADLKLLCMKPGDAPSEIWSSYTENPMILSTHKEYGIFVLQPKDPGVLSFLRQKESGEFEERLNFDINLENPSRTLISITQAKPESESSFLCASSDGILWNLAKCSPEGEWTTGNMWQKKANTPETQTPGTDPSTCRESDASMDSDASMDSEPTPHLKTRQRRKIHSGSVTALHVLPELLVTASKDRDVKLWERPSMQLLGLFRCEGSVSCLEPWLGANSTLQLAVGDVQGNVYFLNWE

SEQ ID NO: 1515 - DNA, 1362 bp, Homo sapiens
atggcggaagcccctgggttggagaggctctggagcaaagcccgtcactacctcctcacccacctgcctgctgtagccttgtgtcctgctttcccttctttaccagctgcctgcttggctgagctcctggatagtgatgagctccatgtgcaggaggagtttgaggcctttgtggctgcacggtgttggctggctgccaaccccgagacccaggagtcagaggccaaggccctgctgcgatgtgtccgctttggccgcatgtccaccagggagttgcggagggtgcgggcagccgggctacttccacccctgaccccagatctgttgcaccagctgatggtagaggctgatgttccaggccaagagagacggagggagcctgaccgggcactggtagtgattggcggggatgggctcagaccagacatggccctaagacaaccatcccgagcagtgtggtgggcccgggccttccgctgtggcgtgggactggtacgaactgttgagtgggggcagctgcctgccctgcctgcccccggacgcttccggcatggggctgcaagcctggcaggaagtgaactctatgtgtgtgggggacaagatttctacagtcactccaacaccctggcttcaactctcaggtgggagcccagtcaagaggactgggaggagatggctcctttgtcccaggctcgaagccttttctccttggtggcactggatggaaaactttatgccctgggtggaagacacaatgatgttgccctggactctgtggagacctacaaccctgagctcaatgtctggaggccagcacctgcacttccagcaccatgttttgcccacgcagctgcgattttggagggccagttgtacgtgagcggtggctgtggtgggactggccaatacctggcctcactgatgcactatgaccccaaacttgagaagccagggacgtttctgagccctatgggggtacctcgggctggccatgtcatggctgcattgggtgggaggttgtatgtggcaggtgggctgggtgagactgaggacctgctaagctttgaggcctatgaactaaggactgatagctggactcacctggcacccctaccctccccccatgtgggggctgcaagtgctgtgctgcagggggagctactggtgctcgggggctacagtcaccgtacttatgccctctctcaccttatccatgcctactgtcctggcctgggccgatggctctgcctgggaactctgccaaggcctcgggctgagatgcctgcctgcatcctgacactgcccgctgtgcagcacatagctttggttcccaccccacaccaaaccaaacctgctgggtga

SEQ ID NO: 1516 - protein, 453 aa, Homo sapiens
MAEAPGLERLWSKARHYLLTHLPAVALCPAFPSLPAACLAELLDSDELHVQEEFEAFVAARCWLAANPETQESEAKALLRCVRFGRMSTRELRRVRAAGLLPPLTPDLLHQLMVEADVPGQERRREPDRALVVIGGDGLRPDMALRQPSRAVWWARAFRCGVGLVRTVEWGQLPALPAPGRFRHGAASLAGSELYVCGGQDFYSHSNTLASTLRWEPSQEDWEEMAPLSQARSLFSLVALDGKLYALGGRHNDVALDSVETYNPELNVWRPAPALPAPCFAHAAAILEGQLYVSGGCGGTGQYLASLMHYDPKLEKPGTFLSPMGVPRAGHVMAALGGRLYVAGGLGETEDLLSFEAYELRTDSWTHLAPLPSPHVGAASAVLQGELLVLGGYSHRTYALSHLIHAYCPGLGRWLCLGTLPRPRAEMPACILTLPAVQHIALVPTPHQTKPAG

SEQ ID NO: 1517 - DNA, 767 bp, Homo sapiens
atgagcgtctcggacaccccacattatccccctgagctggagagtgtctctcatcccgtccagagggactgccttggactccttgtgcacgcccagagaaccccttcctggcctccctcccccgacgaggatcccagattgccttcctttcctctggaggagcctggttccaggcccctggtcccaaggaaccttccctttccagccttgtccctagaggaagaagaggaagaggaagaagatgaagatgcggcagagcccgagtggctgcgcagcgaggagcatccgagccagtttttcgccgaggcccagcggctgcgggagcagagactgttgctggacgaagagtgcaccgagccgccctggcctgtggcagtgagttctttggggccatgctcctgagcgggatgagggaatcccagggcacagaggtatctctgcggacgatctccacccaggacctgcgactcctcgtctcttttgcttactccggagttgtgcgggcaaggtggccagggctactgagagctgcccaggctgctctgcagtaccagagctcttcctgcttggatttgtgtcagaaaggcttggcacggggcctcagccctgcccgttgcctggccctgttccccatggcggaagcccctgggttggagaggctctggagcaaagcccgtcactacctcctcacccacctgcctgctgtagccttgtgtcctgctttcccttctttaccagctgcctgcttggctgagctcctggatagt

SEQ ID NO: 1518 - protein, 133 aa, Homo sapiens
MSVSDTPHYPPELESVSHPVQRDCLGLLVHAQRTPSWPPSPDEDPRLPSFPLEEPGSRPLVPRNLPFPALSLEEEEEEEEDEDAAEPEWLRSEEHPSQFFAEAQRLREQRLLLDEECTEPPWPVAVSSLGPCS

SEQ ID NO: 1519 - DNA, 1547 bp, Homo sapiens
tgtgccagatgcacagcacattgtgtgacactgacttaagattctaactatgtgcaagagggaaaaaaacagtggagaaggctgggctggaccacgggaaagagataggaaaacggatacgaatgtaaggcacagagttggctcggcgtccctggcagttaggaagacaggtccctggaggggccttggcgggtctccgctcgcgggagttccgcggtgtctttcccagtgctatctgcaggctggccagcttcctctgcgctccggaaagctgcggcccagcgcggactagtgaggacctccacagctcctgacattgccaggagtcctgtcggcgttttctcccagcctccgccatgccggcggtgctgggttttgaaggcagcgccaataagattggcgtgggcgtggtgcgggatggcaaggtgctggcgaacccgcggcggacttacgtcacgcctcctggcacaggattccttccaggtgatacagccaggcatcaccgagctgttatcctagacctgctgcaggaggcactaacagagtctggattaacctcccaggatatcgactgcattgcatacaccaagggccctggcatgggtgccccactggtttctgtggctgttgtggcccgtactgtggcccaactgtggaataagccattggtgggtgtgaaccactgtataggccacattgagatgggccgcctcatcactggagccaccagcccaaccgtgttgtatgtgagtggaggaaatacgcaggtgattgcatactcggaacatcgttaccgtatctttggggaaaccatcgatattgcagtgggtaattgtctggatcgttttgctcgagtgctgaagatttctaacgacccaagtccaggatacaacattgaacagatggcaaagcgaggcaagaagctagttgagctgccatacactgtaaaggggatggacgtctcattctcagggatcctgtctttcattgaggatgtagcccatcggatgctggccacaggcgagtgtactcctgaggatctgtgtttctccctgcaggaaactgtgtttgcaatgctggtagagatcacagagcgagccatggcacattgtggctcccaggaggccctcattgtgggaggagtggggtgtaatgtgaggctacaggagatgatggcaacaatgtgccaggaacgtggagcccggctttttgctacagatgagagattctgtattgacaatggagcgatgatagcccaggctggctgggagatgtttcgggctggacacaggaccccactcagtgattctggggttacacagaggtatcggacagatgaagtagaggtgacctggagggactaataagatcaacagaatcagagtagatagttccttaatcggaacccaaaggaccccgtgcctcaatctctatcctgatgtcatgggagtcctagcaaagctatagactccaagcaaggcttggggtcctttatggaaccccaggatgactcagcaataaaatatttttggttttttggttttgta

SEQ ID NO: 1520 - protein, 335 aa, Homo sapiens
MPAVLGFEGSANKIGVGVVRDGKVLANPRRTYVTPPGTGFLPGDTARHHRAVILDLLQEALTESGLTSQDIDCIAYTKGPGMGAPLVSVAVVARTVAQLWNKPLVGVNHCIGHIEMGRLITGATSPTVLYVSGGNTQVIAYSEHRYRIFGETIDIAVGNCLDRFARVLKISNDPSPGYNIEQMAKRGKKLVELPYTVKGMDVSFSGILSFIEDVAHRMLATGECTPEDLCFSLQETVFAMLVEITERAMAHCGSQEALIVGGVGCNVRLQEMMATMCQERGARLFATDERFCIDNGAMIAQAGWEMFRAGHRTPLSDSGVTQRYRTDEVEVTWRD

SEQ ID NO: 1521 - DNA, 1574 bp, Homo sapiens
cagacagaccaatcacgcgcattcttcggccacgacaagcgcgcctctgatcacgtgaccaggtccgctacccacgtgggggctcagcgtgcacccttctttgtgctcgggttaggaggagctaggctgccatcgggccggtgcagatacggggttgctcttttgctcataagaggggcttcgctggcagtctgaacggcaagcttgagtcaggacccttaattaagatcctcaattggctggagggcagatctcgcgagtagggcaacgcggtaaaaatattgcttcggtgggtgacgcggtacagctgcccaagggcgttcgtaacgggaatgccgaagcgtgggaaaaagggagcggtggcggaagacggggatgagctcaggacagagccagaggccaagaagagtaagacggccgcaaagaaaaatgacaaagaggcagcaggagagggcccagccctgtatgaggaccccccagatcagaaaacctcacccagtggcaaacctgccacactcaagatctgctcttggaatgtggatgggcttcgagcctggattaagaagaaaggattagattgggtaaaggaagaagccccagatatactgtgccttcaagagaccaaatgttcagagaacaaactaccagctgaacttcaggagctgcctggactctctcatcaatactggtcagctccttcggacaaggaagggtacagtggcgtgggcctgctttcccgccagtgcccactcaaagtttcttacggcataggcgatgaggagcatgatcaggaaggccgggtgattgtggctgaatttgactcgtttgtgctggtaacagcatatgtacctaatgcaggccgaggtctggtacgactggagtaccggcagcgctgggatgaagcctttcgcaagttcctgaagggcctggcttcccgaaagccccttgtgctgtgtggagacctcaatgtggcacatgaagaaattgaccttcgcaaccccaaggggaacaaaaagaatgctggcttcacgccacaagagcgccaaggcttcggggaattactgcaggctgtgccactggctgacagctttaggcacctctaccccaacacaccctatgcctacaccttttggacttatatgatgaatgctcgatccaagaatgttggttggcgccttgattactttttgttgtcccactctctgttacctgcattgtgtgacagcaagatccgttccaaggccctcggcagtgatcactgtcctatcaccctatacctagcactgtgacaccacccctaaatcactttgagcctgggaaataagccccctcaactaccattccttctttaaacactcttcagagaaatctgcattctatttctcatgtataaaactaggaatcctccaaccaggctcctgtgatagagttcttttaagcccaagattttttatttgagggttttttgttttttaaaaaaaaattgaacaaagactactaatgactttgtttgaattatccacatgaaaataaagagccatagtttcaaaaaaaaaaaaaaaaaaaaaaaaaaa

SEQ ID NO: 1522 - protein, 318 aa, Homo sapiens
MPKRGKKGAVAEDGDELRTEPEAKKSKTAAKKNDKEAAGEGPALYEDPPDQKTSPSGKPATLKICSWNVDGLRAWIKKKGLDWVKEEAPDILCLQETKCSENKLPAELQELPGLSHQYWSAPSDKEGYSGVGLLSRQCPLKVSYGIGDEEHDQEGRVIVAEFDSFVLVTAYVPNAGRGLVRLEYRQRWDEAFRKFLKGLASRKPLVLCGDLNVAHEEIDLRNPKGNKKNAGFTPQERQGFGELLQAVPLADSFRHLYPNTPYAYTFWTYMMNARSKNVGWRLDYFLLSHSLLPALCDSKIRSKALGSDHCPITLYLAL

SEQ ID NO: 1523 - DNA, 1501 bp, Homo sapiens
cagacagaccaatcacgcgcattcttcggccacgacaagcgcgcctctgatcacgtgaccaggtccgctacccacgtgggggctcagcgtgcacccttctttgtgctcgggttaggaggagctaggctgccatcgggccggtgcagatacggggttgctcttttgctcataagaggggcttcgctggcagtctgaacggcaacgcggtaaaaatattgcttcggtgggtgacgcggtacagctgcccaagggcgttcgtaacgggaatgccgaagcgtgggaaaaagggagcggtggcggaagacggggatgagctcaggacagagccagaggccaagaagagtaagacggccgcaaagaaaaatgacaaagaggcagcaggagagggcccagccctgtatgaggaccccccagatcagaaaacctcacccagtggcaaacctgccacactcaagatctgctcttggaatgtggatgggcttcgagcctggattaagaagaaaggattagattgggtaaaggaagaagccccagatatactgtgccttcaagagaccaaatgttcagagaacaaactaccagctgaacttcaggagctgcctggactctctcatcaatactggtcagctccttcggacaaggaagggtacagtggcgtgggcctgctttcccgccagtgcccactcaaagtttcttacggcataggcgatgaggagcatgatcaggaaggccgggtgattgtggctgaatttgactcgtttgtgctggtaacagcatatgtacctaatgcaggccgaggtctggtacgactggagtaccggcagcgctgggatgaagcctttcgcaagttcctgaagggcctggcttcccgaaagccccttgtgctgtgtggagacctcaatgtggcacatgaagaaattgaccttcgcaaccccaaggggaacaaaaagaatgctggcttcacgccacaagagcgccaaggcttcggggaattactgcaggctgtgccactggctgacagctttaggcacctctaccccaacacaccctatgcctacaccttttggacttatatgatgaatgctcgatccaagaatgttggttggcgccttgattactttttgttgtcccactctctgttacctgcattgtgtgacagcaagatccgttccaaggccctcggcagtgatcactgtcctatcaccctatacctagcactgtgacaccacccctaaatcactttgagcctgggaaataagccccctcaactaccattccttctttaaacactcttcagagaaatctgcattctatttctcatgtataaaactaggaatcctccaaccaggctcctgtgatagagttcttttaagcccaagattttttatttgagggttttttgttttttaaaaaaaaattgaacaaagactactaatgactttgtttgaattatccacatgaaaataaagagccatagtttcaaaaaaaaaaaaaaaaaaaa

SEQ ID NO: 1524 - protein, 318 aa, Homo sapiens; identical to SEQ ID NO: 1522

SEQ ID NO: 1525 - DNA, 1511 bp, Homo sapiens
cagacagaccaatcacgcgcattcttcggccacgacaagcgcgcctctgatcacgtgaccaggtccgctacccacgtgggggctcagcgtgcacccttctttgtgctcgggttaggaggagctaggctgccatcgggccggtgcagatacggggttgctcttttgctcataagaggggcttcgctggcagtctgaacggcaagcttgagcaacgcggtaaaaatattgcttcggtgggtgacgcggtacagctgcccaagggcgttcgtaacgggaatgccgaagcgtgggaaaaagggagcggtggcggaagacggggatgagctcaggacagagccagaggccaagaagagtaagacggccgcaaagaaaaatgacaaagaggcagcaggagagggcccagccctgtatgaggaccccccagatcagaaaacctcacccagtggcaaacctgccacactcaagatctgctcttggaatgtggatgggcttcgagcctggattaagaagaaaggattagattgggtaaaggaagaagccccagatatactgtgccttcaagagaccaaatgttcagagaacaaactaccagctgaacttcaggagctgcctggactctctcatcaatactggtcagctccttcggacaaggaagggtacagtggcgtgggcctgctttcccgccagtgcccactcaaagtttcttacggcataggcgatgaggagcatgatcaggaaggccgggtgattgtggctgaatttgactcgtttgtgctggtaacagcatatgtacctaatgcaggccgaggtctggtacgactggagtaccggcagcgctgggatgaagcctttcgcaagttcctgaagggcctggcttcccgaaagccccttgtgctgtgtggagacctcaatgtggcacatgaagaaattgaccttcgcaaccccaaggggaacaaaaagaatgctggcttcacgccacaagagcgccaaggcttcggggaattactgcaggctgtgccactggctgacagctttaggcacctctaccccaacacaccctatgcctacaccttttggacttatatgatgaatgctcgatccaagaatgttggttggcgccttgattactttttgttgtcccactctctgttacctgcattgtgtgacagcaagatccgttccaaggccctcggcagtgatcactgtcctatcaccctatacctagcactgtgacaccacccctaaatcactttgagcctgggaaataagccccctcaactaccattccttctttaaacactcttcagagaaatctgcattctatttctcatgtataaaactaggaatcctccaaccaggctcctgtgatagagttcttttaagcccaagattttttatttgagggttttttgttttttaaaaaaaaattgaacaaagactactaatgactttgtttgaattatccacatgaaaataaagagccatagtttcaaaaaaaaaaaaaaaaaaaa

SEQ ID NO: 1526 - protein, 318 aa, Homo sapiens; identical to SEQ ID NO: 1522

SEQ ID NO: 1527 - DNA, 1701 bp, Homo sapiens
actggttgcggagtgagctgggcgcgcggcgcgcaggcgccctggggacccggtagcggcggtggcggtggcggcggtggcggtggctgcggcgacggcagaggcgaagggagccggatcgccgacctgagcgggaggcggcggtggcggccatggcggcagatggagagcgttccccgctgctgtctgagcccatcgacggtggcgcgggcggcaacggtttagtggggcccggcgggagtggggctgggcccgggggaggcctgaccccctccgcaccaccgtacggagccgcatttcccccgtttcccgaggggcatccagccgtgttgcctggggaggacccacccccctattcacccttaactagcccggacagtgggagtgcccctatgatcacctgccgagtctgccaatctctcatcaacgtggaaggcaagatgcatcagcatgtagtcaaatgtggtgtctgcaatgaagccaccccaatcaagaatgcacccccagggaaaaaatatgttcgatgcccctgtaactgtctccttatctgcaaagtgacatcccaacggattgcatgccctcggccctactgcaaaagaatcatcaacctggggcctgtgcatcccggacctctgagtccagaaccccaacccatgggtgtcagggttatctgtggacattgcaagaatacttttctgtggacagagttcacagaccgcactttggcacgttgtcctcactgcaggaaagtgtcatctattgggcgcagatacacacgtaagagatgtatctgctgcttcttgcttggcttgcttttggcagtcactgccactggccttgcctttggcacatggaagcatgcacggcgatatggaggcatctatgcagcctgggcatttgtcatcctgttggctgtgctgtgtttgggccgggctctttattgggcctgtatgaaggtcagccaccctgtccagaacttctcctgagcctgatgacccacagactgtgcctggcccctccctggtggggacagtgacactacgaagggagctggggtagttaaaggctcccggggcttctagaaggaagccaagcagctgccttccttttccctggggagaggtaggaaggaaccaggccctcacttaggtttggaggggcagataagagcactgctgaccatctgctttcctccaagggttctgtgtctagggtgaagtaggcaaaacgttgcccttaaaactgggccctgaagacggttccagccttgtccttcctgtgtgctccctgagagccattcctgtcccttacacattccagggcagggtgggggtgggtagccctgggggttcccctccctcttgtgcaccattaggactttgctgctgctattgcacttcaccagaggttggctctggcctcagtaccctcagtctcctctccccacattgtgtcctgtgggggtggggtcagccgctgctctgtacagaaccacaggaactgatgtgtatataactatttaatgtgggatatgttcccctattcctgtatttcccttaattcctcctcccgaccttttttacccccccagttgcagtatttaactgggctgggtagggttgctcagtctttgggggaggttagggacttatcctgtgcttgtaaataaataaggtcatgactctaaaaaaaaaaaaaaaa

SEQ ID NO: 1528 - protein, 277 aa, Homo sapiens
MAADGERSPLLSEPIDGGAGGNGLVGPGGSGAGPGGGLTPSAPPYGAAFPPFPEGHPAVLPGEDPPPYSPLTSPDSGSAPMITCRVCQSLINVEGKMHQHVVKCGVCNEATPIKNAPPGKKYVRCPCNCLLICKVTSQRIACPRPYCKRIINLGPVHPGPLSPEPQPMGVRVICGHCKNTFLWTEFTDRTLARCPHCRKVSSIGRRYTRKRCICCFLLGLLLAVTATGLAFGTWKHARRYGGIYAAWAFVILLAVLCLGRALYWACMKVSHPVQNFS

SEQ ID NO: 1529 - DNA, 1418 bp, Homo sapiens
aactgtgcgaaccagacccggcagccttgctcagttcagcatagcggagcggatccgatcggatcggagcacaccggagcaggctcatcgagaaggcgtctgcgagaccatggagaacggatacacctatgaagattataagaacactgcagaatggcttctgtctcatactaagcaccgacctcaagttgcaataatctgtggttctggattaggaggtctgactgataaattaactcaggcccagatctttgactacagtgaaatccccaactttcctcgaagtacagtgccaggtcatgctggccgactggtgtttgggttcctgaatggcagggcctgtgtgatgatgcagggcaggttccacatgtatgaagggtacccactctggaaggtgacattcccagtgagggttttccaccttctgggtgtggacaccctggtagtcaccaatgcagcaggagggctgaaccccaagtttgaggttggagatatcatgctgatccgtgaccatatcaacctacctggtttcagtggtcagaaccctctcagagggcccaatgatgaaaggtttggagatcgtttccctgccatgtctgatgcctacgaccggactatgaggcagagggctctcagtacctggaaacaaatgggggagcaacgtgagctacaggaaggcacctatgtgatggtggcaggccccagctttgagactgtggcagaatgtcgtgtgctgcagaagctgggagcagacgctgttggcatgagtacagtaccagaagttatcgttgcacggcactgtggacttcgagtctttggcttctcactcatcactaacaaggtcatcatggattatgaaagcctggagaaggccaaccatgaagaagtcttagcagctggcaaacaagctgcacagaaattggaacagtttgtctccattcttatggccagcattccactccctgacaaagccagttgacctgccttggagtcgtctggcatctcccacacaagacccaagtagctgctaccttctttggccccttgctggagtcatgtgcctctgtccttaggttgtagcagaaaggaaaagattcctgtccttcacctttcccactttcttctaccagacccttctggtgccagatcctcttctcaaagctgggattacaggtgtgagcatagtgagaccttggcgctacaaaataaagctgttctcattcctgttctttcttacacaagagctggagcccgtgccctaccacacatctgtggagatgcccaggatttgactcgggccttagaactttgcatagcagctgctactagctctttgagataatacattccgaggggctcagttctgccttatctaaatcaccagagaccaaacaaggactaatccaatacctcttgga

SEQ ID NO: 1530 - protein, 289 aa, Homo sapiens
MENGYTYEDYKNTAEWLLSHTKHRPQVAIICGSGLGGLTDKLTQAQIFDYSEIPNFPRSTVPGHAGRLVFGFLNGRACVMMQGRFHMYEGYPLWKVTFPVRVFHLLGVDTLVVTNAAGGLNPKFEVGDIMLIRDHINLPGFSGQNPLRGPNDERFGDRFPAMSDAYDRTMRQRALSTWKQMGEQRELQEGTYVMVAGPSFETVAECRVLQKLGADAVGMSTVPEVIVARHCGLRVFGFSLITNKVIMDYESLEKANHEEVLAAGKQAAQKLEQFVSILMASIPLPDKAS

SEQ ID NO: 1531 - DNA, 2777 bp, Homo sapiens
acataagtcacttaccaggtctgtccctgcggcatccagtctgtgggtcctgtcccatccatcctgacctgttccatctcagccccaggactcagtactgcggttgccaacactgctgccaggcatgatggatgggccacgttccgatgtgggccgttggggtggcaaccccttgcagccccctaccacgccatctccagagccagagccagagccagacggacgctctcgcagaggaggaggccgttccttctgggctcgctgctgtggctgctgttcatgccgaaatgcggcagatgacgactggggacctgaaccctctgactccaggggtcgagggtccagctctggcactcgaagacctggctcccggggctcagactcccgccggcctgtatcccggggcagcggtgtcaatgcagctggagatggcaccatccgagagggcatgctagtagtgaacggtgtggacttgctgagctcgcgctcggaccagaaccgccgagagcaccacacagacgagtatgagtacgacgagctgatagtgcgccgcgggcagcctttccatatgctcctcctcctgtcccggacctatgaatcctctgatcgcatcacccttgagttactcatcggaaacaaccccgaggtgggcaagggcacgcacgtgatcatcccagtgggcaaggggggcagtggaggctggaaagcccaggtggtcaaggccagtgggcagaatctgaacctgcgggtccacacttcccccaacgccatcatcggcaagtttcagttcacagtccgcacacaatcagacgctggggagttccagttgccctttgacccccgcaatgagatctacatcctcttcaacccctggtgcccagaggacattgtgtacgtggaccatgaggattggcggcaggagtatgttcttaatgagtctgggagaatttactacgggaccgaagcacagattggtgagcggacctggaactacggccagtttgaccacggggtgctggatgcctgcttatacatcctggaccggcgggggatgccatatggaggccgtggagacccagtcaatgtctcccgggtcatctctgccatggtgaactccctggatgacaatggagtcctgattgggaactggtctggtgattactcccgaggcaccaacccatcagcgtgggtgggcagcgtggagatcctgcttagctacctacgcacgggatattccgtcccctatggccagtgctgggtctttgctggcgtgaccaccacagtgctgcgctgcctgggtctggccacccgtactgtcaccaacttcaactccgcccacgacacagacacatcccttaccatggacatctacttcgacgagaacatgaagcccctggagcacctgaaccatgattctgtctggaacttccatgtgtggaacgactgctggatgaagaggccggatctgccctcgggctttgatgggtggcaggtggtggatgccacaccccaagagactagcagtggcatcttctgctgcggcccctgctctgtggagtccatcaagaatggcctggtctacatgaagtacgacacgcctttcatttttgctgaggtgaatagtgacaaggtgtactggcagcggcaggatgatggcagcttcaagattgtttatgtggaggagaaggccatcggcacactcattgtcacaaaggccatcagctccaacatgcgggaggacatcacctacctctataagcacccagaaggctcagacgcagagcggaaggcagtagagacagcagcagcccacggcagcaaacccaatgtgtatgccaaccggggctcagcggaggatgtggccatgcaggtggaggcacaggacgcggtgatggggcaggatctgatggtctctgtgatgctgatcaatcacagcagcagccgccgcacagtgaaactgcacctctacctctcagtcactttctatactggtgtcagtggtaccatcttcaaggagaccaagaaggaagtggagctggcaccaggggcctcggaccgtgtgaccatgccagtggcctacaaggaataccggccccatcttgtggaccagggggccatgctgctcaatgtctcaggccacgtcaaggagagcgggcaggtgctggccaagcagcacaccttccgtctgcgcaccccagacctctccctcacgttactgggagcagcagtggttggccaggagtgtgaagtacagattgtcttcaagaacccccttcccgtcaccctcaccaatgtcgtcttccggctcgaaggctctgggttacagaggcccaagatcctcaacgttggggacattggaggcaatgaaacagtgacactgcgccagtcgtttgtgcctgtgcgaccaggcccccgccagctcattgccagcttggacagcccacagctctcccaggtgcacggtgtcatccaggtggatgtggccccagcccctggggatgggggcttcttctcagacgctggaggtgacagtcacttaggagagaccatccctatggcatctcgaggtggagcttagccctgtgccaggagcaatgggactggagtcagatgagcaaggacattgccccaagataggggcacactacagagcagctccccaggagctcaggtggggagtccagggctcccggagggggagtccagggctcccggagagggagtcagtcttcacttgcactgggggaacagatgctaataaactgttttttaatgaa

SEQ ID NO: 1532 - protein, 817 aa, Homo sapiens
MMDGPRSDVGRWGGNPLQPPTTPSPEPEPEPDGRSRRGGGRSFWARCCGCCSCRNAADDDWGPEPSDSRGRGSSSGTRRPGSRGSDSRRPVSRGSGVNAAGDGTIREGMLVVNGVDLLSSRSDQNRREHHTDEYEYDELIVRRGQPFHMLLLLSRTYESSDRITLELLIGNNPEVGKGTHVIIPVGKGGSGGWKAQVVKASGQNLNLRVHTSPNAIIGKFQFTVRTQSDAGEFQLPFDPRNEIYILFNPWCPEDIVYVDHEDWRQEYVLNESGRIYYGTEAQIGERTWNYGQFDHGVLDACLYILDRRGMPYGGRGDPVNVSRVISAMVNSLDDNGVLIGNWSGDYSRGTNPSAWVGSVEILLSYLRTGYSVPYGQCWVFAGVTTTVLRCLGLATRTVTNFNSAHDTDTSLTMDIYFDENMKPLEHLNHDSVWNFHVWNDCWMKRPDLPSGFDGWQVVDATPQETSSGIFCCGPCSVESIKNGLVYMKYDTPFIFAEVNSDKVYWQRQDDGSFKIVYVEEKAIGTLIVTKAISSNMREDITYLYKHPEGSDAERKAVETAAAHGSKPNVYANRGSAEDVAMQVEAQDAVMGQDLMVSVMLINHSSSRRTVKLHLYLSVTFYTGVSGTIFKETKKEVELAPGASDRVTMPVAYKEYRPHLVDQGAMLLNVSGHVKESGQVLAKQHTFRLRTPDLSLTLLGAAVVGQECEVQIVFKNPLPVTLTNVVFRLEGSGLQRPKILNVGDIGGNETVTLRQSFVPVRPGPRQLIASLDSPQLSQVHGVIQVDVAPAPGDGGFFSDAGGDSHLGETIPMASRGGA

SEQ ID NO: 1533 - DNA, 2218 bp, Homo sapiens
tctgtggcgggcgccgcagctccgcgtcccccgcgcctcctcccagcgcaggtgggtccgcccgcggggggcgggggtgcccgggagccgtgggacgggcgggtagcggcaacctttggggagcagagtggtccccaacgcccaggtgccccggctcgcgctctggcccgggcgaatcgggctataggaagggccacacggatggaagtcctagtccgggtgctcacctcttgtggaacgtgcaaagcctgtcccaggacctctttacactctgggggtctctgcccaggcacgcttgctgcttccggacacagctgtgggcggagctagtaggggcggggctacgtgattgacacttctctcctcagacttcaagggctaccactggacccttcccctgtcttgaaccctgagccggcaccatgcacggacgcctgaaggtgaagacgtcagaagagcaggcggaggccaaaaggctagagcgagagcagaagctgaagctataccagtcagccacccaggccgtattccagaagcgccaggctggtgagctggatgagtccgtgctggaactgacaagccagattctgggagccaaccctgattttgccaccctctggaactgccgacgagaggtgctccagcagctggagactcagaagtctcctgaagagttggctgctctggtgaaggcagaactgggcttcctggagagctgcctgcgggtgaaccccaagtcttatggtacctggcaccaccgatgctggctgctaggccgcctgcctgagcccaactggacccgagagctggagctctgtgcccgtttcctggaggtggatgagcggaactttcactgctgggactatcggcggtttgtggccacacaggcagccgtgccccctgcagaagagctagccttcactgacagcctcatcacccgaaacttctccaactactcttcctggcattaccgctcctgtctcttgccccagctgcacccccagccggattctggaccacaggggcgcctccctgaggatgtgctgctcaaagagctggagctggtgcagaatgccttcttcactgaccccaatgaccagagtgcctggttttatcaccgttggctcctaggccgagctgacccccaggatgcactgcgctgcctgcatgtgagccgggacgaggcctgtctgactgtctccttctctcggcccctcttagtgggctccaggatggagatcttgctgctcatggttgatgattctcccctgattgtggagtggaggaccccagatggcaggaaccggcccagccatgtctggctctgtgacctgcctgctgcctccctcaacgaccagttgccccaacatacatttcgcgtcatttggacagcaggcgatgtccagaaagaatgcgtgcttttaaaaggccgccaggagggctggtgccgggactccacgacagacgagcagctattcaggtgtgagctgtcagtggagaagtccacagtgctgcagtctgagctggaatcctgtaaggagctgcaggagctggagcctgagaataaatggtgcctgcttaccatcatcctgctgatgcgggcactggaccccctgctgtatgagaaggagaccctgcagtacttccagaccctcaaggccgtggaccccatgcgggcaacgtatctggatgacctgcgcagcaagttcttgctggagaatagcgtgctcaagatggagtatgccgaggtgcgtgtgctgcacctggctcacaaggatctgacagtgctctgccatctggaacagctgctcttggtcacccatcttgacttgtcacacaatcgcctccgaaccctgccacctgcactggctgccctgcgctgccttgaggtgctgcaggccagtgataatgccatagagtccctggacggcgtcaccaacctaccccggctgcaggagctgctactgtgcaacaaccgcctccagcagcctgcagtgctccagcctcttgcctcctgccccaggctggtcctcctcaacctgcagggtaacccgctgtgccaagcggtgggcatcttggagcaactggctgaactgctgccttcagttagcagcgtcctcacctaagaggccctgccccctacccttgccctttaacttattgggactgaataaagaatggagaggccctctcaggctaccaaaaaaaaaaaaaaaaa

SEQ ID NO: 1534 - protein, 567 aa, Homo sapiens
MHGRLKVKTSEEQAEAKRLEREQKLKLYQSATQAVFQKRQAGELDESVLELTSQILGANPDFATLWNCRREVLQQLETQKSPEELAALVKAELGFLESCLRVNPKSYGTWHHRCWLLGRLPEPNWTRELELCARFLEVDERNFHCWDYRRFVATQAAVPPAEELAFTDSLITRNFSNYSSWHYRSCLLPQLHPQPDSGPQGRLPEDVLLKELELVQNAFFTDPNDQSAWFYHRWLLGRADPQDALRCLHVSRDEACLTVSFSRPLLVGSRMEILLLMVDDSPLIVEWRTPDGRNRPSHVWLCDLPAASLNDQLPQHTFRVIWTAGDVQKECVLLKGRQEGWCRDSTTDEQLFRCELSVEKSTVLQSELESCKELQELEPENKWCLLTIILLMRALDPLLYEKETLQYFQTLKAVDPMRATYLDDLRSKFLLENSVLKMEYAEVRVLHLAHKDLTVLCHLEQLLLVTHLDLSHNRLRTLPPALAALRCLEVLQASDNAIESLDGVTNLPRLQELLLCNNRLQQPAVLQPLASCPRLVLLNLQGNPLCQAVGILEQLAELLPSVSSVLT

SEQ ID NO: 1535 - DNA, 1961 bp, Homo sapiens
gcagagtgcgctgcgtttcgatgagccgggacgtggcgccgctctagccagcgcctgggctctgtggcgggcgccgcagctccgcgtcccccgcgcctcctcccagcgcagacttcaagggctaccactggacccttcccctgtcttgaaccctgagccggcaccatgcacggacgcctgaaggtgaagacgtcagaagagcaggcggaggccaaaaggctagagcgagagcagaagctgaagctataccagtcagccacccaggccgtattccagaagcgccaggctggtgagctggatgagtccgtgctggaactgacaagccagattctgggagccaaccctgattttgccaccctctggaactgccgacgagaggtgctccagcagctggagactcagaagtctcctgaagagttggctgctctggtgaaggcagaactgggcttcctggagagctgcctgcgggtgaaccccaagtcttatggtacctggcaccaccgatgctggctgctaggccgcctgcctgagcccaactggacccgagagctggagctctgtgcccgtttcctggaggtggatgagcggaactttcactgctgggactatcggcggtttgtggccacacaggcagccgtgccccctgcagaagagctagccttcactgacagcctcatcacccgaaacttctccaactactcttcctggcattaccgctcctgtctcttgccccagctgcacccccagccggattctggaccacaggggcgcctccctgaggatgtgctgctcaaagagctggagctggtgcagaatgccttcttcactgaccccaatgaccagagtgcctggttttatcaccgttggctcctaggccgagctgacccccaggatgcactgcgctgcctgcatgtgagccgggacgaggcctgtctgactgtctccttctctcggcccctcttagtgggctccaggatggagatcttgctgctcatggttgatgattctcccctgattgtggagtggaggaccccagatggcaggaaccggcccagccatgtctggctctgtgacctgcctgctgcctccctcaacgaccagttgccccaacatacatttcgcgtcatttggacagcaggcgatgtccagaaagaatgcgtgcttttaaaaggccgccaggagggctggtgccgggactccacgacagacgagcagctattcaggtgtgagctgtcagtggagaagtccacagtgctgcagtctgagctggaatcctgtaaggagctgcaggagctggagcctgagaataaatggtgcctgcttaccatcatcctgctgatgcgggcactggaccccctgctgtatgagaaggagaccctgcagtacttccagaccctcaaggccgtggaccccatgcgggcaacgtatctggatgacctgcgcagcaagttcttgctggagaatagcgtgctcaagatggagtatgccgaggtgcgtgtgctgcacctggctcacaaggatctgacagtgctctgccatctggaacagctgctcttggtcacccatcttgacttgtcacacaatcgcctccgaaccctgccacctgcactggctgccctgcgctgccttgaggtgctgcaggccagtgataatgccatagagtccctggacggcgtcaccaacctaccccggctgcaggagctgctactgtgcaacaaccgcctccagcagcctgcagtgctccagcctcttgcctcctgccccaggctggtcctcctcaacctgcagggtaacccgctgtgccaagcggtgggcatcttggagcaactggctgaactgctgccttcagttagcagcgtcctcacctaagaggccctgccccctacccttgccctttaacttattgggactgaataaagaatggagaggccctctcaggctaccaaaaaaaaaaaaaaaaa

SEQ ID NO: 1536 - protein, 567 aa, Homo sapiens; identical to SEQ ID NO: 1534

SEQ ID NO: 1537 - DNA, 1470 bp, Homo sapiens
agatagcccaggactctgcgtggacgcgccccgaggggctgccgcgccagattcccatatccaggcagccacactcagagggttgtagtagttgtccacctctggacagccccactcagccccttcttcactatctgggcctcccaaaagacagtcagccttgtcctcaggcccgcacccagttgtcagcctctgactcctctcccctcaaaggattcttaccttggctcctcctcttagccctaacctgcctcctttgcctgtgagtcatggcagctcccatgaatggccaagtgtgtgtggtgactggtgcctccaggggtattggccgtggcattgccttgcagctctgcaaagcaggcgccacagtttacatcactggccgccatctggacacccttcgcgttgttgctcaggaggcacaatccctcgggggccaatgtgtgcctgtggtgtgcgattcaagccaggagagtgaagtgcgaagcctgtttgagcaagtggatcgggaacagcaagggcgtctagatgtgctggtcaacaatgcttatgcaggggtccagacgatcctgaacaccaggaataaggcattctgggaaacccctgcctccatgtgggatgatatcaacaacgtcggactcagaggccactacttttgctcagtgtatggggcacggctgatggtaccagctggccaggggctcatcgtggtcatctcctccccaggaagcctgcagtatatgttcaatgtcccctatggtgtgggcaaagctgcgtgtgacaagctggctgctgactgtgcccacgagctgcggcgccatggggtcagctgtgtgtctctgtggccggggattgtgcagacagaactgctgaaggagcatatggcaaaggaggaggtcctgcaggatcctgtgttgaagcagttcaaatcagccttctcatctgcggaaaccacagaattgagtggcaaatgtgtggtggctttggcaacagatcccaatatcctgagcctgagtggtaaggtgctgccatcctgtgaccttgctcgacgctatggccttcgggatgtggacggccgccccgtccaagactatttgtctttgagctctgttctctcacacgtgtccggcctgggctggctggcctcctacctgccctccttcctccgtgtgcccaagtggattattgccctctacactagcaagttctaaccctcctggtctgacactacgtctctgcttgtcttctcatttggacttggtggttcgtcctgtctcagtgaaacagcagcctttcttgtttacccatacccttgatatgaagagaagccctctgctgtgtgtccgtggtgagttctggggtgcgcctaggtcccttctttgtgccttggttttccttgtccttctttttactttttgccttagtattgaaaaatgctcttggagctaataaaagtctcatttctctttc

SEQ ID NO: 1538 - protein, 313 aa, Homo sapiens
MAAPMNGQVCVVTGASRGIGRGIALQLCKAGATVYITGRHLDTLRVVAQEAQSLGGQCVPVVCDSSQESEVRSLFEQVDREQQGRLDVLVNNAYAGVQTILNTRNKAFWETPASMWDDINNVGLRGHYFCSVYGARLMVPAGQGLIVVISSPGSLQYMFNVPYGVGKAACDKLAADCAHELRRHGVSCVSLWPGIVQTELLKEHMAKEEVLQDPVLKQFKSAFSSAETTELSGKCVVALATDPNILSLSGKVLPSCDLARRYGLRDVDGRPVQDYLSLSSVLSHVSGLGWLASYLPSFLRVPKWIIALYTSKF

SEQ ID NO: 1539 - DNA, 2047 bp, Homo sapiens
cgacgtcgaaggtccgtccgcagttaaggaagcttttgcagccggacaggtcgcgaagcacacatggggcagggtccgcgctctccacacaaggtggggcgccggttcccagctggtggcaaacgggggcgcggggccaaggggtcggggcgccccttaccaggccgtaagcggcaaccctggccgcctccggatgggcgctcggagccggctccagattcgcacccgcacctgagcccggaagctctgggatatttccgccgggcgctgtcagcattgaaagaggctcccgagactggggaagaacgagatctgatggtgcacaatataatgaaggaagtagagactcaggccctagctttgtccacgaacaggactggcagtgagatgctgcaggaactgttgggattcagtcccttgaaaccgctttgtcgcgtgtgggctgctctgcgctctaacttgcgcactgtggcctgtcaccgatgcggggtccatgtattacaaagtgctttgctacagctccctcgattgctggggagtgctgcagaggaggaggaggaggaggaggaggatggaaaggatggtcccacggagaccctggaggagctggtcctgggactagccgctgaggtgtgtgatgattttcttgtctactgtggagacacacatggcagcttcgtggtcagaactctgcttcaggtgttaggagggactattctggagtctgagagagccaggccccgtggttcccaatcatctgaagcacagaagaccccagctcaggaatgtaagccagctgattttgaagtccctgaaacctttttgaatcgccttcaggacctgagctcctcctttctgaaggacattgcagtgtttatcactgataagatctccagcttctgtcttcaagtggctttacaggttttacaccgcaaacttccccagttttgcgctcatctctgcaatgctgtgattggctacctgagtactcgcggttcctcagtagatggcagtcccctactgctatttctccgagatcagacgagttccagactcctggagcaggtcctgctggtgttggagcccccaagactccagagcctctttgaggagcacttgcaggggcagctgcagaccctggctgcacatcccattgccaacttccctttgcagcgcttactggatgcagtcactacccctgagctgctgtcccctgtgtttgaggagctgagccctgtcttggaagctgtattggcccagggccacccaggggtagtcattgccctggtgggggcctgtcgcagagttggggcctaccaagccaaggtcctacagctcttgttggaggcattccactgtgcagagccctcatcccggcaagtggcctgtgtgcctctctttgccactttgatggcttatgaggtgtactatggactgacggaggaggagggggcagtgcctgcagagcaccaggtggcaatggccgcagccagagccttgggggatgtgacagtccttgggtctctactgctccagcatctgctgcacttctccactcctggtcttgtacttcgaagtctgggtgccttgacgggaccacagcttctgtcccttgcccaaagtcccgctggctctcatgtgctcgatgccatcctgaccagcccctctgtgacgcgcaagctgcgccgccgtgtgctgcagaacctaaagggacaatatgtggctctggcctgtagtcgccatggcagccgtgtgctagatgccatctggagtggagcagccttgagggcccggaaggaaattgctgctgagcttggggagcagaaccaggagctgataagagaccctttcggccaccatgtggctcgaaatgtggccttgactaccttcctaaagcggcgagaggcttgggaacagcagcagggtgcggtggccaagcggaggcgggcattgaactccatacttgaagactgaggctttggatctgggactgggtgttgatgggggagggcaaaatggggtatccaccccatccctttcctggttt

SEQ ID NO: 1540 - protein, 636 aa, Homo sapiens
MGQGPRSPHKVGRRFPAGGKRGRGAKGSGRPLPGRKRQPWPPPDGRSEPAPDSHPHLSPEALGYFRRALSALKEAPETGEERDLMVHNIMKEVETQALALSTNRTGSEMLQELLGFSPLKPLCRVWAALRSNLRTVACHRCGVHVLQSALLQLPRLLGSAAEEEEEEEEDGKDGPTETLEELVLGLAAEVCDDFLVYCGDTHGSFVVRTLLQVLGGTILESERARPRGSQSSEAQKTPAQECKPADFEVPETFLNRLQDLSSSFLKDIAVFITDKISSFCLQVALQVLHRKLPQFCAHLCNAVIGYLSTRGSSVDGSPLLLFLRDQTSSRLLEQVLLVLEPPRLQSLFEEHLQGQLQTLAAHPIANFPLQRLLDAVTTPELLSPVFEELSPVLEAVLAQGHPGVVIALVGACRRVGAYQAKVLQLLLEAFHCAEPSSRQVACVPLFATLMAYEVYYGLTEEEGAVPAEHQVAMAAARALGDVTVLGSLLLQHLLHFSTPGLVLRSLGALTGPQLLSLAQSPAGSHVLDAILTSPSVTRKLRRRVLQNLKGQYVALACSRHGSRVLDAIWSGAALRARKEIAAELGEQNQELIRDPFGHHVARNVALTTFLKRREAWEQQQGAVAKRRRALNSILED

SEQ ID NO: 1541 - DNA, 2252 bp, Homo sapiens
gcaagccgaaggcaagcacgatggcgctcaccagccggcccacccgcgccccgtgccgcccggagccccagcgggcgccccgcagccgtgccagcgtcacgctgtagcagccgagcatcagcccgaaaggaagcacgaaagcggtcagagtctccaggctcaggtgggcggcggcgtggaccggcgacgggtggcacagctggcatacgcggtccctccacaggtggcggtagacggcggccgggacggcgagcaacagggcggccagccagaccgccagcagcaggcggcgggccagggccgggctgcgcagccgaggcgccaggaaggggcgggtgactgcgaggcagcgctgcaggctgagcaggccggtgagcagcacgctggcgtacatgctgagcgcgcacacgtagtacaccgccttgcagcccgcctggcccagcggccaggcctgccgggtcaggaaggccacaaagagcggcgtgagcagcagcaccgcgccgtcggccagcgccaggtgcagcacaagcgtggccgccagcggtcgcccccgtgcaggccgccagcccgccaagctccacaccacgaagccgttgccaggcagccccagcagcgccgccagcagcaggaaggctgtgcctgtggcccgcgaagtcttccagctcagcagtgtctcgttccctgggggacggtagcagaccgacatccttctgggcctacaggacacagaaaaaaagtggggaagctgggggaccctacaaggatccttggcaggaaagcagggattgtgttcatttgagggtttcactgtcagtgagagtctcagcttccatgcaactgtccatcacggctgcaactgaaatcagagctgggacacagcgcaccagaagctaaagtcttgatgccatcaaaggacatccctgccccattcacatctctgtcacgtccactaatcggcaaaaggagaaaagtgagagaagatgacctaagtgtgactgcagcaggcagctctggaaaatgaagccagagcagtgagccagcccctcctccgaccaaggaggaaggaaagagcagccccagcacaggagagaaccacccagcccagaagttccagggaaggaactctccggtccaccatggagtacctctcagctctgaaccccagtgacttactcaggtcagtatctaatataagctcggagtttggacggagggtctggacctcagctccaccaccccagcgacctttccgtgtctgtgatcacaagcggaccatccggaaaggcctgacagctgccacccgccaggagctgctagccaaagcattggagaccctactgctgaatggagtgctaaccctggtgctagaggaggatggaactgcagtggacagtgaggacttcttccagctgctggaggatgacacgtgcctgatggtgttgcagtctggtcagagctggagccctacaaggagtggagtgctgtcatatggcctgggacgggagaggcccaagcacagcaaggacatcgcccgattcacctttgacgtgtacaagcaaaaccctcgagacctctttggcagcctgaatgtcaaagccacattctacgggctctactctatgagttgtgactttcaaggacttggcccaaagaaagtactcagggagctccttcgttggacctccacactgctgcaaggcctgggccatatgttgctgggaatttcctccacccttcgtcatgcagtggagggggctgagcagtggcagcagaagggccgcctccattcctactaaggggctctgagcttctgcccccagaatcattccaaccgacccactgcaaagactatgacagcatcaaatttcaggacctgcagacagtacaggctagataacccacccaatttccccactgtcctctgatcccctcgtgacagaacctttcagcataacgcctcacatcccaagtctatacccttacctgaagaatgctgttctttcctagccacctttctggcctcccacttgccctgaaaggccaagatcaagatgtcccccaggcatcttgatcccagcctgactgctgctacatctaatcccctaccaatgcctcctgtccctaaactccccagcatactgatgacagccctctctgactttaccttgagatctgtcttcatacccttcccctcaaactaacaaaaacatttccaataaaaatatcaaatatttaccactaaaaaaaaaaaa

SEQ ID NO: 1542 - protein, 219 aa, Homo sapiens
MEYLSALNPSDLLRSVSNISSEFGRRVWTSAPPPQRPFRVCDHKRTIRKGLTAATRQELLAKALETLLLNGVLTLVLEEDGTAVDSEDFFQLLEDDTCLMVLQSGQSWSPTRSGVLSYGLGRERPKHSKDIARFTFDVYKQNPRDLFGSLNVKATFYGLYSMSCDFQGLGPKKVLRELLRWTSTLLQGLGHMLLGISSTLRHAVEGAEQWQQKGRLHSY

SEQ ID NO: 1543 - DNA, 2799 bp, Homo sapiens
gaaactggccctggccctgaaccaaataccttgaaccctcgtaaactccataccctgacccccttgttttggatatacccaggtagaacaactctctctcactgtctgttgtgaggatacgctgtagcccactcattaagtacattctcctaataaatgctttggactgatcaccctgccagtcttttgtcttgggcaatctatacttttctcagaggttcccaaggcctactgaagggacttaacatactcttaatggctttcctctctcttgttttaccttatgccctcacttcctgagttaacctcccaaatacaggatcacctgtacccaagcccttagctcaagaatacaggatcacctgtacccaagcccttagctcaagctctgctttggaagaacccaaactaagacagtgctcctggtgccctccccaagcaacctcaagttctggctgttacttgagcagaggcctttcttttcccttcccccagctctatccatctgccaggcccccctcaaatctcttcatttccaagttttgcttgacttttccaagaggagagggctgcttcttagtatgtccctactcatcctttcctttcttgtcttgtatcctggtgcagcctggtaatggggcctcttcatggttgtgtgtcatgactccctaaccattatgcctccatgcatcccctgttcctcctggaacctagcaccatgccttacatggaaaagctgtcattgacagcccggtgagagccctgagggtggagtgactggggcagggcctgaggcaagaggtgggaggaggtaggaggccaggggctcagccggaccaggagactggaaacaggcaaggataaggcaggtgggggactgagttgtttgggtcacctctgcaggccagagagaccaggcaacatacacactgcagaaggtgggctgggaggattggggccagagctgggggagggatgagaacagaagcaggaccaggattcagcagagtcctcctatttccttccaccaccagggaatcttactgccccacttcagcttgtgctgtttcctggcaaggcaggctctcacatgcctggacgcctgggtgcgttggtgatgggaaggagcagggtgagggaggggccccaggagaggcccaggatgagcctcatcttgtccctccccattcttgtcttaccctctgcaaatgtgataggcacaggacaggagtaggcacctcgcctactgctgcttaacctttcagcttctccaggcccccaatcctgcttgctcccagcttggtaagtagatctgtgcacgtccctttacaccccaccatccagttttgcccagatgtgctagaatggggctggacaaagaaggaggggccagactagaggagtggtggtagagatagtgacagcctggggtgaggactttatgcctgtttaccactgagctctgggaaggaggccaggagtggggcaggtcaactgactgggagcaggggatctgggttccaagaaggagttgtgtttgaggtggggtctgggtcctcgtggaagtcaggactcccaggcagaaaagaggcaggctgcagggaagtaaggaggaggcatggcaccttctcatcgggcatcacaggtggggttttgccccacccctgaacgccctctgtggcgccttccacccacctgtaggcccagaaggatgtcggtctgctaccgtcccccagggaacgagacactgctgagctggaagacttcgcgggccacaggcacagccttcctgctgctggcggcgctgctggggctgcctggcaacggcttcgtggtgtggagcttggcgggctggcggcctgcacgggggcgaccgctggcggccacgcttgtgctgcacctggcgctggccgacggcgcggtgctgctgctcacgccgctctttgtggccttcctgacccggcaggcctggccgctgggccaggcgggctgcaaggcggtgtactacgtgtgcgcgctcagcatgtacgccagcgtgctgctcaccggcctgctcagcctgcagcgctgcctcgcagtcacccgccccttcctggcgcctcggctgcgcagcccggccctggcccgccgcctgctgctggcggtctggctggccgccctgttgctcgccgtcccggccgccgtctaccgccacctgtggagggaccgcgtatgccagctgtgccacccgtcgccggtccacgccgccgcccacctgagcctggagactctgaccgctttcgtgcttcctttcgggctgatgctcggctgctacagcgtgacgctggcacggctgcggggcgcccgctggggctccgggcggcacggggcgcgggtgggccggctggtgagcgccatcgtgcttgccttcggcttgctctgggccccctaccacgcagtcaaccttctgcaggcggtcgcagcgctggctccaccggaaggggccttggcgaagctgggcggagccggccaggcggcgcgagcgggaactacggccttggccttcttcagttctagcgtcaacccggtgctctacgtcttcaccgctggagatctgctgccccgggcaggtccccgtttcctcacgcggctcttcgaaggctctggggaggcccgagggggcggccgctctagggaagggaccatggagctccgaactacccctcagctgaaagtggtggggcagggccgcggcaatggagacccggggggtgggatggagaaggacggtccggaatgggacctttgacagcagaccct

SEQ ID NO: 1544 - protein, 389 aa, Homo sapiens
MAPSHRASQVGFCPTPERPLWRLPPTCRPRRMSVCYRPPGNETLLSWKTSRATGTAFLLLAALLGLPGNGFVVWSLAGWRPARGRPLAATLVLHLALADGAVLLLTPLFVAFLTRQAWPLGQAGCKAVYYVCALSMYASVLLTGLLSLQRCLAVTRPFLAPRLRSPALARRLLLAVWLAALLLAVPAAVYRHLWRDRVCQLCHPSPVHAAAHLSLETLTAFVLPFGLMLGCYSVTLARLRGARWGSGRHGARVGRLVSAIVLAFGLLWAPYHAVNLLQAVAALAPPEGALAKLGGAGQAARAGTTALAFFSSSVNPVLYVFTAGDLLPRAGPRFLTRLFEGSGEARGGGRSREGTMELRTTPQLKVVGQGRGNGDPGGGMEKDGPEWDL

SEQ ID NO: 1545 - DNA, 3023 bp, Homo sapiens
gccattctctcacatcccgtgcggtcaggaagcccttcctgaactctgacttcagttcttgctgcggtttctgcccatttttttcatatcctctgacagctgcgaggtcatctctgctctggcttttctccaagcagaacaagtgggggctctggaaaggttaagggacctcagtggccaccattatactttgcatctttcctgagaagtgagagttgaaagggaagcaggaaggcccatggtcagattgaaggaaggactttttagtttcttttttttttttttgagatggagtctcgctctgtcattcaggctggagtgcagtggtgcgatctcagctcactgcagcctccacttcctgggttcacatgattctcctgcctcagcctcccaagtagctgagactacaggcacatgccactacacccagctaacttttgtatttttagtagagacggggtttcaccatgttggccaggctggtctcaaactgctaacatcaagtgatctgctcccctcagcctcccaaagtgctgggattaccggtatgaaccaccacaacctgccaggaatttttagtttttagcttttgcaggagacttcaaggaaaggagacattcctctgtccaggaaacgggtaaggggaccatttctgcattgctggtttcccctcttggcagggtgggcatgaggcatcactgttcctgctccctcactcctgctcctcatgctcagcctgccagctcggcctcaactttgtgtgtctaaagtggaactgaatagtaggctgtgagaagataggaaagaggtagtgccaatctccttgcccagatcataaatccagactcagcagggtaaccacatgggcaagcacaaggtaggtgcttggggaaaggggaagtaattggcattctgtgtgataccaaggagaccatttggattttggcttctaccaaagagaatggagaattggttgacctaaatggaaccagtccctttaagtaaggggaggaaagggggtgctggaagatggccctcttcccaccacctagatcatagcttgaactgaagccaaggacagagtgctgcccccttcggcatttactgatgtgccctctttaaatcatgatgttatctaacccaaacccagacccaggacctagtcacagctccaacctacacttcctattaatcttaaaacaaagcaaaacaaaacaaaaagatatcagcattgtagcctccaatctgagcccatttcccttctctggctaccatacctccttctcctatatgataccattcactactttgttcaattatccagtctagacctgcatcttgaggccacacccagccttctcactccccacacccctctttcctctctcactgctccttcctggtctcttctcatctggccccacctctaaggagtcctcctgccttctgggttgccctggaaaacagactatcccccctcctagtgaagggagtgggtaggggtttcagccccaccctcaggaagatgcgtcttccctgtcctctgctctgtggtacttcctctctggctgatttagcaaacagcacctagacctggggccaggcctttggcagtgggacagatccagggataggctacaccaccctgccctgaccctgggattggcatcagcttccaaccagttcctgccaaagcttgtaagtcctcccgacggccatgaacactacatcttctgcagcacccccctcactaggtgtagagttcatctctctgctggctatcatcctgctgtcagtggcgctggctgtggggcttcccggcaacagctttgtggtgtggagtatcctgaaaaggatgcagaagcgctctgtcactgccctgatggtgctgaacctggccctggccgacctggccgtattgctcactgctccctttttccttcacttcctggcccaaggcacctggagttttggactggctggttgccgcctgtgtcactatgtctgcggagtcagcatgtacgccagcgtcctgcttatcacggccatgagtctagaccgctcactggcggtggcccgcccctttgtgtcccagaagctacgcaccaaggcgatggcccggcgggtgctggcaggcatctgggtgttgtcctttctgctggccacacccgtcctcgcgtaccgcacagtagtgccctggaaaacgaacatgagcctgtgcttcccgcggtaccccagcgaagggcaccgggccttccatctaatcttcgaggctgtcacgggcttcctgctgcccttcctggctgtggtggccagctactcggacatagggcgtcggctacaggcccggcgcttccgccgcagccgccgcaccggccgcctggtggtgctcatcatcctgaccttcgccgccttctggctgccctaccacgtggtgaacctggctgaggcgggccgcgcgctggccggccaggccgccgggttagggctcgtggggaagcggctgagcctggcccgcaacgtgctcatcgcactcgccttcctgagcagcagcgtgaaccccgtgctgtacgcgtgcgccggcggcggcctgctgcgctcggcgggcgtgggcttcgtcgccaagctgctggagggcacgggctccgaggcgtccagcacgcgccgcgggggcagcctgggccagaccgctaggagcggccccgccgctctggagcccggcccttccgagagcctcactgcctccagccctctcaagttaaacgaactgaactaggcctggtggaaggaggcgcactttcctcctggcagaatgctagctctgagccagttcagtacctggaggaggagcaggggcgtggagggcgtggagggcgtgggagcgtgggaggcgggagtggagtggaagaagagggagaggtggagcaaagtgagggccgagtgagagcgtgctccagcctggctcccacaggcagctttaaccattaaaactgaagtctgaaatttggtcaaaaaaaaaaaaa

SEQ ID NO: 1546 - protein, 352 aa, Homo sapiens
MNTTSSAAPPSLGVEFISLLAIILLSVALAVGLPGNSFVVWSILKRMQKRSVTALMVLNLALADLAVLLTAPFFLHFLAQGTWSFGLAGCRLCHYVCGVSMYASVLLITAMSLDRSLAVARPFVSQKLRTKAMARRVLAGIWVLSFLLATPVLAYRTVVPWKTNMSLCFPRYPSEGHRAFHLIFEAVTGFLLPFLAVVASYSDIGRRLQARRFRRSRRTGRLVVLIILTFAAFWLPYHVVNLAEAGRALAGQAAGLGLVGKRLSLARNVLIALAFLSSSVNPVLYACAGGGLLRSAGVGFVAKLLEGTGSEASSTRRGGSLGQTARSGPAALEPGPSESLTASSPLKLNELN

SEQ ID NO: 1547 - DNA, 3320 bp, Homo sapiens
gagatcatggcccgcctcttcagcccccggccgccccccagcgaagacctcttctacgagacctactacagcctgagccagcagtacccgctgctgctgctgctgctggggatcgtgctctgtgcgctcgcggcgctgctcgcagtggcctgggccagcggcagggagctgacctcagacccgagcttcctgaccactgtgctgtgcgcgctgggcggcttctcgctgctgctgggcctcgcttcccgggagcagcgactgcagcgctggacgcgtcccctgtccggcttggtatgggtcgcgctgctagcgctaggccacgccttcctgttcaccgggggcgtggtgagcgcctgggaccaggtgtcctattttctcttcgtcatcttcacggcgtatgccatgctgcccttgggcatgcgggacgccgccgtcgcgggcctcgcctcctcactctcgcatctgctggtcctcgggctgtatcttgggccacagccggactcacggcctgcactgctgccgcagttggcagcaaacgcagtgctgttcctgtgcgggaacgtggcaggagtgtaccacaaggcgctgatggagcgcgccctgcgggccacgttccgggaggcactcagctccctgcactcacgccggcggctggacaccgagaagaagcaccaggaacaccttctcttgtccatccttcctgcctacctggcccgagagatgaaggcagagatcatggcacggctgcaggcaggacaggggtcacggccagagagcactaacaatttccacagcctctatgtcaagaggcaccagggagtcagcgtgctgtatgctgacatcgtgggcttcacgcggctggccagcgagtgttcccctaaggagctggtgctcatgctcaatgagctctttggcaagttcgaccagattgccaaggagcatgaatgcatgcggatcaagatcctgggggactgttactactgtgtctctgggctgccactctcactgccagaccatgccatcaactgcgtgcgcatgggcctggacatgtgccgggccatcaggaaactgcgggcagccactggcgtggacatcaacatgcgtgtgggcgtgcactcaggcagcgtactgtgtggagtcatcgggctgcagaagtggcagtacgacgtttggtcacatgatgtcacactggctaaccacatggaggcaggcggtgtaccagggcgagtgcacatcacaggggctaccctggccctgctggcaggggcttatgctgtggaggacgcaggcatggagcatcgggacccctaccttcgggagctaggggagcctacctatctggtcatcgatccacgggcagaggaggaggatgagaagggcactgcaggaggcttgctgtcctcgcttgagggcctcaagatgcgtccatcactgctgatgacccgttacctggagtcctggggcgcagccaagccttttgcccacctgagccacggagacagccctgtgtccacctccacccctctcccggagaagaccctggcttccttcagcacccagtggagcctggatcggagccgtaccccccggggactagatgatgaactggacaccggggatgccaagttcttccaggtcattgagcagctcaactcgcagaaacagtggaagcagtcgaaggacttcaacccactgacactgtacttcagagagaaggagatggagaaagagtaccgactctctgcaatccccgccttcaaatactatgaagcctgcaccttcctggtttttctctccaacttcatcatccagatgctagtgacaaacaggcccccagctctggccatcacgtatagcatcaccttcctcctcttcctcctcatcctttttgtctgcttctcagaggacctgatgaggtgtgtcctgaaaggccccaagatgctgcactggctgcctgcactgtctggcctggtggccacacgaccaggactgagaatagccttgggcaccgccaccatcctccttgtctttgccatggccattaccagcctgttcttcttcccaacatcatcagactgccctttccaagctcccaatgtgtcctccatgatttccaacctctcctgggagctccctgggtctctgcctctcatcagtgtcccatactccatgcactgctgcacgctgggcttcctctcctgctccctctttctgcacatgagcttcgagctgaagctgctgctgctcctgctgtggctggcggcatcctgctccctcttcctgcactcccatgcctggctgtcggaatgcctcatcgtccgcctctatctgggccccttggactccaggcccggagtgctgaaggagcccaaactgatgggtgctatctccttcttcatcttcttcttcaccctccttgtcctggctcgccagaatgagtactactgccgcctggacttcctgtggaagaagaagctgaggcaggagagggaggagacagagacgatggagaacctgactcggctgctcttggagaacgtgctccctgcacacgtggccccccagttcattggccagaaccggcgcaacgaggatctctaccaccagtcctatgaatgcgtttgtgtcctcttcgcctcagtcccagacttcaaggagttctactctgaatccaacatcaatcatgagggcctagagtgtctgaggctgctcaatgagataattgctgattttgatgagctgctctccaagcccaagttcagtggggtggagaagatcaagaccatcggcagcacctacatggcagccacaggcttaaatgccacctctggacaggatgcacaacaggatgctgaacggagctgcagccaccttggcactatggtggaatttgccgtggccctggggtctaagctggacgtcatcaacaagcattcattcaacaacttccgcctgcgagtggggttgaaccatggacccgtagtagctggagttattggggcccagaagccgcaatatgacatttggggcaacacagtgaacgtggccagccgcatggagagtacaggagtccttggcaaaatccaagtgactgaggagacagcatgggccctacagtccctgggctacacctgctacagccggggtgtcatcaaggtgaaaggcaaagggcagctctgcacctacttcctgaacacagacttgacacgaactggacctccttcagctaccctaggctgagattgcactcgccttctaagaacctcaataaagagactctggggtgtctggaaaaaaaaaaaaaaaaaaaaaaaaaaaaa

SEQ ID NO: 1548 - protein, 1077 aa, Homo sapiens
MARLFSPRPPPSEDLFYETYYSLSQQYPLLLLLLGIVLCALAALLAVAWASGRELTSDPSFLTTVLCALGGFSLLLGLASREQRLQRWTRPLSGLVWVALLALGHAFLFTGGVVSAWDQVSYFLFVIFTAYAMLPLGMRDAAVAGLASSLSHLLVLGLYLGPQPDSRPALLPQLAANAVLFLCGNVAGVYHKALMERALRATFREALSSLHSRRRLDTEKKHQEHLLLSILPAYLAREMKAEIMARLQAGQGSRPESTNNFHSLYVKRHQGVSVLYADIVGFTRLASECSPKELVLMLNELFGKFDQIAKEHECMRIKILGDCYYCVSGLPLSLPDHAINCVRMGLDMCRAIRKLRAATGVDINMRVGVHSGSVLCGVIGLQKWQYDVWSHDVTLANHMEAGGVPGRVHITGATLALLAGAYAVEDAGMEHRDPYLRELGEPTYLVIDPRAEEEDEKGTAGGLLSSLEGLKMRPSLLMTRYLESWGAAKPFAHLSHGDSPVSTSTPLPEKTLASFSTQWSLDRSRTPRGLDDELDTGDAKFFQVIEQLNSQKQWKQSKDFNPLTLYFREKEMEKEYRLSAIPAFKYYEACTFLVFLSNFIIQMLVTNRPPALAITYSITFLLFLLILFVCFSEDLMRCVLKGPKMLHWLPALSGLVATRPGLRIALGTATILLVFAMAITSLFFFPTSSDCPFQAPNVSSMISNLSWELPGSLPLISVPYSMHCCTLGFLSCSLFLHMSFELKLLLLLLWLAASCSLFLHSHAWLSECLIVRLYLGPLDSRPGVLKEPKLMGAISFFIFFFTLLVLARQNEYYCRLDFLWKKKLRQEREETETMENLTRLLLENVLPAHVAPQFIGQNRRNEDLYHQSYECVCVLFASVPDFKEFYSESNINHEGLECLRLLNEIIADFDELLSKPKFSGVEKIKTIGSTYMAATGLNATSGQDAQQDAERSCSHLGTMVEFAVALGSKLDVINKHSFNNFRLRVGLNHGPVVAGVIGAQKPQYDIWGNTVNVASRMESTGVLGKIQVTEETAWALQSLGYTCYSRGVIKVKGKGQLCTYFLNTDLTRTGPPSATLG

SEQ ID NO: 1549 - DNA, 1940 bp, Homo sapiens
gcgggactgtagaggcgcctataagggaagttgttcagtcaactcggaaaaagggtaacaacccggaaagtagactcaccgtcttggtctagagactgacccctgcacagacagaccccttcccctctctgcgaaaggaccaagccccagaagtcactccatctcctacggctcgcaatttccagaggccccctggcaccttccagcctgatgtcgtgcgtcaagttatggcccagcggtgcccccgcccccttggtgtccatcgaggaactggagaaccaggagctcgtcggcaaaggcgggttcggcacagtgttccgggcgcaacataggaagtggggctacgatgtggcggtcaagatcgtaaactcgaaggcgatatccagggaggtcaaggccatggcaagtctggataacgaattcgtgctgcgcctagaaggggttatcgagaaggtgaactgggaccaagatcccaagccggctctggtgactaaattcatggagaacggctccttgtcggggctgctgcagtcccagtgccctcggccctggccgctcctttgccgcctgctgaaagaagtggtgcttgggatgttttacctgcacgaccagaacccggtgctcctgcaccgggacctcaagccatccaacgtcctgctggacccagagctgcacgtcaagctggcagattttggcctgtccacatttcagggaggctcacagtcagggacagggtccggggagccagggggcaccctgggctacttggccccagaactgtttgttaacgtaaaccggaaggcctccacagccagtgacgtctacagcttcgggatcctaatgtgggcagtgcttgctggaagagaagttgagttgccaaccgaaccatcactcgtgtacgaagcagtgtgcaacaggcagaaccggccttcattggctgagctgccccaagccgggcctgagactcccggcttagaaggactgaaggagctaatgcagctctgctggagcagtgagcccaaggacagaccctccttccaggaatgcctaccaaaaactgatgaagtcttccagatggtggagaacaatatgaatgctgctgtctccacggtaaaggatttcctgtctcagctcaggagcagcaataggagattttctatcccagagtcaggccaaggagggacagaaatggatggctttaggagaaccatagaaaaccagcactctcgtaatgatgtcatggtttctgagtggctaaacaaactgaatctagaggagcctcccagctctgttcctaaaaaatgcccgagccttaccaagaggagcagggcacaagaggagcaggttccacaagcctggacagcaggcacatcttcagattcgatggcccaacctccccagactccagagacctcaactttcagaaaccagatgcccagccctacctcaactggaacaccaagtcctggaccccgagggaatcagggggctgagagacaaggcatgaactggtcctgcaggaccccggagccaaatccagtaacagggcgaccgctcgttaacatatacaactgctctggggtgcaagttggagacaacaactacttgactatgcaacagacaactgccttgcccacatggggcttggcaccttcgggcaaggggaggggcttgcagcaccccccaccagtaggttcgcaagaaggccctaaagatcctgaagcctggagcaggccacagggttggtataatcatagcgggaaataaagcaccttccaagcttgcctccaagagttacgagttaaggaagagtgccaccccttgaggcccctgacttccttctagggcagtctggcctgcccacaaactgactttgtgacctgtcccccaggagtcaataaacatgatggaatgctagtcaaaaaaaaaaaaaaaaaaaa

SEQ ID NO: 1550 - protein, 518 aa, Homo sapiens
MSCVKLWPSGAPAPLVSIEELENQELVGKGGFGTVFRAQHRKWGYDVAVKIVNSKAISREVKAMASLDNEFVLRLEGVIEKVNWDQDPKPALVTKFMENGSLSGLLQSQCPRPWPLLCRLLKEVVLGMFYLHDQNPVLLHRDLKPSNVLLDPELHVKLADFGLSTFQGGSQSGTGSGEPGGTLGYLAPELFVNVNRKASTASDVYSFGILMWAVLAGREVELPTEPSLVYEAVCNRQNRPSLAELPQAGPETPGLEGLKELMQLCWSSEPKDRPSFQECLPKTDEVFQMVENNMNAAVSTVKDFLSQLRSSNRRFSIPESGQGGTEMDGFRRTIENQHSRNDVMVSEWLNKLNLEEPPSSVPKKCPSLTKRSRAQEEQVPQAWTAGTSSDSMAQPPQTPETSTFRNQMPSPTSTGTPSPGPRGNQGAERQGMNWSCRTPEPNPVTGRPLVNIYNCSGVQVGDNNYLTMQQTTALPTWGLAPSGKGRGLQHPPPVGSQEGPKDPEAWSRPQGWYNHSGK

SEQ ID NO: 1551 - DNA, 1487 bp, Homo sapiens
gcgagggggtcagggactgggccaagctcagaagcggggagaagagcgagacagagatgctctgagcaggggagacagggatcccgggctgctgccgctaccaacaagggtacacactgcggtcctcaaggccaggaggggggtgggggcagggaatgcctcagccaacagggcagcggctcggccctgctgctggcccggtgggaagtagcctggggccccgcgactgaaatccgagccaggcctgggcagtctccgctagaaacgctctgggcgcgcactcctggagacgcggaggcccgggcgctccagaccagtgtccttgtaggaggcttcttcacgaagcttagagtttggcctttcatagggaaagacttgctcgggagcaagtctaagggattttaagggattttaaatcttcctgggccagggctagggagctctagtgacagtgtcttggtctggaatccaactctccaattttgaggccgcagggaggaattctgagactttagaggccgcacagccttcagcgcgctcaccgcgtccaggcgtcagtgaggggctatctcgaggcgcgagtgcacaaaaggtagcgcgagtctcttctcaggcgatccagataagaggaaatgagagccgggttttctgacttccaactcattagggaccaggttctttttcttcaggatcaggcacagagactgactgaatggctccaattatcaggatttgaaaacccagtatcagaatctaccactttgtgcctgagggagagggaaaagcggatacccacctgtgtcgctgtttgcgtgccaagtccaggaacagtccatacagccctgctgcatcccacgacgctgtcacaaagcaggagttcatccgaggccaagatgttaattattcatactgcatgactgaggattttggaggcagagagagattcatctgcaatatttggaacaccaatggaggtctacgtcaacacagaatttatacagcagctggtgctagtcagagctaatgacagaatttcagtttaataaaaagacccccaactgagcacaccatcttgaaaaaagtatacttatcaaacagctttcaatcagttcaagagagacaccttaattggggagaggaagaattgcagagtagtttgtaatcatgccaattccagatcaataactgcatgtctgttctttggtagaaatagcttttgctttatattaagtaatcacatatatattctctctatttggataaggaaaccttcgctttatttgacaatgtataatgatatactcttctaattcacctctgtgtcttcacaataaacatgagtaaaatttagacaagtgatggtaaaggtcaatataattatttatttttaaaataaattttgtatctaacaggaaagcagttcttatgaaatttttatattttcaaaaattgttttgttcaaataaaattttatgagtaaagttaaa

SEQ ID NO: 1552 - protein, 94 aa, Homo sapiens
MRAGFSDFQLIRDQVLFLQDQAQRLTEWLQLSGFENPVSESTTLCLREREKRIPTCVAVCVPSPGTVHTALLHPTTLSQSRSSSEAKMLIIHTA

SEQ ID NO: 1553 - DNA, 2352 bp, Homo sapiens
gaaacttaaaggtgtttaccttgtcatcagcatgtaagctaattatctcgggcaagatgtaggcttctattgtcttgttgctttagcgcttacgccccgcctctggtggctgcctaaaacctggcgccgggctaaaacaaacgcgaggcagcccccgagcctccactcaagccaattaaggaggactcggtccactccgttacgtgtacatccaacaagatcggcgttaaggtaacaccagaatatttggcaaagggagaaaaaaaaagcagcgaggcttcgccttccccctctcccttttttttcctcctcttccttcctcctccagccgccgccgaatcatgtcgatgagtccaaagcacacgactccgttctcagtgtctgacatcttgagtcccctggaggaaagctacaagaaagtgggcatggagggcggcggcctcggggctccgctggcggcgtacaggcagggccaggcggcaccgccaacagcggccatgcagcagcacgccgtggggcaccacggcgccgtcaccgccgcctaccacatgacggcggcgggggtgccccagctctcgcactccgccgtggggggctactgcaacggcaacctgggcaacatgagcgagctgccgccgtaccaggacaccatgaggaacagcgcctctggccccggatggtacggcgccaacccagacccgcgcttccccgccatctcccgcttcatgggcccggcgagcggcatgaacatgagcggcatgggcggcctgggctcgctgggggacgtgagcaagaacatggccccgctgccaagcgcgccgcgcaggaagcgccgggtgctcttctcgcaggcgcaggtgtacgagctggagcgacgcttcaagcaacagaagtacctgtcggcgccggagcgcgagcacctggccagcatgatccacctgacgcccacgcaggtcaagatctggttccagaaccaccgctacaaaatgaagcgccaggccaaggacaaggcggcgcagcagcaactgcagcaggacagcggcggcggcgggggcggcgggggcaccgggtgcccgcagcagcaacaggctcagcagcagtcgccgcgacgcgtggcggtgccggtcctggtgaaagacggcaaaccgtgccaggcgggtgcccccgcgccgggcgccgccagcctacaaggccacgcgcagcagcaggcgcagcaccaggcgcaggccgcgcaggcggcggcagcggccatctccgtgggcagcggtggcgccggccttggcgcacacccgggccaccagccaggcagcgcaggccagtctccggacctggcgcaccacgccgccagccccgcggcgctgcagggccaggtatccagcctgtcccacctgaactcctcgggctcggactacggcaccatgtcctgctccaccttgctatacggtcggacctggtgagaggacgccgggccggccctagcccagcgctctgcctcaccgcttccctcctgcccgccacacagaccaccatccaccgctgctccacgcgcttcgacttttcttaacaacctggccgcgtttagaccaaggaacaaaaaaaccacaaaggccaaactgctggacgtctttctttttttccccccctaaaatttgtgggtttttttttttaaaaaaagaaaatgaaaaacaaccaagcgcatccaatctcaaggaatctttaagcagagaagggcataaaacagctttggggtgtctttttttggtgattcaaatgggttttccacgctagggcggggcacagattggagagggctctgtgctgacatggctctggactctaaagaccaaacttcactctgggcacactctgccagcaaagaggactcgcttgtaaataccaggatttttttttttttttgaagggaggacgggagctggggagaggaaagagtcttcaacataacccacttgtcactgacacaaaggaagtgccccctccccggcaccctctggccgcctaggctcagcggcgaccgccctccgcgaaaatagtttgtttaatgtgaacttgtagctgtaaaacgctgtcaaaagttggactaaatgcctagtttttagtaatctgtacattttgttgtaaaaagaaaaaccactcccagtccccagcccttcacattttttatgggcattgacaaatctgtgtatattatttggcagtttggtatttgcggcgtcagtctttttctgttgtaacttatgtagatatttggcttaaatatagttcctaagaagcttctaataaattatacaaattaaaaagattctttttctgattaaaaaaaaaaaaaaaaaa

SEQ ID NO: 1554 - protein, 371 aa, Homo sapiens
MSMSPKHTTPFSVSDILSPLEESYKKVGMEGGGLGAPLAAYRQGQAAPPTAAMQQHAVGHHGAVTAAYHMTAAGVPQLSHSAVGGYCNGNLGNMSELPPYQDTMRNSASGPGWYGANPDPRFPAISRFMGPASGMNMSGMGGLGSLGDVSKNMAPLPSAPRRKRRVLFSQAQVYELERRFKQQKYLSAPEREHLASMIHLTPTQVKIWFQNHRYKMKRQAKDKAAQQQLQQDSGGGGGGGGTGCPQQQQAQQQSPRRVAVPVLVKDGKPCQAGAPAPGAASLQGHAQQQAQHQAQAAQAAAAAISVGSGGAGLGAHPGHQPGSAGQSPDLAHHAASPAALQGQVSSLSHLNSSGSDYGTMSCSTLLYGRTW

SEQ ID NO: 1555 - DNA, 603 bp, Homo sapiens
ttaaggtgcagacatggccaagtccaagaaccacaccacacacaaccagtcccgaaaatggcacagaaatagtgtcaagaaaccccaatcacaaagatacaaatctcttaagggaatggaccctaagttcctgaggaacatgtgctttgccaagagcacaacaagaagagcctaaagaagatgcaggccagcaatgccaaggctgtgagtgtatgtgccgaggctatcaaggccctcgtaaaggccaaggaggttaaccccaagattccgaagggtgtcacctgcaagctcaaatgacttgcctacattgcccaccccaaacttgggaagcatgcccgtgcccgcattgccaaggggctcaagctgtgccagccaaaggccaaggcaaaggatcaaaccaaggcccaggctgcagctcccgcttcagttccagctcaggctccaaaaggtgcccaggcccctataaaggcttcagatagatatctctgtctatctatctggacatggggacatgtccatgaggacaggactggtgtgactcccccacccccaggctgccgtctgcatggggctggggtcctcctgtgctatttgtacacgtaa

SEQ ID NO: 1556 - DNA, 1857 bp, Homo sapiens
ccggacctcggctttcaaagcggcctgggtgggaagagctgtttatataaacagagattccgctgtaaatgcgctaatatcccggctgccagcgcatggcgagcgcctcccacgcccatccgtaggagcggcgtcccggccgcccctccgttcccagcctgccctgcccccgcctccttcccctcctcggccatggccacctctggacgcctgagcttcaccgtgcgcagccttctagatttacccgagcaggacgcgcaacacctgccgaggcgggagccagaaccacgcgccccccagcccgacccctgcgccgcctggctggattcggagcgcggccactacccttcctcggacgagagcagcctggagaccagcccgccagactcgtcgcagcggccgtccgctaggcccgcgtctccgggctcggacgccgagaaaaggaagaagcggcgggtgctattctccaaggcgcagacgctggagttggagcggcgcttccggcagcagcggtacctgtctgcgcccgagcgcgagcagctggcgagcctgcttcgcctcacgcccacgcaggtcaagatctggttccagaatcatcgctacaagctgaagcgcgctcgcgctccaggggcggcggagtcgcctgacctggcagcatccgccgagctgcacgccgcgcccggcctgctgcgtcgcgtggtggtgccggtgcttgttcgcgacgggcagccgtgcggcggcggcggcggtggcgaggtgggaaccgccgcggcccaggagaagtgcggcgcccctccagccgccgcctgccctctgccgggctaccctgccttcggtcccggctcggcgcttggcctcttccccgcctaccagcacttagcatcccccgccctggtctcctggaactggtgaggccgcagggcggcacctggggctaccctcgactttggagcgcgctctgcgattggagcagggccggagccgaacgcctggaacgctctccgtccgcctccctgcagccccatctccttgggcgccagggtccctggcgcgccctcatcagccgtcgcgcaagcacacacgagggacgtgtgccagagccccctccctcaccttccctccaccgccagccccagagttagattttatgcttgggccttatttgtatatttttaaatagcgatttgtataggaagcaagttatttttttaaaaaatagagtatttttcctcgtagttcgagaataaaatgtgtggggttgggtcccctgcgcgcctgcggggaacgtaggcgggagtcgtgccccccagaccggtgttcgcatcgctggctcgccccttgactggctaagtggggcccggccccagctggatcgaagggcgggttgcagtcccgacacggctttaggaagatacctgggggatggaggggtggtgatgtcagggttgggcgcgggaagaaaaggagaggaggaagctgaggcaactttgggattcttgtcagcgggaggcgtcactggccccagagtgactccgactctccgctgggctcccagagctgctggcgtttcgaataccgaaaagtcaaccctgtggaccacgacagggcagaaggagtttctccggagatgagccggcgaggccaggtgcggggcgcgctgcaccggagcagcccaggccgggccgcaagctgtttccagagtgcaggagccaagtgctcggggaccctttgaaaagtgcctggggacctgaagagcaccggggaatttgtaacccctatttaagcctgcaagtgcctaagttaaaaaaaaaaaaaaaaaaaaaaaaaaaaaaaaaaaaaaaaaaaaaaaaaaaaaaa

SEQ ID NO: 1557 - protein, 239 aa, Homo sapiens
MATSGRLSFTVRSLLDLPEQDAQHLPRREPEPRAPQPDPCAAWLDSERGHYPSSDESSLETSPPDSSQRPSARPASPGSDAEKRKKRRVLFSKAQTLELERRFRQQRYLSAPEREQLASLLRLTPTQVKIWFQNHRYKLKRARAPGAAESPDLAASAELHAAPGLLRRVVVPVLVRDGQPCGGGGGGEVGTAAAQEKCGAPPAAACPLPGYPAFGPGSALGLFPAYQHLASPALVSWNW

SEQ ID NO: 1558 - DNA, 3522 bp, Homo sapiens
aggggcgagtcctgcgcgagtccccgggaggcgccgcgcgcttggaagggacggtcgggcttccccggcccgctgagggctcggcggcgggctcccctcctttccacctcgggagggagggaaggaggggagggaaaagtcccacggaggaggcagaatggccagtcgaggggcgcttaggcgctgcctttccccagggctgcctcgactcctgcacctgtcccgagggctggcctgagacgggactcccggttctcccgctgcgaagcagcgcggccccccggggccggggcagcggcgccggcatgtcgtctggcaccatgaagttcaatggctatttgagggtccgcatcggtgaggcagtggggctgcagcccacccgctggtccctgcgccactcgctcttcaagaagggccaccagctgctggacccctatctgacggtgagcgtggaccaggtgcgcgtgggccagaccagcaccaagcagaagaccaacaaacccacgtacaacgaggagttttgcgctaacgtcaccgacggcggccacctcgagttggccgtcttccacgagacgcccctgggctacgaccacttcgtggccaactgcaccctgcagttccaggagctgctgcgcacgaccggcgcctcggacaccttcgagggttgggtggatctcgagccagaggggaaagtatttgtggtaataacccttaccgggagtttcactgaagctactctccagagagaccggatcttcaaacattttaccaggaagcgccaaagggctatgcgaaggcgagtccaccagatcaatggacacaagttcatggccacgtatctgaggcagcccacctactgctctcactgcagggagtttatctggggagtgtttgggaaacagggttatcagtgccaagtgtgcacctgtgtcgtccataaacgctgccatcatctaattgttacagcctgtacttgccaaaacaatattaacaaagtggattcaaagattgcagaacagaggttcgggatcaacatcccacacaagttcagcatccacaactacaaagtgccaacattctgcgatcactgtggctcactgctctggggaataatgcgacaaggacttcagtgtaaaatatgtaaaatgaatgtgcatattcgatgtcaagcgaacgtggcccctaactgtggggtaaatgcggtggaacttgccaagaccctggcagggatgggtctccaacccggaaatatttctccaacctcgaaactcgtttccagatcgaccctaagacgacagggaaaggagagcagcaaagaaggaaatgggattggggttaattcttccaaccgacttggtatcgacaactttgagttcatccgagtgttggggaaggggagttttgggaaggtgatgcttgcaagagtaaaagaaacaggagacctctatgctgtgaaggtgctgaagaaggacgtgattctgcaggatgatgatgtggaatgcaccatgaccgagaaaaggatcctgtctctggcccgcaatcaccccttcctcactcagttgttctgctgctttcagacccccgatcgtctgttttttgtgatggagtttgtgaatgggggtgacttgatgttccacattcagaagtctcgtcgttttgatgaagcacgagctcgcttctatgctgcagaaatcatttcggctctcatgttcctccatgataaaggaatcatctatagagatctgaaactggacaatgtcctgttggaccacgagggtcactgtaaactggcagacttcggaatgtgcaaggaggggatttgcaatggtgtcaccacggccacattctgtggcacgccagactatatcgctccagagatcctccaggaaatgctgtacgggcctgcagtagactggtgggcaatgggcgtgttgctctatgagatgctctgtggtcacgcgccttttgaggcagagaacgaagatgacctctttgaggccatactgaatgatgaggtggtctaccctacctggctccatgaagatgccacagggatcctaaaatctttcatgaccaagaaccccaccatgcgcttgggcagcctgactcagggaggcgagcacgccatcttgagacatcctttttttaaggaaatcgactgggcccagctgaaccatcgccaaatagaaccgcctttcagacccagaatcaaatcccgagaagatgtcagtaattttgaccctgacttcataaaggaagagccagttttaactccaattgatgagggacatcttccaatgattaaccaggatgagtttagaaacttttcctatgtgtctccagaattgcaaccatagccttatggggagtgagagagagggcacgagaacccaaagggaatagagattctccaggaatttcctctatgggaccttcccagcatcagccttagaacaagaaccttaccttcaaggagcaagtgaagaactctgtgaaggatggaactttcagatatcaactatttagagtccagagggagccatggcactagaaatagttgataatgaaatgagattttatgaagtataccgctccacctatgagcgtctgtctctgtgggcttgggatgttaacaggagccaaaaggagggaaagtgtgaagaataaagtagatctgagaaattctgagccaatcaggcttcttaattcaagagacaaaccaagacgttctgtcaactgtgctgtgctcttctttaagccaatgaaccccaattcctggcagtctacaagaagtctcttaatgctaatgaagaatttaaaggtctttttaaggaaatgaagggctttccaaatagaatgatttactctgaagaaacaaacaatggtatctctgaaactcacaacctaaagcccaatcttgaaaatatgttgtgcaccaagacgactgcttcagcttcttctcttatccttactttctttaatagatatttattaaactgtccagtgaaaaggtgccacaatgcccagtattgtaaacaacaggtttgcattcatgaagctttcattcattctggagtctactaatttacctgaatggtgtttgcattctgtgaaatgcctctccacgttgcatatgtcacacttttgtctgcacataactcttttttcacaagaagggtcactgccacaacagcacagtcagcgggtgaattacaggtgcctgctgcctgcctacctgggtaatctgatcttgtctgtatcgccgtgtgctcatcactgaagaattgcaggccactcatgtcagtgaccagatttgtggcttataaacattagcagtttatttatgttttaagatgcaaagatgtgtgtttgatattcactttaataattagaaatggatcttgtaaacagggcatatatcaaagatgaccttataatatgtacccgaatatacagttcaagaattttgtctgactggaaataaatgcattttgtagcaaaaggaaaaaaaaaaaaaaaaaa

SEQ ID NO: 1559 - protein, 683 aa, Homo sapiens
MSSGTMKFNGYLRVRIGEAVGLQPTRWSLRHSLFKKGHQLLDPYLTVSVDQVRVGQTSTKQKTNKPTYNEEFCANVTDGGHLELAVFHETPLGYDHFVANCTLQFQELLRTTGASDTFEGWVDLEPEGKVFVVITLTGSFTEATLQRDRIFKHFTRKRQRAMRRRVHQINGHKFMATYLRQPTYCSHCREFIWGVFGKQGYQCQVCTCVVHKRCHHLIVTACTCQNNINKVDSKIAEQRFGINIPHKFSIHNYKVPTFCDHCGSLLWGIMRQGLQCKICKMNVHIRCQANVAPNCGVNAVELAKTLAGMGLQPGNISPTSKLVSRSTLRRQGKESSKEGNGIGVNSSNRLGIDNFEFIRVLGKGSFGKVMLARVKETGDLYAVKVLKKDVILQDDDVECTMTEKRILSLARNHPFLTQLFCCFQTPDRLFFVMEFVNGGDLMFHIQKSRRFDEARARFYAAEIISALMFLHDKGIIYRDLKLDNVLLDHEGHCKLADFGMCKEGICNGVTTATFCGTPDYIAPEILQEMLYGPAVDWWAMGVLLYEMLCGHAPFEAENEDDLFEAILNDEVVYPTWLHEDATGILKSFMTKNPTMRLGSLTQGGEHAILRHPFFKEIDWAQLNHRQIEPPFRPRIKSREDVSNFDPDFIKEEPVLTPIDEGHLPMINQDEFRNFSYVSPELQP

SEQ ID NO: 1560 - DNA, 593 bp, Homo sapiens
aagtgacagcctcgtggaagaggtggcatttgaccagagatgaggacgaacagaattaacatagtaggcatgaaggaagaaaatgcgcctgaggacacagccagcacaaatgcagaggcatacaagtgcctggtacagctggcatgcagggatggctgaggaactgcgggggcagccggtgggatccatccgaggcaaacaggattcctgcagacaatgctcggatgatgaaatctgagaggctggatgacagagaaacccacatgcatacacacacactttataaagcttaggaacaaaagcactttataatctccttctgatgccaagtttacagtgcttccagagtcaacaaaggtgactcaggagagtgcacccagctcctttcagcacttatttagctcagccacctgtgtgagctcaaagacaagggtgccgacttcacctgagtagaccctgagtcacgtgatttcttgctggagatgattcagcaaaggagcactaacctctgagacaaggcttcagcttcctgagctctgctgactcgcctgggacttccctaagcccttctggacctagatgagggcaaaact

SEQ ID NO: 1561 - protein, 28 aa, Homo sapiens
MAEELRGQPVGSIRGKQDSCRQCSDDEI

SEQ ID NO: 1562 - DNA, 1312 bp, Homo sapiens
gctttagccatctctctgacctcagtgctgctggactcagttccaagatctaactgtcaaatgctttaggggaaacgggaagagaagtccctggagtaacccatgtgcgcagcctggcactgttttcacttgcctttggaaatgaaggtgcagaaaccatgggaggaacctgatgaaatgcctggtctaacaggaggatgcagagaaagttatgaagagaggatcctgaggaatttgctcctgggccatgaagatgggaagctgagtcagagtgcagttcttcacccaatcccacagccacacgtgcctgcttgctcacgggatcttcccactctcctcgggaaggcttccgagctgcttcctcaggatgtcctgtgatagcagcctgacctgtcaaagccatgcgaataccatctgttcagttatataacttgagatctgggaagaattctcaacgtaggatttgctgcccaaatcaaatcattttcagaaaggagattaagcattctttgctgggaaaaggagaaattaccagaaaaaattatcatttcactgagtataaacaaacctttgtccaaaatacacaaatgaaaatgacaaatttgcttcattaatatttgcttgcattaaaaatatacacagggctatgtatggttcaatatcttaagtgcaaagtaaaatcttaattaggaacaatggaattgttaatttaatgaatcttaattttgtttagatcattagcctgcagtataatgtcccaagcagaatttggggtggggagcttggtggtggaagaggaagtgctcatttctacagacatgacaagattattaacactaaagaatgacttttctttcatgggaggggaagatatctgacccaccagcagtcagacagaaaccctgacttgtgattttaacattaccttatatgacccatggtcaccttgtatgaccaaagaaaaccatttatgaaatagctgtccggagttcaagatttaaatggtaactttgtagactaggttttctctcatcatctaatttacttgccttaacgcttgtttctttgcccttattcctactggctctcgagtataatatcctgagaatttatgttgaacagcactaattttttcacttggagctagcacatgtttatgactagtacaagtttataactacaaaaaacagagattttgtcatcttaaactgaatttactgggaataaaatcagtcaattcagaaaagtataacaaaggaaataaaaatcaccacaactcctactacctgaagattaaatggttaaagtgttt

SEQ ID NO: 1563 - protein, 78 aa, Homo sapiens [sequence omitted]

SEQ ID NO: 1564 - DNA, 2563 bp, Homo sapiens
tgagaaggaaagaacggccgctatagccctatcggctgctacaacaccaaaacgcatccacctaactggctgacgctacaccttggtctttccgggtccttgcacgcttcgctccaactcctgcagagctgagccggaggggaatccggaagggacacgctgaacaggaacagaaatgaataaaagtcgctggcagagtagaagacgacatgggagaagaagccaccagcagaacccttggttcagactccgtgattctgaagacaggtctgactcccgggcagcacagcccgctcacgattccggccacggtgatgacgagtctccgtcaacctcgtctggcacagctgggacctcctctgtgccagagctacctgggttttactttgaccctgaaaagaaacgctacttccgcttgctccctggacataacaactgcaaccccctgacgaaagagagcatccggcagaaggagatggagagcaagagactgcggctgctccaggaagaagacagacggaaaaagattgccaggatgggatttaatgcatcttccatgctacgaaaaagccagctgggttttctcaacgtcaccaattactgccatttagcccacgagctgcgtctcagctgcatggagaggaaaaaggtccagattcgaagcatggatccctccgccttggcaagcgaccgatttaacctcatactggcagataccaacagtgaccggctcttcacagtgaacgatgttaaagttggaggctccaagtatggtatcatcaacctgcaaagtctgaagacccctacgctcaaggtgttcatgcacgaaaacctctacttcaccaaccggaaggtgaattcggtgtgctgggcctcgctgaatcacttggattcccacattctgctatgcctcatgggactcgcagagactccaggctgtgccaccctgctcccagcatcactgttcgtcaatagtcacccaggaatagaccggcctggcatgctctgcagtttccggatccctggtgcctggtcctgtgcctggtccctgaatatccaagcaaataactgcttcagtacaggcttgtctcggcgggtcctgttgaccaacgtggtgacgggacaccggcagtcctttgggaccaacagtgatgtcttggcccagcagtttgctctcatggctcctctgctgtttaatggctgccgctctggggaaatctttgccattgatctgcgttgtggaaatcaaggcaagggatggaaggccacccgcctgtttcatgattcagcagtgacctctgtgcggatcctccaagatgagcaatacctgatggcttcagacatggctggaaagatcaagctgtgggacctgaggaccacgaagtgcgtaaggcagtacgaaggccacgtgaatgagtacgcctacctgcccctgcatgtgcacgaggaagaaggaatcctggtggcagtgggccaggactgctacacgagaatctggagcctccacgatgcccgcctactgagaaccataccctccccgtaccctgcctccaaggccgacattcccagtgtggccttctcgtcgcggctggggggctcccggggcgcgccggggctgctcatggctgtcgggcaggacctttactgttactcctacagctaattctgcagggcacagcccagagccatgtggatttgacttacgggagtaaagcgtaactttttactgcatctaatgagggtgttttaagtgacactcagtgtacacagatcccatcctctggctgctaggagagaagtgctgaatgttccgtgtggagatgctcaggaaagttatttgagttaaattgctggctgagagagcttggaagtccttttcataaaaggtacctctttccttttcttattgaattcttagaacttagttaaccctccctgccttttcttaacaaaaaggacttttctaaggactgaagattggcaaaaacgaaaagcttcttcctccaagagcccattgaagaagcccagtgatgagacggtgagatggtttgagtcctcggtgcctgggtagcaggaagaaagacctgcatcctgcatctgtacttggggaagccagcggagaggacggggaggttacttctctaagtttctgcagaaatattgaaggctggagtttggaatccttaaacttggccttctcaaactcagcagcagatctccgggattctgctgttattatccaaaggcgttggaaggaaagatggatcttcttacatgctagaagttttaaacggtccttaacatgcctttgttcaagcaccttccagaatgtaaggttcagcagctctggtttctattacggtgacttgaatgtcagattcaagggcccggcgtcaaaggaaattggttttgactttttgtaatctaggagcgacagttcgtgagatgtttattcagtgttaaagagcctgtttttctaccaaacaataaaaccaagagaagaatcaaaaaaaaaaaaaaaaaaaaaaaaaaaaaaaaaaaaaaaaaaaaaaaaaaaaaaaaa

SEQ ID NO: 1565 - protein, 495 aa, Homo sapiens
MNKSRWQSRRRHGRRSHQQNPWFRLRDSEDRSDSRAAQPAHDSGHGDDESPSTSSGTAGTSSVPELPGFYFDPEKKRYFRLLPGHNNCNPLTKESIRQKEMESKRLRLLQEEDRRKKIARMGFNASSMLRKSQLGFLNVTNYCHLAHELRLSCMERKKVQIRSMDPSALASDRFNLILADTNSDRLFTVNDVKVGGSKYGIINLQSLKTPTLKVFMHENLYFTNRKVNSVCWASLNHLDSHILLCLMGLAETPGCATLLPASLFVNSHPGIDRPGMLCSFRIPGAWSCAWSLNIQANNCFSTGLSRRVLLTNVVTGHRQSFGTNSDVLAQQFALMAPLLFNGCRSGEIFAIDLRCGNQGKGWKATRLFHDSAVTSVRILQDEQYLMASDMAGKIKLWDLRTTKCVRQYEGHVNEYAYLPLHVHEEEGILVAVGQDCYTRIWSLHDARLLRTIPSPYPASKADIPSVAFSSRLGGSRGAPGLLMAVGQDLYCYSYS

SEQ ID NO: 1566 - DNA, 2461 bp, Homo sapiens
tgagaaggaaagaacggccgctatagccctatcggctgctacaacaccaaaacgcatccacctaactggctgacgctacaccttggtctttccgggtccttgcacgcttcgctccaactcctgcagagctgagccggaggggaatccggaagggacacgctgaacaggtctgactcccgggcagcacagcccgctcacgattccggccacggtgatgacgagtctccgtcaacctcgtctggcacagctgggacctcctctgtgccagagctacctgggttttactttgaccctgaaaagaaacgctacttccgcttgctccctggacataacaactgcaaccccctgacgaaagagagcatccggcagaaggagatggagagcaagagactgcggctgctccaggaagaagacagacggaaaaagattgccaggatgggatttaatgcatcttccatgctacgaaaaagccagctgggttttctcaacgtcaccaattactgccatttagcccacgagctgcgtctcagctgcatggagaggaaaaaggtccagattcgaagcatggatccctccgccttggcaagcgaccgatttaacctcatactggcagataccaacagtgaccggctcttcacagtgaacgatgttaaagttggaggctccaagtatggtatcatcaacctgcaaagtctgaagacccctacgctcaaggtgttcatgcacgaaaacctctacttcaccaaccggaaggtgaattcggtgtgctgggcctcgctgaatcacttggattcccacattctgctatgcctcatgggactcgcagagactccaggctgtgccaccctgctcccagcatcactgttcgtcaatagtcacccaggaatagaccggcctggcatgctctgcagtttccggatccctggtgcctggtcctgtgcctggtccctgaatatccaagcaaataactgcttcagtacaggcttgtctcggcgggtcctgttgaccaacgtggtgacgggacaccggcagtcctttgggaccaacagtgatgtcttggcccagcagtttgctctcatggctcctctgctgtttaatggctgccgctctggggaaatctttgccattgatctgcgttgtggaaatcaaggcaagggatggaaggccacccgcctgtttcatgattcagcagtgacctctgtgcggatcctccaagatgagcaatacctgatggcttcagacatggctggaaagatcaagctgtgggacctgaggaccacgaagtgcgtaaggcagtacgaaggccacgtgaatgagtacgcctacctgcccctgcatgtgcacgaggaagaaggaatcctggtggcagtgggccaggactgctacacgagaatctggagcctccacgatgcccgcctactgagaaccataccctccccgtaccctgcctccaaggccgacattcccagtgtggccttctcgtcgcggctggggggctcccggggcgcgccggggctgctcatggctgtcgggcaggacctttactgttactcctacagctaattctgcagggcacagcccagagccatgtggatttgacttacgggagtaaagcgtaactttttactgcatctaatgagggtgttttaagtgacactcagtgtacacagatcccatcctctggctgctaggagagaagtgctgaatgttccgtgtggagatgctcaggaaagttatttgagttaaattgctggctgagagagcttggaagtccttttcataaaaggtacctctttccttttcttattgaattcttagaacttagttaaccctccctgccttttcttaacaaaaaggacttttctaaggactgaagattggcaaaaacgaaaagcttcttcctccaagagcccattgaagaagcccagtgatgagacggtgagatggtttgagtcctcggtgcctgggtagcaggaagaaagacctgcatcctgcatctgtacttggggaagccagcggagaggacggggaggttacttctctaagtttctgcagaaatattgaaggctggagtttggaatccttaaacttggccttctcaaactcagcagcagatctccgggattctgctgttattatccaaaggcgttggaaggaaagatggatcttcttacatgctagaagttttaaacggtccttaacatgcctttgttcaagcaccttccagaatgtaaggttcagcagctctggtttctattacggtgacttgaatgtcagattcaagggcccggcgtcaaaggaaattggttttgactttttgtaatctaggagcgacagttcgtgagatgtttattcagtgttaaagagcctgtttttctaccaaacaataaaaccaagagaagaatcaaaaaaaaaaaaaaaaaaaaaaaaaaaaaaaaaaaaaaaaaaaaaaaaaaaaaaa

SEQ ID NO: 1567 - protein, 395 aa, Homo sapiens
MESKRLRLLQEEDRRKKIARMGFNASSMLRKSQLGFLNVTNYCHLAHELRLSCMERKKVQIRSMDPSALASDRFNLILADTNSDRLFTVNDVKVGGSKYGIINLQSLKTPTLKVFMHENLYFTNRKVNSVCWASLNHLDSHILLCLMGLAETPGCATLLPASLFVNSHPGIDRPGMLCSFRIPGAWSCAWSLNIQANNCFSTGLSRRVLLTNVVTGHRQSFGTNSDVLAQQFALMAPLLFNGCRSGEIFAIDLRCGNQGKGWKATRLFHDSAVTSVRILQDEQYLMASDMAGKIKLWDLRTTKCVRQYEGHVNEYAYLPLHVHEEEGILVAVGQDCYTRIWSLHDARLLRTIPSPYPASKADIPSVAFSSRLGGSRGAPGLLMAVGQDLYCYSYS

SEQ ID NO: 1568 - DNA, 2051 bp, Homo sapiens
tgagaaggaaagaacggccgctatagccctatcggctgctacaacaccaaaacgcatccacctaactggctgacgctacaccttggtctttccgggtccttgcacgcttcgctccaactcctgcagagctgagccggaggggaatccggaagggacacgctgaacaggaacagaaatgaataaaagtcgctggcagagtagaagacgacatgggagaagaagccaccagcagaacccttggttcagactccgtgattctgaagacaggtctgactcccgggcagcacagcccgctcacgattccggccacggtgatgacgagtctccgtcaacctcgtctggcacagctgggacctcctctgtgccagagctacctgggttttactttgaccctgaaaagaaacgctacttccgcttgctccctggacataacaactgcaaccccctgacgaaagagagcatccggcagaaggagatggagagcaagagactgcggctgctccaggaagaagacagacggaaaaaggcagataccaacagtgaccggctcttcacagtgaacgatgttaaagttggaggctccaagtatggtatcatcaacctgcaaagtctgaagacccctacgctcaaggtgttcatgcacgaaaacctctacttcaccaaccggaaggctcctctgctgtttaatggctgccgctctggggaaatctttgccattgatctgcgttgtggaaatcaaggcaagggatggaaggccacccgcctgtttcatgattcagcagtgacctctgtgcggatcctccaagatgagcaatacctgatggcttcagacatggctggaaagatcaagctgtgggacctgaggaccacgaagtgcgtaaggcagtacgaaggccacgtgaatgagtacgcctacctgcccctgcatgtgcacgaggaagaaggaatcctggtggcagtgggccaggactgctacacgagaatctggagcctccacgatgcccgcctactgagaaccataccctccccgtaccctgcctccaaggccgacattcccagtgtggccttctcgtcgcggctggggggctcccggggcgcgccggggctgctcatggctgtcgggcaggacctttactgttactcctacagctaattctgcagggcacagcccagagccatgtggatttgacttacgggagtaaagcgtaactttttactgcatctaatgagggtgttttaagtgacactcagtgtacacagatcccatcctctggctgctaggagagaagtgctgaatgttccgtgtggagatgctcaggaaagttatttgagttaaattgctggctgagagagcttggaagtccttttcataaaaggtacctctttccttttcttattgaattcttagaacttagttaaccctccctgccttttcttaacaaaaaggacttttctaaggactgaagattggcaaaaacgaaaagcttcttcctccaagagcccattgaagaagcccagtgatgagacggtgagatggtttgagtcctcggtgcctgggtagcaggaagaaagacctgcatcctgcatctgtacttggggaagccagcggagaggacggggaggttacttctctaagtttctgcagaaatattgaaggctggagtttggaatccttaaacttggccttctcaaactcagcagcagatctccgggattctgctgttattatccaaaggcgttggaaggaaagatggatcttcttacatgctagaagttttaaacggtccttaacatgcctttgttcaagcaccttccagaatgtaaggttcagcagctctggtttctattacggtgacttgaatgtcagattcaagggcccggcgtcaaaggaaattggttttgactttttgtaatctaggagcgacagttcgtgagatgtttattcagtgttaaagagcctgtttttctaccaaacaataaaaccaagagaagaatcaaaaaaaaaaaaaaaaaaaaaaaaaaaaaaaaaaaaaaaaaaaaaaaaaaaaaaa

SEQ ID NO: 1569 - protein, 325 aa, Homo sapiens
MNKSRWQSRRRHGRRSHQQNPWFRLRDSEDRSDSRAAQPAHDSGHGDDESPSTSSGTAGTSSVPELPGFYFDPEKKRYFRLLPGHNNCNPLTKESIRQKEMESKRLRLLQEEDRRKKADTNSDRLFTVNDVKVGGSKYGIINLQSLKTPTLKVFMHENLYFTNRKAPLLFNGCRSGEIFAIDLRCGNQGKGWKATRLFHDSAVTSVRILQDEQYLMASDMAGKIKLWDLRTTKCVRQYEGHVNEYAYLPLHVHEEEGILVAVGQDCYTRIWSLHDARLLRTIPSPYPASKADIPSVAFSSRLGGSRGAPGLLMAVGQDLYCYSYS

SEQ ID NO: 1570 - DNA, 4405 bp, Homo sapiens
tgttagtccgagctgggagaagttcactccgatcagctgatcccaactgacaacaggagaggaggaagcccgggaggcaacgaaggaggagggtggcggagatggagatgaggatggatctgccggtgtcctgaggaatagcctctgcccccactggcgccctgcggccccccgacgccgccttgctgcggccgagcttctcagtggtatcccctgaaatactgacttcaggtcgaattatattgaaaagctcctgaccactttctttcattaccaaaactttgtagctgatgtccaaccgatgaacccaccaccgtgaacccatcagacctctctcagatagccataaaagacccttccaagtcaattttgaccacatctttgcttgcactttatggaggatgaaaccatcaaaccaaatcaacgttgctgctaatacaagagtcttagaggcagcaaattaaaaatttgaacatttgtttgtgaagaactataacaggacatgaaaggtgttcttttttaaagtgttcagaaccctgtggaagtttcgtgcagtcttcagactcaaatcttcgtcttcacccccggggcaagctcagtgactattatatggtgggtgtgtttccttaccagcgtgagtatgagtgcccagacttccccagcagagaagggcctgaatccggggctgatgtgccaggaaagttacgcttgcagcgggactgatgaagctatctttgagtgtgatgagtgctgcagtctgcagtgtctccgctgcgaggaggagctccatcggcaggagcgcctgagaaaccatgagcggataagactcaaacctggccatgtcccttactgtgacctctgcaagggtctcagtgggcatttaccaggtgttaggcagagggcaatagtgaggtgccagacctgcaaaattaacttgtgcctggagtgccagaagaggactcattctgggggtaacaaaaggagacaccctgttactgtgtacaatgtcagtaatctccaggagtcactggaggcagaagagatggatgaggagaccaagaggaagaagatgactgagaaggttgtgagtttcctcctagtagacgaaaatgaagaaattcaggtaacaaatgaagaagactttattagaaaattggactgcaaacctgatcagcatctgaaagtggtttccatttttggaaatactggtgatggaaagtctcatactctcaaccacactttcttttatggtcgtgaagtctttaaaacctccccgacccaggagtcctgcactgtgggagtgtgggcagcctatgacccagttcacaaagtagcagtgatcgatacggaagggctcctgggggccaccgtgaatctaagccagagaacacggctgctgcttaaggtcctggccatctcagacctcgtcatctatcgaactcatgcagaccggctgcataacgacctcttcaaattccttggggatgcctcagaagcttatctgaagcacttcaccaaggagctcaaggccaccactgctcgctgtggcctggatgtccctttatccacactgggccctgcagttatcatcttccatgagaccgtgcacacccagctactgggctctgatcatccctcagaggtgccagagaagctcatccaggaccggttccggaagctgggccgtttccctgaagcctttagttccattcactacaagggaacgaggacttacaaccctcccacggacttttctgggcttcggcgtgctttggagcagctactagagaataacaccacccgttctccccggcacccgggagtcatcttcaaagccctgaaggcactaagtgaccgcttcagcggtgagatccccgatgaccagatggcgcacagctccttttttccagatgagtatttcacctgctcctccttgtgcctcagctgtggggttggatgtaagaaaagcatgaatcatgggaaggaaggagtgcctcatgaagccaagagccgctgcagatactcccaccagtatgacaaccgagtgtatacctgcaaggcctgctatgagagaggcgaggaagtcagtgtagtgcccaaaacatctgcttccactgactccccctggatgggtctcgcaaaatatgcctggtctgggtatgtgatcgaatgtcctaactgtggcgtggtctatcgtagtcggcagtactggtttggaaaccaagatcctgtggatacggtggtgcggacagagattgtgcatgtgtggcctggaactgatgggtttctgaaggacaacaacaatgctgcccagcgcctgttggacgggatgaacttcatggctcagtcggtgtccgagcttagccttggacccaccaaggctgtgacttcctggctgacagaccagatcgcccctgcctactggaggcccaactcccagattctgagctgcaacaagtgtgcgacgtcctttaaagataacgacactaagcatcactgccgagcctgtggggagggcttctgtgacagctgttcatcaaagactcggccagtgcctgagcggggctggggccctgcgccagtgcgggtctgtgacaactgctacgaagccaggaacgtccagttagctgttaccgaggcacaagtggacgatgaaggtggaacgctcattgctcggaaggtgggcgaggccgtgcagaacactctgggagccgtggtgacagccattgacataccactaggtctggtaaaggacgcggccaggcctgcgtactgggtgcctgaccacgaaatcctccactgccacaactgccggaaggagttcagcatcaagctctccaagcaccactgccgggcctgcggacagggcttctgtgatgagtgctcccatgaccgccgggctgttccttctcgtggctgggaccatcccgtccgagtctgcttcaactgcaataaaaagcccggtgacctttaaccccagccccctctccgagtccttcacaattccttaggttctcagggttagaaacagtcttgcgaggtaggccctcctcccagtcacctgctgtggtgtgtgtcctctcctctccgcatccagggccactttccctcagtgggggtgagcctggcggcaggcccgaaggtgtggacccctcagggcaggggaccttgcaacttatcgcaaaggggaatgaacctgaatccgttgcatttatttcagttaaaaataatgaatatatatgtgtatatctctctctcatatatacatatgaaaggcactcggggcgtatcgaggctgctgctggctgtgaagacttcgcacagtctcctccgcacagggtgaggtggcagtggcagcacgtcttcctcatgagccgagccaggtccatggccaccacgtggctggccccttcctctgctgctcttggagccttggaagcctctcctgtccttggctcttccctccatgcctgtcagctgcctggggagtgagcctccctggtccttcctgcctgaaacagcctgaagggaattctccctaggtctcctgggagtcgagtcccaattcttggcttaagcctgttttagtcagagaccacccaacttagcgtgcaggtcaccggagtgggtggagggtcagaggtcgggtcttcggccctgagaagtagaaatgcaggggccgtgctgtccctggtcccccagggaacagcaaggaaggaactgagccttctccagcagggcttcctgtcccgatgcttctgtctccactcggctttcccaaaaggcggcacccagctcctcaatcgaagcatctgcctcccacccctcggccccctcaagcccaccatctgcttctgagtgtcgcactaggattttcattgcttattttaaagtgtcttaatcctttgttcccagacacacaacccctctagctctcggaggggcgatcatgagaaaccttccagggaaactgagcacaggatgaactgttagttgtttttaaaagtctatataaatatttcaacagatcgtaaagaaaaaatttatctctttggtccttgcaagagaagtcaaaggaacttttgtttctcctcaagagcctggacatctctgtctgtcatgactggaaagggcccgttgtgctgaaatcctatcatcatggtggatttgatcttcagtggccaaacacgaattaaagtataattcttaactgaactggtgggtgggttgagctttagggaagtatatggcggtcattcctggtgcgcctatcggtgtgacatgagccctggagtgtgtcgtccctctcagccctgctcctcctgcctcctggggtccagtgactgggaccctactctagaactgtgtaccatccaattcgccatcataaaggaatcttcctgca

SEQ ID NO: 1571 - protein, 777 aa, Homo sapiens
MSAQTSPAEKGLNPGLMCQESYACSGTDEAIFECDECCSLQCLRCEEELHRQERLRNHERIRLKPGHVPYCDLCKGLSGHLPGVRQRAIVRCQTCKINLCLECQKRTHSGGNKRRHPVTVYNVSNLQESLEAEEMDEETKRKKMTEKVVSFLLVDENEEIQVTNEEDFIRKLDCKPDQHLKVVSIFGNTGDGKSHTLNHTFFYGREVFKTSPTQESCTVGVWAAYDPVHKVAVIDTEGLLGATVNLSQRTRLLLKVLAISDLVIYRTHADRLHNDLFKFLGDASEAYLKHFTKELKATTARCGLDVPLSTLGPAVIIFHETVHTQLLGSDHPSEVPEKLIQDRFRKLGRFPEAFSSIHYKGTRTYNPPTDFSGLRRALEQLLENNTTRSPRHPGVIFKALKALSDRFSGEIPDDQMAHSSFFPDEYFTCSSLCLSCGVGCKKSMNHGKEGVPHEAKSRCRYSHQYDNRVYTCKACYERGEEVSVVPKTSASTDSPWMGLAKYAWSGYVIECPNCGVVYRSRQYWFGNQDPVDTVVRTEIVHVWPGTDGFLKDNNNAAQRLLDGMNFMAQSVSELSLGPTKAVTSWLTDQIAPAYWRPNSQILSCNKCATSFKDNDTKHHCRACGEGFCDSCSSKTRPVPERGWGPAPVRVCDNCYEARNVQLAVTEAQVDDEGGTLIARKVGEAVQNTLGAVVTAIDIPLGLVKDAARPAYWVPDHEILHCHNCRKEFSIKLSKHHCRACGQGFCDECSHDRRAVPSRGWDHPVRVCFNCNKKPGDL

SEQ ID NO: 1572 - DNA, 2627 bp, Homo sapiens
cctttctcttctagctttgggatctcaggaggaggagaacccaagaaactgtggaatgatgtgaggcactaagtgaccgcttcagcggtgagatccccgatgaccagatggcgcacagctccttttttccagatgagtatttcacctgctcctccttgtgcctcagctgtggggttggatgtaagaaaagcatgaatcatgggaaggaaggagtgcctcatgaagccaagagccgctgcagatactcccaccagtatgacaaccgagtgtatacctgcaaggcctgctatgagagaggcgaggaagtcagtgtagtgcccaaaacatctgcttccactgactccccctggatgggtctcgcaaaatatgcctggtctgggtatgtgatcgaatgtcctaactgtggcgtggtctatcgtagtcggcagtactggtttggaaaccaagatcctgtggatacggtggtgcggacagagattgtgcatgtgtggcctggaactgatgggtttctgaaggacaacaacaatgctgcccagcgcctgttggacgggatgaacttcatggctcagtcggtgtccgagcttagccttggacccaccaaggctgtgacttcctggctgacagaccagatcgcccctgcctactggaggcccaactcccagattctgagctgcaacaagtgtgcgacgtcctttaaagataacgacactaagcatcactgccgagcctgtggggagggcttctgtgacagctgttcatcaaagactcggccagtgcctgagcggggctggggccctgcgccagtgcgggtctgtgacaactgctacgaagccaggaacgtccagttagctgttaccgaggcacaagtggacgatgaaggtggaacgctcattgctcggaaggtgggcgaggccgtgcagaacactctgggagccgtggtgacagccattgacataccactaggtctggtaaaggacgcggccaggcctgcgtactgggtgcctgaccacgaaatcctccactgccacaactgccggaaggagttcagcatcaagctctccaagcaccactgccgggcctgcggacagggcttctgtgatgagtgctcccatgaccgccgggctgttccttctcgtggctgggaccatcccgtccgagtctgcttcaactgcaataaaaagcccggtgacctttaaccccagccccctctccgagtccttcacaattccttaggttctcagggttagaaacagtcttgcgaggtaggccctcctcccagtcacctgctgtggtgtgtgtcctctcctctccgcatccagggccactttccctcagtgggggtgagcctggcggcaggcccgaaggtgtggacccctcagggcaggggaccttgcaacttatcgcaaaggggaatgaacctgaatccgttgcatttatttcagttaaaaataatgaatatatatgtgtatatctctctctcatatatacatatgaaaggcactcggggcgtatcgaggctgctgctggctgtgaagacttcgcacagtctcctccgcacagggtgaggtggcagtggcagcacgtcttcctcatgagccgagccaggtccatggccaccacgtggctggccccttcctctgctgctcttggagccttggaagcctctcctgtccttggctcttccctccatgcctgtcagctgcctggggagtgagcctccctggtccttcctgcctgaaacagcctgaagggaattctccctaggtctcctgggagtcgagtcccaattcttggcttaagcctgttttagtcagagaccacccaacttagcgtgcaggtcaccggagtgggtggagggtcagaggtcgggtcttcggccctgagaagtagaaatgcaggggccgtgctgtccctggtcccccagggaacagcaaggaaggaactgagccttctccagcagggcttcctgtcccgatgcttctgtctccactcggctttcccaaaaggcggcacccagctcctcaatcgaagcatctgcctcccacccctcggccccctcaagcccaccatctgcttctgagtgtcgcactaggattttcattgcttattttaaagtgtcttaatcctttgttcccagacacacaacccctctagctctcggaggggcgatcatgagaaaccttccagggaaactgagcacaggatgaactgttagttgtttttaaaagtctatataaatatttcaacagatcgtaaagaaaaaatttatctctttggtccttgcaagagaagtcaaaggaacttttgtttctcctcaagagcctggacatctctgtctgtcatgactggaaagggcccgttgtgctgaaatcctatcatcatggtggatttgatcttcagtggccaaacacgaattaaagtataattcttaactgaactggtgggtgggttgagctttagggaagtatatggcggtcattcctggtgcgcctatcggtgtgacatgagccctggagtgtgtcgtccctctcagccctgctcctcctgcctcctggggtccagtgactgggaccctactctagaactgtgtaccatccaattcgccatcataaaggaatcttcctgca

SEQ ID NO: 1573 - protein, 362 aa, Homo sapiens
MAHSSFFPDEYFTCSSLCLSCGVGCKKSMNHGKEGVPHEAKSRCRYSHQYDNRVYTCKACYERGEEVSVVPKTSASTDSPWMGLAKYAWSGYVIECPNCGVVYRSRQYWFGNQDPVDTVVRTEIVHVWPGTDGFLKDNNNAAQRLLDGMNFMAQSVSELSLGPTKAVTSWLTDQIAPAYWRPNSQILSCNKCATSFKDNDTKHHCRACGEGFCDSCSSKTRPVPERGWGPAPVRVCDNCYEARNVQLAVTEAQVDDEGGTLIARKVGEAVQNTLGAVVTAIDIPLGLVKDAARPAYWVPDHEILHCHNCRKEFSIKLSKHHCRACGQGFCDECSHDRRAVPSRGWDHPVRVCFNCNKKPGDL

SEQ ID NO: 1574 - DNA, 4189 bp, Homo sapiens
gcggctgtatttgcggcctgtgcgagtaggcgcttgggcactcagtctccctggcgagcgacgggcagaaatctcgaaccagtggagcgcactcgtaacctggatcccagaaggtcgcgaaggcagtaccgtttcctcagcggcggactgctgcagtaagaatgtcttttccacctcatttgaatcgccctcccatgggaatcccagcactcccaccagggatcccacccccgcagtttccaggatttcctccacctgtacctccagggaccccaatgattcctgtaccaatgagcattatggctcctgctccaactgtcttagtacccactgtgtctatggttggaaagcatttgggcgcaagaaaggatcatccaggcttaaaggctaaagaaaatgatgaaaattgtggtcctactaccactgtttttgttggcaacatttccgagaaagcttcagacatgcttataagacaactcttagctaaatgtggtttggttttgagctggaagagagtacaaggtgcttccggaaagcttcaagccttcggattctgtgagtacaaggagccagaatctaccctccgtgcactcagattattacatgacctgcaaattggagagaaaaagctactcgttaaagttgatgcaaagacaaaggcacagctggatgaatggaaagcaaagaagaaagcttctaatgggaatgcaaggccagaaactgtcactaatgacgatgaagaagccttggatgaagaaacaaagaggagagatcagatgattaaaggggctattgaagttttaattcgtgaatactccagtgagctaaatgccccctcacaggaatctgattctcaccccaggaagaagaagaaggaaaagaaggaggacattttccgcagatttccagtggccccactgatcccttatccactcatcactaaggaggatataaatgctatagaaatggaagaagacaaaagagacctgatatctcgagagatcagcaaattcagagacacacataagaaactggaagaagagaaaggcaaaaaggaaaaagaaagacaggaaattgagaaagagcggagagaaagagagagggagcgtgaaagggaacgagaaaggcgagaacgggaacgagaaagggaaagagaacgtgaacgagaaaaggagaaagaacgggagcgggaacgagaacgggatagggaccgtgaccggacaaaagagagagaccgagatcgggatcgagagagagatcgtgaccgggatagagaaaggagctcagatcgtaataaggatcgcagtcgatcaagagaaaaaagcagagatcgtgaaagggaacgagagcgggaaagagagagagagagagaacgagagcgagaacgagaacgggagcgagagagagagcgagagagggaacgggagcgagaaagagaaaaagacaaaaaacgggaccgagaagaagatgaagaagatgcatacgaacgaagaaaacttgaaagaaaactccgagagaaagaagctgcttatcaagagcgccttaagaattgggaaatcagagaacgaaagaaaacccgggaatatgagaaagaagctgaaagagaagaagaaagaagaagagaaatggccaaagaagctaaacgactaaaagaattcttagaagactatgatgatgatagagatgaccccaaatattacagaggaagtgctcttcagaaaaggttgcgtgatagagaaaaggaaatggaagcagatgaacgagataggaagagagagaaggaggagcttgaggaaatcaggcagcgccttctggcagaagggcatccagatccagatgcagagctccagaggatggaacaagaggctgagaggcgcaggcagccacaaataaagcaagagccagaatcagaagaggaggaagaagaaaagcaagaaaaagaagaaaaacgagaagaacccatggaagaggaagaggaaccagagcaaaagccttgtctgaaacctactctgaggcccatcagctctgctccatctgtttcctctgccagtggcaatgcaacacctaacactcctggggatgagtctccctgtggtattattattcctcatgaaaactcaccagatcaacagcaacctgaggagcataggccaaaaataggactaagtcttaaactgggtgcttccaatagtcctggtcagcctaattctgtgaagagaaagaaactacctgtagatagtgtctttaacaaatttgaggatgaagacagtgatgacgtaccccgaaaaaggaaactggttcccttggattatggtgaagatgataaaaatgcaaccaaaggcactgtaaacactgaagaaaagcgtaaacacattaagagtctcattgagaaaatccctacagccaaacctgagctcttcgcttatcccctggattggtctattgtggattctatactgatggaacgtcgaattagaccatggattaataagaaaatcatagaatatataggtgaagaagaagctacattagttgattttgtttgttctaaggttatggctcatagttcaccccagagcattttagatgatgttgccatggtacttgatgaagaagcagaagtttttatagtcaaaatgtggagattattgatatatgaaacagaagccaagaaaattggtcttgtgaagtaaaactttttatatttagagttccatttcagatttcttctttgccacccttttaaggactttgaatttttctttgtctttgaagacattgtgagatctgtaattttttttttttgtagaaaatgtgaattttttggtcctctaatttgttgttgccctgtgtactcccttggttgtaaagtcatctgaatccttggttctctttatactcaccaggtacaaattactggtatgttttataagccgcagctactgtacacagcctatctgatataatcttgttctgctgatttgtttcttgtaaatattaaaacgactccccaattattttgcagaattgcacttaatattgaaatgtactgtataggaaccaacatgaacaattttaattgaaaacaccagtcataaactattaccacccccactctcttttgatcagaaatggcaagcccttgtgaaggcatggagtttaaaattggaatgcaaaaattagcagacaatccattcctactgtatttctgtatgaatgtgtttgtgaatgtatgtgtaaaagtctttcttttccctaatttgctttggtggggtccttaaaacatttcccaactaaagaatagaattgtaaaggaaaagtggtactgttccaacctgaaatgtctgttataattaggttattagtttcccagagcatggtgttctcgtgtcgtgagcaatgtggtttgctaactggatggggttttcttattaataagatggctgcttcagcttctcttttaaaggaatgtggatcatagtgatttttccttttaattttattgctcagaaatgaggcatatcctaaaaatcctggagagctgtatttaatgcatttttgcactaattggtccttagtttaattctattgtatctgtttatttaacaaaaaattcatcataccaaaaagtgtaagtgaaaaccccctttaaaacaaaacaaaaaaatgaaataaaattaggcaaattgacagacagtgagagttttacaaacatgataggtattctgctcggcaatttgtaagtttacatgttatttaaggataaaggtaaatcattcaaggcagttaccaaccactaactatttgttttcatttttgtcttgtagaaggtttatatcttgttttaccttggctcattagtgtttaaaaatgtactgatgatgtgcttagagaaattcctggggctttcttcgttgtagatcagaatttcaccagggagtaaaattacctgaaaacgcaagaagttttaaacagcttttcacacaaattagatgcaactgttcccatgtctgagtacttatttaaaagaaaggtaaagattggcctgttagaaaaagcataatgtgagctttggattactggatttttttttttttaaacacacctggagaggacatttgaaaacactgttcttaccctcgaaccctgatgtggttccattatgtaaataaaaaaaaaaaaaaaaaaa

SEQ ID NO: 1575 - protein, 843 aa, Homo sapiens
MSFPPHLNRPPMGIPALPPGIPPPQFPGFPPPVPPGTPMIPVPMSIMAPAPTVLVPTVSMVGKHLGARKDHPGLKAKENDENCGPTTTVFVGNISEKASDMLIRQLLAKCGLVLSWKRVQGASGKLQAFGFCEYKEPESTLRALRLLHDLQIGEKKLLVKVDAKTKAQLDEWKAKKKASNGNARPETVTNDDEEALDEETKRRDQMIKGAIEVLIREYSSELNAPSQESDSHPRKKKKEKKEDIFRRFPVAPLIPYPLITKEDINAIEMEEDKRDLISREISKFRDTHKKLEEEKGKKEKERQEIEKERRERERERERERERREREREREREREREKEKERERERERDRDRDRTKERDRDRDRERDRDRDRERSSDRNKDRSRSREKSRDREREREREREREREREREREREREREREREREREREKDKKRDREEDEEDAYERRKLERKLREKEAAYQERLKNWEIRERKKTREYEKEAEREEERRREMAKEAKRLKEFLEDYDDDRDDPKYYRGSALQKRLRDREKEMEADERDRKREKEELEEIRQRLLAEGHPDPDAELQRMEQEAERRRQPQIKQEPESEEEEEEKQEKEEKREEPMEEEEEPEQKPCLKPTLRPISSAPSVSSASGNATPNTPGDESPCGIIIPHENSPDQQQPEEHRPKIGLSLKLGASNSPGQPNSVKRKKLPVDSVFNKFEDEDSDDVPRKRKLVPLDYGEDDKNATKGTVNTEEKRKHIKSLIEKIPTAKPELFAYPLDWSIVDSILMERRIRPWINKKIIEYIGEEEATLVDFVCSKVMAHSSPQSILDDVAMVLDEEAEVFIVKMWRLLIYETEAKKIGLVK

SEQ ID NO: 1576 - DNA, 2763 bp, Homo sapiens
tgggacaggcagctccggggtccgcggtttcacatcggaaacaaaacagcggctggtctggaaggaacctgagctacgagccgcggcggcagcggggcggcggggaagcgtatacctaatctgggagcctgcaagtgacaacagcctttgcggtccttagacagcttggcctggaggagaacacatgaaagaaagaacctcaagaggctttgttttctgtgaaacagtatttctatacagttgctccaatgacagagttacctgcaccgttgtcctacttccagaatgcacagatgtctgaggacaaccacctgagcaatactgtacgtagccagaatgacaatagagaacggcaggagcacaacgacagacggagccttggccaccctgagccattatctaatggacgaccccagggtaactcccggcaggtggtggagcaagatgaggaagaagatgaggagctgacattgaaatatggcgccaagcatgtgatcatgctctttgtccctgtgactctctgcatggtggtggtcgtggctaccattaagtcagtcagcttttatacccggaaggatgggcagctaatctataccccattcacagaagataccgagactgtgggccagagagccctgcactcaattctgaatgctgccatcatgatcagtgtcattgttgtcatgactatcctcctggtggttctgtataaatacaggtgctataaggtcatccatgcctggcttattatatcatctctattgttgctgttctttttttcattcatttacttgggggaagtgtttaaaacctataacgttgctgtggactacattactgttgcactcctgatctggaattttggtgtggtgggaatgatttccattcactggaaaggtccacttcgactccagcaggcatatctcattatgattagtgccctcatggccctggtgtttatcaagtacctccctgaatggactgcgtggctcatcttggctgtgatttcagtatatgatttagtggctgttttgtgtccgaaaggtccacttcgtatgctggttgaaacagctcaggagagaaatgaaacgctttttccagctctcatttactcctcaacaatggtgtggttggtgaatatggcagaaggagacccggaagctcaaaggagagtatccaaaaattccaagtataatgcagaaagcacagaaagggagtcacaagacactgttgcagagaatgatgatggcgggttcagtgaggaatgggaagcccagagggacagtcatctagggcctcatcgctctacacctgagtcacgagctgctgtccaggaactttccagcagtatcctcgctggtgaagacccagaggaaaggggagtaaaacttggattgggagatttcattttctacagtgttctggttggtaaagcctcagcaacagccagtggagactggaacacaaccatagcctgtttcgtagccatattaattggtttgtgccttacattattactccttgccattttcaagaaagcattgccagctcttccaatctccatcacctttgggcttgttttctactttgccacagattatcttgtacagccttttatggaccaattagcattccatcaattttatatctagcatatttgcggttagaatcccatggatgtttcttctttgactataacaaaatctggggaggacaaaggtgattttcctgtgtccacatctaacaaagtcaagattcccggctggacttttgcagcttccttccaagtcttcctgaccaccttgcactattggactttggaaggaggtgcctatagaaaacgattttgaacatacttcatcgcagtggactgtgtccctcggtgcagaaactaccagatttgagggacgaggtcaaggagatatgataggcccggaagttgctgtgccccatcagcagcttgacgcgtggtcacaggacgatttcactgacactgcgaactctcaggactaccgttaccaagaggttaggtgaagtggtttaaaccaaacggaactcttcatcttaaactacacgttgaaaatcaacccaataattctgtattaactgaattctgaacttttcaggaggtactgtgaggaagagcaggcaccagcagcagaatggggaatggagaggtgggcaggggttccagcttccctttgattttttgctgcagactcatcctttttaaatgagacttgttttcccctctctttgagtcaagtcaaatatgtagattgcctttggcaattcttcttctcaagcactgacactcattaccgtctgtgattgccatttcttcccaaggccagtctgaacctgaggttgctttatcctaaaagttttaacctcaggttccaaattcagtaaattttggaaacagtacagctatttctcatcaattctctatcatgttgaagtcaaatttggattttccaccaaattctgaatttgtagacatacttgtacgctcacttgccccagatgcctcctctgtcctcattcttctctcccacacaagcagtctttttctacagccagtaaggcagctctgtcgtggtagcagatggtcccattattctagggtcttactctttgtatgatgaaaagaatgtgttatgaatcggtgctgtcagccctgctgtcagaccttcttccacagcaaatgagatgtatgcccaaagcggtagaattaaagaagagtaaaatggctgttgaagc

SEQ ID NO: 1577 - protein, 467 aa, Homo sapiens
MTELPAPLSYFQNAQMSEDNHLSNTVRSQNDNRERQEHNDRRSLGHPEPLSNGRPQGNSRQVVEQDEEEDEELTLKYGAKHVIMLFVPVTLCMVVVVATIKSVSFYTRKDGQLIYTPFTEDTETVGQRALHSILNAAIMISVIVVMTILLVVLYKYRCYKVIHAWLIISSLLLLFFFSFIYLGEVFKTYNVAVDYITVALLIWNFGVVGMISIHWKGPLRLQQAYLIMISALMALVFIKYLPEWTAWLILAVISVYDLVAVLCPKGPLRMLVETAQERNETLFPALIYSSTMVWLVNMAEGDPEAQRRVSKNSKYNAESTERESQDTVAENDDGGFSEEWEAQRDSHLGPHRSTPESRAAVQELSSSILAGEDPEERGVKLGLGDFIFYSVLVGKASATASGDWNTTIACFVAILIGLCLTLLLLAIFKKALPALPISITFGLVFYFATDYLVQPFMDQLAFHQFYI

SEQ ID NO: 1578 - DNA, 5799 bp, Homo sapiens
cgacggagcggccctggctgcagcctcccggcgccagcgaagacaggctgagatgcggctgctcctgctcgtgccgctgctgctggctccagcgcccgggtcctcggctcccaaggtgaggcggcagagtgacacctggggaccctggagccagtggagcccctgcagccggacctgtggagggggtgtcagcttccgggagcgcccctgctactcccagaggagagatggaggctccagctgcgtgggccccgcccggagccaccgctcttgtcgcacggagagctgccccgacggcgcccgggacttccgggccgagcagtgcgcggagttcgacggagcggagttccaggggcggcggtatcggtggctgccctactacagcgccccaaacaagtgtgaactgaactgcattcccaagggggagaacttctactacaagcacagggaggctgtggttgatgggacgccctgcgagcctggcaagagggatgtctgtgtggatggcagctgccgggttgtcggctgtgatcacgagctggactcgtccaagcaggaggacaagtgtctgcggtgtgggggtgacggcacgacctgctaccccgtcgcaggcacctttgacgctaatgacctcagccgagctgtgaagaatgttcgtggggaatactacctcaatgggcactggaccatcgaggcggcccgggccctgccggcagccagcaccatcctgcattacgagcggggtgctgagggggacctggcccctgagcgactccatgcccggggccccacctcggagcccctggtcatcgagctcatcagccaggagcccaaccccggtgtgcactatgagtaccacctgcccctgcgccgccccagccccggcttcagctggagccacggctcatggagtgactgcagcgcggagtgtggcggaggtcaccagtcccgcctggtgttctgcaccatcgaccatgaggcctaccccgaccacatgtgccagcgccagccacggccagctgaccggcgttcctgcaatcttcacccttgcccggagaccaagcgctggaaggcagggccatgggcaccctgctcagcctcctgtggaggaggctcccagtcccgctccgtgtactgcatctcgtctgacggggccggcatccaggaggccgtggaggaggctgagtgtgccgggctgcctgggaagccccctgccattcaggcctgtaacctgcagcgctgtgcagcctggagcccggagccctggggagagtgttctgtcagttgtggcgttggcgtccggaagcggagcgttacttgccggggtgaaaggggttctttgctccataccgcagcgtgctccttggaagaccggccacctctgactgagccctgtgtgcatgaggactgccccctcctcagtgaccaggcctggcatgttggcacctggggtctatgctccaagagctgcagctcgggcactcggaggcgacaggtcatctgtgccattgggccgcccagccactgcgggagcctgcagcactccaagcctgtggatgtggagccttgtaacacgcagccctgtcatctcccccaggaggtccccagcatgcaggatgtgcacacccctgccagcaacccctggatgccgttgggccctcaggagtcccctgcctcagactccagaggccagtggtgggcagcccaggaacacccctcagccaggggtgaccacaggggagaacgaggtgaccccaggggcgaccaaggcacccacctgtcagccctgggccccgctccctctctgcagcagcccccataccagcaacccctgcggtcgggctcagggccccacgactgcagacacagtcctcacgggtgctgccccgatggccacacggcatctctcgggcctcagtggcaaggctgccctggggccccctgtcagcagagcaggtacgggtgctgccctgacagggtatctgtcgctgaggggccccatcacgctggctgcacaaagtcgtatggtggtgacagcaccgggggcaggcccaggtcaagggcagtggcttctacagtccacaacacccaccagccccaggcccagcagaatgagcccagtgagtgccggggctcccagtttggctgttgctatgacaacgtggccactgcagccggtcctcttggggaaggctgtgtgggccagcccagccatgcctaccccgtgcggtgcctgctgcccagtgcccatggctcttgcgcagactgggctgcccgctggtacttcgttgcctctgtgggccaatgtaaccgcttctggtatggcggctgccatggcaatgccaataactttgcctcggagcaagagtgcatgagcagctgccagggatctctccatgggccccgtcgtccccagcctggggcttctggaaggagcacccacacggatggtggcggcagcagtcctgcaggcgagcaggaacccagccagcacaggacaggggccgcggtgcagagaaagccctggccttctggtggtctctggcggcaagaccaacagcctgggccaggggaggccccccacacccaggcctttggagaatggccatgggggcaggagcttgggtccagggcccctggactgggtggagatgccggatcaccagcgccacccttccacagctcctcctacaggattagcttggcaggtgtggagccctcgttggtgcaggcagccctggggcagttggtgcggctctcctgctcagacgacactgccccggaatcccaggctgcctggcagaaagatggccagcccatctcctctgacaggcacaggctgcagttcgacggatccctgatcatccaccccctgcaggcagaggacgcgggcacctacagctgtggcagcacccggccaggccgcgactcccagaagatccaacttcgcatcatagggggtgacatggccgtgctgtctgaggctgagctgagccgcttccctcagcccagggacccagctcaggactttggccaagcgggggctgctgggcccctgggggccatcccctcttcacacccacagcctgcaaacaggctgcgtttggaccagaaccagccccgggtggtggatgccagtccaggccagcggatccggatgacctgccgtgccgaaggcttcccgcccccagccatcgagtggcagagagatgggcagcctgtctcttctcccagacaccagctgcagcctgatggctccctggtcattagccgagtggctgtagaagatggcggcttctacacctgtgtcgctttcaatgggcaggaccgagaccagcgatgggtccagctcagagttctgggggagctgacaatctcaggactgccccctactgtgacagtgccagagggtgatacggccaggctattgtgtgtggtagcaggagaaagtgtgaacatcaggtggtccaggaacgggctacctgtgcaggctgatggccaccgtgtccaccagtccccagatggcacgctgctcatttacaacttgcgggccagggatgagggctcctacacgtgcagtgcctaccaggggagccaggcagtcagccgcagcaccgaggtgaaggtggtctcaccagcacccaccgcccagcccagggaccctggcagggactgcgtcgaccagccagagctggccaactgtgatttgatcctgcaggcccagctttgtggcaatgagtattactccagcttctgctgtgccagctgttcacgtttccagcctcacgctcagcccatctggcagtagggatgaaggctagttccagccccagtccaaaatagttcatagggctagggagaaaggaagatggactcttggcttcctctctctggctggcaaagggagttatcttctggaatacattagctctttcaaaaacccacccagtgtttagcctcaacggcagccagttaccagcttctctctgtagccttcagcagtgtttgcatctctgacataaccacaggctgctgttttcaagaagagcaatctgtttggataagaaaaacctttactttacagcttccctttataatttgttacacaggaatagttaaatgcatttgtttgtttgttttttgagacagagtttcactcttgttgcccaggctggagggcaatggcgcgatctcagctcactgcaacctccgtctcctgggttcttgattctcctgtgtcagccttctgagtagctaggattacagatgcctatcaccatgcctgggtaatttttgtatttttagttgagatggggtttcaccatgttggccaggctggtctcgaacttctgacctcagatgatctgcccgcctcagcctcccaaagtgctgggattacaggcatgagccaccacgcccagccatcaatgcattttttttattttttttttgagacagagtttcgcacttcttgcccaggctggagtacaatggtgcgatcttggctcactgcaacctccacctcctgggttcaagcgcttctccagcctcagcctcctgagtagctgggattacaggtatgtgccaccatgcctggctaattttgtatttttagtagagacggggtttctccatgttggtcagactggtcttgaactcccgacctcaggtaatccgcccgcctcggcctcccaaaatgctgggattagaggtgtgagccactgtgcccagcccatcaatgtgttttaaagctagctgtcagggttccacttaatttaaagctgggcagggagatgtgtaatgatttcaaagttaacacctgtttgttttctaaagggcatgccaagtcctgctgtatcagggaagtattctgtgctaaaatcagcgatggttcattgctctagtctctctcacccttctaggcagtgcatcagtcagctctaaatctggtgcagagggttaacagcataacccttgttggcaaaatggaatagatgttaagacctcaaatagggatttgggatgaaacagctgcagttagcactgttatctgagcatgaaagaactggaaacgctccttacgtcgagatgttggaccttgaagccctcctgaggccaacatgcaaatctggctgtgacggttcatctgacacctgtgtaaagctgaccagcctgctctgtacagtgacaatgaggagcccctctcttccttaagtaggaatctgtgaagcaaaatgtttgctgccaaagacaaatcagactgtcagtcattaaaaacagcattagcaggatgaggatagcaatggggaagggttgtgggcaatgcagtaacagggaaatggcttcagaaatggtttgagttggaagacaacattcttcatctctcaggacttctaattccttgatgctaaaagaagaggcatggattctatgagcttccaagtccctttccactttaaccttctacaaatctttcagaggactgcctagtagcaaaggttattcctggacacaggaaagacgggcattacagggaccaaagctctgaaaggtgacttttattaccaacacactggctggaaaagggacaaaccacatcacgggtgagtgatacttctcagtcttctctactcattcaacaaaggaaatgtgggctggggcagaggtcttttttcatttaatactggaaaaatattgaagagcatccatgttcacttatggctggttttgctatagaaattggaaaataaaggccacttttttgaaatccccagtttaattaaaaaaaaaaaaaaaaaa

SEQ ID NO: 1579 - protein, 1251 aa, Homo sapiens
MRLLLLVPLLLAPAPGSSAPKVRRQSDTWGPWSQWSPCSRTCGGGVSFRERPCYSQRRDGGSSCVGPARSHRSCRTESCPDGARDFRAEQCAEFDGAEFQGRRYRWLPYYSAPNKCELNCIPKGENFYYKHREAVVDGTPCEPGKRDVCVDGSCRVVGCDHELDSSKQEDKCLRCGGDGTTCYPVAGTFDANDLSRAVKNVRGEYYLNGHWTIEAARALPAASTILHYERGAEGDLAPERLHARGPTSEPLVIELISQEPNPGVHYEYHLPLRRPSPGFSWSHGSWSDCSAECGGGHQSRLVFCTIDHEAYPDHMCQRQPRPADRRSCNLHPCPETKRWKAGPWAPCSASCGGGSQSRSVYCISSDGAGIQEAVEEAECAGLPGKPPAIQACNLQRCAAWSPEPWGECSVSCGVGVRKRSVTCRGERGSLLHTAACSLEDRPPLTEPCVHEDCPLLSDQAWHVGTWGLCSKSCSSGTRRRQVICAIGPPSHCGSLQHSKPVDVEPCNTQPCHLPQEVPSMQDVHTPASNPWMPLGPQESPASDSRGQWWAAQEHPSARGDHRGERGDPRGDQGTHLSALGPAPSLQQPPYQQPLRSGSGPHDCRHSPHGCCPDGHTASLGPQWQGCPGAPCQQSRYGCCPDRVSVAEGPHHAGCTKSYGGDSTGGRPRSRAVASTVHNTHQPQAQQNEPSECRGSQFGCCYDNVATAAGPLGEGCVGQPSHAYPVRCLLPSAHGSCADWAARWYFVASVGQCNRFWYGGCHGNANNFASEQECMSSCQGSLHGPRRPQPGASGRSTHTDGGGSSPAGEQEPSQHRTGAAVQRKPWPSGGLWRQDQQPGPGEAPHTQAFGEWPWGQELGSRAPGLGGDAGSPAPPFHSSSYRISLAGVEPSLVQAALGQLVRLSCSDDTAPESQAAWQKDGQPISSDRHRLQFDGSLIIHPLQAEDAGTYSCGSTRPGRDSQKIQLRIIGGDMAVLSEAELSRFPQPRDPAQDFGQAGAAGPLGAIPSSHPQPANRLRLDQNQPRVVDASPGQRIRMTCRAEGFPPPAIEWQRDGQPVSSPRHQLQPDGSLVISRVAVEDGGFYTCVAFNGQDRDQRWVQLRVLGELTISGLPPTVTVPEGDTARLLCVVAGESVNIRWSRNGLPVQADGHRVHQSPDGTLLIYNLRARDEGSYTCSAYQGSQAVSRSTEVKVVSPAPTAQPRDPGRDCVDQPELANCDLILQAQLCGNEYYSSFCCASCSRFQPHAQPIWQ

SEQ ID NO: 1580 - DNA, 8568 bp, Homo sapiens
cctcgctccctctccggtaatgagggggctgagctgtccctccgaggagggggcctggtgtggataaaagagacgaaaaagccgggggaggtttccaaaaataaaaccgtccgggtccccttcagacggctgcaggcacagggaggaggcgcgaaggtgcagcagccgtgcgagcccagctggagtaggagcgcggactcgaggctcggggcgcgcagccctcgttccgccgagagccgggcccccagtcggccgcttcagggccccctagactcagagaagctggccgccgggcggggccgggagaacagcccgcgggcgtccagcgtgccgaccacaaagctcttcgcggtgcccgcgcgcaccactctccagccgccccgcgccatgaggccgcggaccaaagcccgcagcccggggcgcgccctgcggaacccctggagaggcttcctgccgctcaccctggctctcttcgtgggcgcgggtcatgcccaaagggaccccgtagggagatacgagccggctggtggagacgcgaatcgactgcggcgccctgggggcagctacccggcagcggctgcagccaaggtgtacagtctgttccgggagcaggacgcgcctgtcgcgggcttgcagcccgtggagcgggcccagccgggctgggggagccccaggaggcccaccgaggcggaggccaggaggccgtcccgcgcgcagcagtcgcggcgtgtccagccacctgcgcagacccggagaagcactcccctgggccagcagcaaccagcaccccggacccgggccgcgccggctctcccacgcctggggaccccacagcggtctggggctgcgcccccaaccccgccgcgagggcggctcacggggaggaacgtctgcgggggacagtgctgcccaggatggacaacagcaaacagcaccaaccactgtatcaaacccgtttgcgagccgccgtgccagaaccggggctcctgcagccgcccgcagctctgtgtctgccgctctggtttccgtggagcccgctgcgaggaggtcattcccgatgaggaatttgacccccagaactccaggctggcacctcgacgctgggccgagcgttcacccaacctgcgcaggagcagtgcggctggagagggcaccttggccagagcacagccgccagcaccacagtcgccgcccgcaccacagtcgccaccagctgggaccctgagtggcctcagccagacccacccttcccagcagcacgtggggttgtcccgcactgtccgacttcacccgactgccacggccagtagccagctctcttccaacgccctgcccccgggaccaggccttgagcagagagatggcacccaacaggcggtacctctggagcacccctcatccccctgggggctgaacctcacggagaaaatcaagaagatcaagatcgtcttcactcccaccatctgcaagcagacctgtgcccgtggacactgtgccaacagctgtgagaggggcgacaccaccaccctgtacagccagggcggccatgggcacgatcccaagtctggcttccgcatctatttctgccagatcccctgcctgaacggaggccgctgcatcggcagggacgaatgctggtgccccgccaactccaccgggaagttctgccacctgcctatcccgcagccggacagggagcctccagggagggggtcccgccccagggccttgctggaagccccactgaagcagtccactttcacactgccgctctccaaccagctggcctccgtgaacccctccctggtgaaggtgcacattcaccacccacccgaggcctcagtgcagatccaccaggtggcccaggtgcggggcggggtggaggaggccctagtggagaacagcgtggagaccagacccccgccctggctgcctgccagccctggccacagcctctgggacagcaacaacatccctgctcggtctggagagccccctcggccactgcccccagcagcacccaggcctcgaggactgctgggccggtgttacctgaacactgtgaacggacagtgtgccaaccctctgctggagctgactacccaggaggactgctgtggcagtgtgggagccttctggggggtgactttgtgtgccccatgcccacccagaccagcctccccggtgattgagaatggccagctggagtgtcctcaggggtacaagagactgaacctcactcactgccaagatatcaacgagtgcttgaccctgggcctgtgcaaggacgcggagtgtgtgaataccaggggcagctacctgtgcacatgcagacctggcctcatgctggatccatcgcggagccgctgtgtgtcggacaaggcaatctccatgctgcagggactgtgctaccggtcgctggggcccggcacctgcaccctgcctttggcccagcggatcaccaagcagatatgctgctgcagccgcgtgggcaaagcatggggcagcgagtgtgagaaatgccctctgcctggcacagaggccttcagagagatctgccctgccggccacggctacacctacgcgagctccgacatccgcctgtccatgaggaaagccgaggaggaggaactggcaaggcccccaagggagcaagggcagaggagcagcggggcactgcccgggccagcagagaggcagcccctccgggtcgtcacggacacctggcttgaggccgggaccatccctgacaagggtgactctcaggctggccaggtcacgaccagtgtcactcatgcacctgcctgggtcacagggaatgccacaaccccaccaatgcctgaacaggggattgcagagatacaggaagaacaagtgaccccctccaccgatgtgctggtgaccctgagcaccccaggcattgacagatgcgctgctggagccaccaacgtctgtggccctggaacctgcgtgaacctccccgatggatacagatgtgtctgcagccctggctaccagctgcaccccagccaggcctactgcacagatgacaacgagtgtctgagggacccctgcaagggaaaagggcgctgcatcaaccgcgtggggtcctactcctgcttctgctaccctggctacactctggccacctcaggggcgacacaggagtgtcaagatatcaatgagtgtgagcagccaggggtgtgcagcggggggcagtgcaccaacaccgagggctcgtaccactgcgagtgtgatcagggctacatcatggtcaggaaaggacactgccaagatatcaacgaatgccgtcaccccggtacctgccctgatgggagatgcgtcaattcccctggctcctacacttgtctggcctgtgaggagggctaccggggccagagtgggagctgtgtagatgtgaatgagtgtctgactcccggggtctgtgcccatggaaagtgcaccaacctagaaggctccttcagatgctcttgtgagcagggctatgaggtcacctcagatgagaagggctgccaagatgtggatgagtgtgccagccgggcctcatgccccacaggcctctgcctcaacacggagggctccttcgcctgctctgcctgtgagaacgggtactgggtgaatgaagacggcactgcctgtgaagacctagatgagtgtgccttcccgggagtctgcccctccggagtctgcaccaacacggctggctccttctcctgcaaggactgcgatgggggctaccggcccagccccctgggtgactcctgtgaagatgtggatgaatgtgaagacccccagagcagctgcctgggaggcgagtgcaagaacactgtgggctcctaccagtgcctctgtccccagggcttccagctggccaatggcaccgtgtgtgaggatgtgaatgagtgcatgggggaggagcactgcgcaccccacggcgagtgcctcaacagccacgggtctttcttctgtctgtgcgcgcctggcttcgtcagcgcagaggggggcaccagctgccaggatgtggacgagtgtgccaccacagacccgtgtgtgggagggcactgtgtcaacaccgagggctccttcaactgtctatgtgagactggcttccagccctccccagagagtggagagtgtgtggatattgacgagtgtgaggactatggagacccggtgtgtggcacctggaagtgtgaaaacagccctggctcctaccgctgtgttctgggctgccagcctggcttccacatggccccgaacggagactgcattgacatagacgagtgcgccaacgacaccatgtgtggcagccacggcttctgtgacaacactgatggctccttccgctgcctctgtgaccagggcttcgagatctctccctcaggctgggactgtgtggatgtgaacgagtgtgagcttatgctggcggtatgtggggccgcgctctgtgagaacgtggagggctccttcctgtgcctctgtgccagtgacctggaggagtacgatgcccaggaggggcactgccgcccacggggggctggaggtcagagtatgtctgaggccccaacgggggaccatgccccggcccccacccgcatggactgctactccgggcagaagggccatgcgccctgctccagtgtcctgggccggaacaccacacaggctgaatgctgctgcacccagggcgctagctggggagatgcctgtgacctctgcccgtctgaggactcagctgaattcagcgagatctgccctagtggaaaaggctacattcctgtggaaggagcctggacgtttggacagaccatgtacacagatgcggatgagtgtgtgatattcgggcctggtctctgcccgaacggccggtgcctcaacaccgtgcctggttatgtctgcctgtgcaatcccggcttccactacgatgcttcccacaagaagtgtgaggatcacgatgagtgccaggacctggcctgtgagaatggcgagtgcgtcaacacggagggctccttccactgcttctgcagccccccgctcaccctggacctcagccagcagcgctgcatgaacagcaccagcagcacggaggacctccctgaccacgacatccacatggacatctgctggaaaaaagtcaccaatgatgtgtgcagcgaacccctgcgtgggcaccgcaccacctacacggaatgctgctgccaggacggcgaggcctggagccagcagtgtgctctgtgtcccccgaggagctctgaggtctatgctcagctgtgcaacgtggctcgcattgaggcagagcgggaggccggggtccacttccggccaggctatgagtatggccccgggcccgatgacctgcactacagcatctatggcccagatggggcccccttctacaactacctgggccccgaggacaccgtccctgagcctgccttccccaacacagccggtcactcagcggaccgcacacccatccttgagtctcctttgcagccctcagaactccagccccactacgtggccagccatccagagcccccagccggcttcgaagggcttcaggcggaggagtgcggcatcctgaacggctgtgagaatggccgctgtgtgcgcgtgcgggagggctacacctgtgactgttttgagggcttccagctggatgcggcccacatggcctgcgtagatgtgaatgagtgtgatgacttgaacgggcctgctgtgctctgtgtccatggttactgcgagaacacagagggctcctaccgctgccactgctccccgggatatgtggctgaggcagggcccccccactgcactgccaaggagtagcagtcaggggtcagtgtggcaactacctggaaatggcctccagtcacaggcaggggccttgaggatgatttcctagctgggaagacaccgtgacatcaggccagaggtttccaatcagccttgcctgctttcatctctcccagcttagcctctggctgtaagcttcggtcattgcctccatgcccttgcttggctcaagcaccaccaatcgctttaatgcttcagccaccgcatgaggccctgtccaccacctttcctggccttgctatgggatgcttaccaaaggatggccctcatccaccctcccaagctgtgcgagcatgcaaggccccatggcctcacactgcagacacccctttccagccacaatccaccatcatcctgacgatcccacaactgggacagaggctacatctgccctagggaggtccttcagaatctgtggagcaagaaaggatttggggaagcttggggactgactccagagccccctcctaagaaccatcaccaccactcagccaatctgttctgggccctgattttgccacacctccatcctgtagcccattctctgaccccaaggagtggcagaagatcccttcactcagagaagcaaggctgatattagcttgttgaatgtaagagacacaaatgaagaagaacaaagagcctgagaaagcagcaagaggacatgatgaaaaatacgtggagttgatgagaaaggggagccaaggctttatacgtctaaagaaaatattcagtagctgaatccgcccagtgatagcctgtgggcaccagcagcaagggctgccatgggatacagcacccatctacaaagacctctattacataaacactgcttcttacaggaaacaaacctcttctgggatctccttttgtgaaaaccagtttgatgtgctaaaagtaaaaagtctattttccagtgtggtcttgttcagaagcagccagatttccaatgttgtttttcccctccactcagaaacccctgccctttcccttcagaaaacgatggcaggcattcctctgagtttacaagcagagactcactccaacccaaactagctgggagttcagaaccatggtggaataaagaaatgtgcatctggtctcttctgttgtttttatttcatatcagattaaatttctttaccatgttggctaagtctaaatattagagatgaggctgtgcctactccctggccagctctgctgatagcctatgatgggttccaatgggaaatgactctttactattaaaagacaaggaaagctctgacttcgtacttctctgatgaatggcaatgtaaatgaacaaggctccatgtgactggagcatggaagtgaatgctactttcttaatttaatctgccctgtcctacctgctcctctgattgttagccatcacataacttattgaatgcttgccatgtgccaggcactgtgctgagtgccatacatacatttcatttaattatccaataatcctacttactattgtttattctcaatttacaggtgaggaaactgagacatagaaagcttaaataatttgctctaggtccctatactaattgagatgttttcagcagacaaaaataagtcactcttacgcatgtaaaaatattctttcactcataataaaagaaatgcaacttaaaaccatactgagatcctttttaaaactgtcagattggcaaagatcaaaaagcttgttaagactcctagctggcaagcatgtgggaaataggtactctcataacagctgacagaagtacatattgaagaggacaatatggcaatgtccttcaaaattataaaagcactaactctttgatccagtagtttccacttctaggaacttaaccttcagatatattttcaccagatataaaatgacatacgtaagaagttattactgcatcatttgtaatagctaaagattagaaacaattaattgctatggaacccttaaaaaaggtggctctaaattccttaagaaagatatccaaaacaaattaaggggaaaagggagggttgcataacagcatgtaacataacactatttgtctaaagaatggggaaagagaagcggttgtctgttcacctcatccttgccactccgccttatacctcaccatcggagaacttaccatcccccaaatatatcctgctggcactacaccttcgtaactgctgttcccactgcccccacaacactccaatctccaccttcctgccaaccttgagatattgtatgcatatatacatatttcctttgtttaaaatacaaatagcatactatgcatgctgttctgcactttgctttttttttatacttgcaattagagctgcctcatttcattttacagctgtatactattccattgaatggataaaccataatttatttaatcagtccctcactgacagacgtttccattgtttcctgtcttttgctataaataatgctgtaatgaatattcttgtgcatatttcacattaatttatgggattacatctgcaggataaattcttagaaccaatggtggtttgtggggagggtgacagggtggataggtacaggattgggagacttttcactgtatctccttttgtatttttttgaattttgtaccatatgtatcacctattcaaaaaaaataaaatatttttaaatacaaaaaaaaaaaaaaa

SEQ ID NO: 1581 - protein, 1821 aa, Homo sapiens
MRPRTKARSPGRALRNPWRGFLPLTLALFVGAGHAQRDPVGRYEPAGGDANRLRRPGGSYPAAAAAKVYSLFREQDAPVAGLQPVERAQPGWGSPRRPTEAEARRPSRAQQSRRVQPPAQTRRSTPLGQQQPAPRTRAAPALPRLGTPQRSGAAPPTPPRGRLTGRNVCGGQCCPGWTTANSTNHCIKPVCEPPCQNRGSCSRPQLCVCRSGFRGARCEEVIPDEEFDPQNSRLAPRRWAERSPNLRRSSAAGEGTLARAQPPAPQSPPAPQSPPAGTLSGLSQTHPSQQHVGLSRTVRLHPTATASSQLSSNALPPGPGLEQRDGTQQAVPLEHPSSPWGLNLTEKIKKIKIVFTPTICKQTCARGHCANSCERGDTTTLYSQGGHGHDPKSGFRIYFCQIPCLNGGRCIGRDECWCPANSTGKFCHLPIPQPDREPPGRGSRPRALLEAPLKQSTFTLPLSNQLASVNPSLVKVHIHHPPEASVQIHQVAQVRGGVEEALVENSVETRPPPWLPASPGHSLWDSNNIPARSGEPPRPLPPAAPRPRGLLGRCYLNTVNGQCANPLLELTTQEDCCGSVGAFWGVTLCAPCPPRPASPVIENGQLECPQGYKRLNLTHCQDINECLTLGLCKDAECVNTRGSYLCTCRPGLMLDPSRSRCVSDKAISMLQGLCYRSLGPGTCTLPLAQRITKQICCCSRVGKAWGSECEKCPLPGTEAFREICPAGHGYTYASSDIRLSMRKAEEEELARPPREQGQRSSGALPGPAERQPLRVVTDTWLEAGTIPDKGDSQAGQVTTSVTHAPAWVTGNATTPPMPEQGIAEIQEEQVTPSTDVLVTLSTPGIDRCAAGATNVCGPGTCVNLPDGYRCVCSPGYQLHPSQAYCTDDNECLRDPCKGKGRCINRVGSYSCFCYPGYTLATSGATQECQDINECEQPGVCSGGQCTNTEGSYHCECDQGYIMVRKGHCQDINECRHPGTCPDGRCVNSPGSYTCLACEEGYRGQSGSCVDVNECLTPGVCAHGKCTNLEGSFRCSCEQGYEVTSDEKGCQDVDECASRASCPTGLCLNTEGSFACSACENGYWVNEDGTACEDLDECAFPGVCPSGVCTNTAGSFSCKDCDGGYRPSPLGDSCEDVDECEDPQSSCLGGECKNTVGSYQCLCPQGFQLANGTVCEDVNECMGEEHCAPHGECLNSHGSFFCLCAPGFVSAEGGTSCQDVDECATTDPCVGGHCVNTEGSFNCLCETGFQPSPESGECVDIDECEDYGDPVCGTWKCENSPGSYRCVLGCQPGFHMAPNGDCIDIDECANDTMCGSHGFCDNTDGSFRCLCDQGFEISPSGWDCVDVNECELMLAVCGAALCENVEGSFLCLCASDLEEYDAQEGHCRPRGAGGQSMSEAPTGDHAPAPTRMDCYSGQKGHAPCSSVLGRNTTQAECCCTQGASWGDACDLCPSEDSAEFSEICPSGKGYIPVEGAWTFGQTMYTDADECVIFGPGLCPNGRCLNTVPGYVCLCNPGFHYDASHKKCEDHDECQDLACENGECVNTEGSFHCFCSPPLTLDLSQQRCMNSTSSTEDLPDHDIHMDICWKKVTNDVCSEPLRGHRTTYTECCCQDGEAWSQQCALCPPRSSEVYAQLCNVARIEAEREAGVHFRPGYEYGPGPDDLHYSIYGPDGAPFYNYLGPEDTVPEPAFPNTAGHSADRTPILESPLQPSELQPHYVASHPEPPAGFEGLQAEECGILNGCENGRCVRVREGYTCDCFEGFQLDAAHMACVDVNECDDLNGPAVLCVHGYCENTEGSYRCHCSPGYVAEAGPPHCTAKE

SEQ ID NO: 1582 - DNA, 5445 bp, Homo sapiens
gcggaaactccttggggaaagggcaatcccccgagccggttcccaggccgggtggagaccaactctggggtctgttggtgggagagtggggagcccgtcttctgctgagtgctgccgccccttcccaggacagcggaggtggaacttcgtcgcgctgcaacccccggctcgggatcctggggcgtcctttggcagtcgattgcaccctgcactagagagaagtccaggaatgatatattcttgggctgtatttctctaccctggagttcatccagttcatcccagaaacactgacctgattactgtgacaaagtctgatggatagaccctttctgttgaccttgtggcgtttttctttcatgtggaagttggaagacaaggtgaaaggggccaaaagttacctgctttggtgaataggagtgctctacttggttctcagaacatgggccctcgtttaaagctgcagctgtgatcctcggctgtctgttggcattgacgggacctgatgttttacgttattggtggaatcacagtgtctgtggttgcattcttcttcacaattaagttcctctttgagcttgccgcacgtgtagtcagcttcctccagaatgaggaccgcgagcgccgaggggaccggactatttatgactacgtgcggggaaattacctggatccccggtcttgcaaagtctcctgggattggaaggacccctatgaggtgggccacagcatggccttccgagtgcatttattctataagaacgggcagcctttccctgcacatcggcctgtgggactaagagttcacatctctcatgtcgagctagcagtggaaattccagtgacccaggaagtccttcaggagcccaattccaacgtagtaaaagtggccttcactgtgcgcaaggctgggcgttatgaaatcacagtgaagcttggtggattaaatgtggcatatagtccctactacaaaatttttcaacctggaatggtggttccttctaagaccaaaattgtgtgccacttttctactcttgtattgacctgtgggcagccgcacacccttcaaatagtaccccgagatgagtatgataatcccaccaacaattccatgtccttgagagatgagcacaattacaccttgtccattcatgagctcggccctcaagaagaagagagtactggtgtctcatttgagaaatcagtaacatccaacaggcagactttccaggtgttcttgcgactcaccctgcattctcgaggctgcttccatgcttgcatttcataccaaaatcagccaatcaataatggtgaatttgacattattgtcctaagtgaggatgagaagaatatcgtcgaacgcaatgtgtccacttcaggcgtgagcatttactttgaggcttatctttataatgctaccaactgtagcagcactccatggcacctgccacccatgcacatgacctcttcccagcgccggccatccactgctgttgacgaggaagatgaagactcgccctctgagtgccacacccctgagaaggtgaagaaaccgaagaaggtgtactgctatgtgtcaccaaagcaattctcagtgaaggagttctacctgaagatcatcccctggcgcctttacaccttccgagtgtgtccaggaacaaaattttcataccttggtcctgaccctgtccataagctgctcacactggtggtggatgatggcattcaacctcctgtggagctcagctgtaaggagaggaacattctagcagccacttttatccgctccctgcataagaacataggaggctctgagacctttcaggacaaggtgaactttttccagcgagagcttcggcaggtacatatgaaaagaccacattccaaagtcaccctgaaggtcagcagacatgccttgttggaatcgtctctgaaagccactcggaatttctccatctcagattggagcaagaactttgaggttgttttccaggatgaagaagctctggactggggagggcctcgccgggaatggtttgagctaatctgcaaagcactatttgataccaccaatcagctcttcacccggttcagtgacaacaaccaagcattagtgcatcccaaccctaatcgccccgctcatctgcgcctgaaaatgtatgagtttgcgggacggctcgtgggcaagtgtctctatgagtcctctctaggaggagcctacaagcagttggtccgagctcgcttcacccgctctttcctggcccaaatcataggactgcgtatgcattacaagtactttgaaacagatgacccagaattctacaaatctaaagtttgttttatcctcaacaatgacatgagtgagatggagctggtctttgcagaagagaaatataataaatcaggtcaattggataaggttgtagaactcatgacaggtggagctcaaactccagtcaccaatgcgaataaaatcttctatttaaatttgctggcccaatatcggctggccagtcaagtgaaagaggaggtggaacatttcctaaaaggcctgaatgaattggtccctgagaaccttttggctatttttgatgagaatgagcttgagctgctgatgtgtgggactggagacatcagtgtgtctgacttcaaagcccatgcagtagttgttggtggctcatggcatttcagagaaaaggtcatgaggtggttttggactgtggtttccagtctgacccaggaggagttggctcggctacttcagttcacaacaggctcctctcagctaccacctggaggctttgccgccctctgtccctcatttcagattattgccgctccgacccatagcacgctgcctactgcacacacatgttttaaccagctgtgcctccctacatatgactcctatgaagaggtgcacaggatgctgcagctggccatcagcgagggttgcgagggctttggcatgctctgaccactctcctgtcatccagttggctcccatgctctctggagcttctgggcgcaagttacagacatcataaccactgatcctaacacacataaccatcagccagaagatgccgcatgctcccctgtgtctggaggattttgtcacctacaagccttgtctttacctcacctgctccctgcccatatctaccacaggccactttggcatggtatgtaagctgagctcttcattctgtcatgagaagaggaccatgctgctatcatttatttggtcctttgaagatctcagtagctgagggagatggcacacggggctcagccctgttgggaaactggtgtggagacccttaaatccacactgtgctccaaaactccctctgctgatactccttggagacaccctctttggccctcactacttgaccagactggtacttgagtccttctcatgggtggggtgattgcctcttctcatcaggagccaggagagagggggacagataggaggtggcccataggagcagtcccgctgcacaatggtaggcataggccatggcactggactgcctctaaggactgctaaaaagaatatttttttgtggtgtcagaactggaaaaagcactttcccttcgggcatttctggaaatgattattaatccacaaagaagaactctgtaagctttttcttgaattgtagccagtgagaaaagcagatagactgaagaatatgaaggatagctgagctgtagcctccagagtggggcatgcctaggcatatggctggcttggagactactgatgcttttccctgagtttgttattggcactgaagtatggccggcttgggccactgacttccccattatgtagtctgctaaaagctggggatcctttagcattctactgaagaaaattttgtagcaaaagattagaacagtaagaatagtatgccagcaatccctgattctctctctgcttggtgttctctggcagcactaagacaaaggaacagggactaggagtttacgtgcttatcacaggtccttggcgtcaggacactagggatgaacatggaggtgatatgttacacagtaaacacctgccaacccctgtactcccctttgctccatcagttatcaggaaggagaactaaggagggaggaagcttattaggttcactgttgaatgatgattgaagagtacctgctgctgtatcttggaagatgacaacatcctttttcattactgtttgattgaaaataatttcaagattcaaaatctcattgacttcccaaatttgtgtttttaagaaggctttgctgcaagctaccattcccaatggggcagtcaactctgagaatattacaagccatctttattgccaaaaccagcaagtacacagagtcctgaaacaaggcaggactttggcaatgccttggcctcctggaagcatgtctgagccctcctgttcgcagggatcatgaggaacaagccctcctgagctgctacagttcctgcctgacctcagtctttcgcagtcatcatttgtcctttcttggcacatgggtgctgacctcactcatccttggggtccgggatccagcatcagggtctctataccccaggatcctccatgccacatggtcactgctctcctcagggaccaggacaaggtgctgctgcttgcccaaatgttttcccatgggatatgtaccggaaggtttatcaccaccctgggaaacataatgctgccccttgggcccagaaaggggtttccagctgggggcacgtggactggttctgctgtttttggcagtcgcttttctgaattctcccctccggcagccttccagagactgatcctggagattgagttgattgtcttggctagacctgtcattttaagctctagtcatagcactttttcagagcatcttaggcaccattgcaacccaaccagggaagctgcatccctgtggtggtccttaggcaccagtctttgttaaacaaaaccctttggcactattgtggttttctattctctgtctgaactctattcaaaagtatctttgctctcttgggccttttcttttactgttttgttttttttttttctaatcctgctttcatactagccagtgtggggaaaaggtacaatatgtcaaagagatgagagagtgttatttcttgggcaattttctattagtgtttcttattttggccagttcttttatttatgtccttgtgacccaggtacttggggggccagctacccttctggccttttagcgtctttgaaggagaccagacatgagtgaatacctaggagagtgtcagcatgtttctggaaaattggcagagaccaagccctgctgcagattcgtcaggccaggtgaaagggccaggcagttgcagctgatgatgtaaatattttgtacagtagataaataaatgtttaaaagaactaa

SEQ ID NO: 1583 - protein, 823 aa, Homo sapiens
MFYVIGGITVSVVAFFFTIKFLFELAARVVSFLQNEDRERRGDRTIYDYVRGNYLDPRSCKVSWDWKDPYEVGHSMAFRVHLFYKNGQPFPAHRPVGLRVHISHVELAVEIPVTQEVLQEPNSNVVKVAFTVRKAGRYEITVKLGGLNVAYSPYYKIFQPGMVVPSKTKIVCHFSTLVLTCGQPHTLQIVPRDEYDNPTNNSMSLRDEHNYTLSIHELGPQEEESTGVSFEKSVTSNRQTFQVFLRLTLHSRGCFHACISYQNQPINNGEFDIIVLSEDEKNIVERNVSTSGVSIYFEAYLYNATNCSSTPWHLPPMHMTSSQRRPSTAVDEEDEDSPSECHTPEKVKKPKKVYCYVSPKQFSVKEFYLKIIPWRLYTFRVCPGTKFSYLGPDPVHKLLTLVVDDGIQPPVELSCKERNILAATFIRSLHKNIGGSETFQDKVNFFQRELRQVHMKRPHSKVTLKVSRHALLESSLKATRNFSISDWSKNFEVVFQDEEALDWGGPRREWFELICKALFDTTNQLFTRFSDNNQALVHPNPNRPAHLRLKMYEFAGRLVGKCLYESSLGGAYKQLVRARFTRSFLAQIIGLRMHYKYFETDDPEFYKSKVCFILNNDMSEMELVFAEEKYNKSGQLDKVVELMTGGAQTPVTNANKIFYLNLLAQYRLASQVKEEVEHFLKGLNELVPENLLAIFDENELELLMCGTGDISVSDFKAHAVVVGGSWHFREKVMRWFWTVVSSLTQEELARLLQFTTGSSQLPPGGFAALCPSFQIIAAPTHSTLPTAHTCFNQLCLPTYDSYEEVHRMLQLAISEGCEGFGML

SEQ ID NO: 1584 - DNA, 2409 bp, Homo sapiens
gaagtattgcgccgttggtgattacggaagaaccaggagtttggcgtgaccatggggaagcaaaagaaaacaaggaagtatgcgaccatgaagcgaatgcttagtctcagagatcagaggcttaaagaaaaggatagattaaaacctaaaaagaaagaaaagaaggatcccagcgcattaaaggaaagagaagttccccaacacccttcctgcttatttttccaatataatacacagctgggcccaccttaccacatcctcgttgataccaactttatcaacttttccataaaagccaaactggacttagtgcagtcaatgatggactgtctgtatgccaagtgtatcccatgtataaccgattgtgtaatggctgaaattgagaaattggggcagaagtatcgagtggctctaaggattgccaaggatccaagatttgaacgattaccatgtacacacaaaggaacctatgcagatgactgcttagtacagagagtaactcagcataagtgttacattgtggccacagttgaccgggacctgaaaagaagaatccgtaagattcctggagttcctatcatgtacatttctaaccatagatacaacattgaacggatgccagatgattatggagcccctcgattctaattcttacaagacacagttcctctgcctttcttcgaccaactttctcttgttgccagttcattacacaaaatgtagcgggatttttaaggaatcagagagactgatggagttcagggagatatttattatttaggtgcaccagcccagtcagattaacatccaaaggactgaaccctgaacagagttaagttaccttttaagcattttgtggggccgcgggggttggggggaatctgtgcagggggaagcatattacagaagcaagaaagacagttattcaattaactgagacatgcattacatcatttcttacttttcaaggaaaatcatgttttacgacttgagtttatctgtctagttaccttgcagctgcacagctagagaaacagggtatttacaatgcctgggaaaggaggagagataaggctcactagccacagaaaaacaggcagttaatttttaaaggactccagctctttctctttctcacggggaattggattttcttacatgcaactgaatttctgcttacacatttttaaatttcttttaattgcttttccaatgcaatagcatgaattattattctgttgacctatttgccttactatgagctgagggtagttcaatatgctcactcttttttttttttttcttgagatgaagttttgctctgtcaccaggctggagtgcagtggcgtgatctgggctcactgcaacccctgcctcccatccttcaagtgattctcctgcctcagcctcccgagtagctgggattacaggtacacaccaccatgctcaactaatttttcttttttgggcggggggggtggatatttttagtagagacaaatacttttgtatttttaatacagaaaagtatgcctcggcctcccaaagtgctggaattacagacatgagccactgtgcctggcctgctcactttctgatgctgcttttttgttgtttgtttgtttatttgtttgttttgagacggagtctcgctctgtcaccaggctggagtgcagtggcgcaatctcggctcattgcaacctccgcctcccaggttcaagcgattctcctgcctcagcctgcggagtagctgggactataggtgcgtgccaccacgtccagccactgatgctgttttgccactgatgctgttttgaaattgatattttgtctcataaaaactaggccaggcatggtggctcattcctgtaatcccagcactttgggaggccaaggtgggtggatcacctgaggtcaggagttggagatgagcctggacaacatggcaaaaccccacctctactaaaaatacaaaaaaaattagctgggtatggtgtcacgtgcctgtaatcccagccactggggaggctgaggcaggagaacctcttgaacccaggaggtggaggttgcagtgagctgagattgcgccactgcattccagcctgggtgacagagtgagactgtctcaaaaaaaaaaaaaaattaatgatggtcaaagggtataaaatctcagacaggaagaatatgttttatgctttttttgagttctgttgtacagtgtggtgcctatacttaataatggggtattatacatttcaaaattgatgttctcatcacagaaatgtatttgaagtattgcatatgttaactagcttgatttaactattccatattgtatccacaatttatgatatcactttgtaacccatacatttatacaattataaattgtcaatttacaataaaaaa

SEQ ID NO: 1585 - protein, 198 aa, Homo sapiens
MGKQKKTRKYATMKRMLSLRDQRLKEKDRLKPKKKEKKDPSALKEREVPQHPSCLFFQYNTQLGPPYHILVDTNFINFSIKAKLDLVQSMMDCLYAKCIPCITDCVMAEIEKLGQKYRVALRIAKDPRFERLPCTHKGTYADDCLVQRVTQHKCYIVATVDRDLKRRIRKIPGVPIMYISNHRYNIERMPDDYGAPRF

SEQ ID NO: 1586 - DNA, 7158 bp, Homo sapiens
cttcccggtcgcgggcccagctcgggagcgccggcgcactggcgcgctccgtttacacgctccggggcctgtaggcgccgcgagttccggctgtcgccgtcgccgccgcggctcctggaggtcggttgcgacgagtaacggcgccaggacgagccctgcgccttctttttcgatatgtacccgaattggggccggtatggcgggagcagccactatccgccgccaccggtcccaccgccgccgccagtggcgcttcctgaggcctcgccggggcccgggtactcgagctcgacgactcccgcggccccctcctcctcgggcttcatgagcttccgcgaacagcacttggcgcagctccagcagctgcagcagatgcaccagaagcaaatgcagtgcgtgcttcagccccaccaccttcctccgccccctctgccgcccccgccagtgatgccggggggcggctacggagactggcagccgccaccgccaccgatgcccccgccacccgggccggccctcagctatcagaagcagcagcagtacaaacaccagatgctccaccaccaacgagacgggcctcctggtttggttccaatggagctggaatccccccctgaatctccccctgtgccgcctgggtcctatatgcccccatctcagtcttacatgcccccacctcagccgccaccctcttactaccccccgacctcatctcagccctacctgcctcctgctcagccgtccccttcgcagtccccaccttcccaatcctacctggcgcccaccccttcttactcatcctcctcctcttcctcgcaatcctatttgagccattcccagtcctacttgccctcttctcaggcatctccttcccgcccctcccagggccattctaaatcccaactactagctccaccaccaccgtccgccccccctggaaataagacaactgtccagcaagagcctttggagagtggggccaaaaacaagagtactgaacagcagcaagccgcccctgagccagatccctctacgatgactccacaggaacagcagcagtattggtatcgacagcacttgcttagtttgcaacagaggacaaaagttcatttgccaggacacaaaaagggtcctgtggtagcaaaggatacaccagagccggtaaaagaagaagttacagtacctgccaccagtcaagttccagaatctccttcttctgaggagcccccattgccacctccaaatgaggaagtgccacctcctctcccacctgaggaaccccagtctgaggacccagaagaagatgccaggttaaagcagttgcaggctgcagcagcacactggcagcagcaccagcagcatcgagtcggtttccagtatcagggaataatgcagaagcacactcagttacagcagattctacaacagtatcagcagattatacagcccccaccacatatacagaccatgtctgtagatatgcagctgcggcattatgagatgcagcagcaacagtttcaacatctttaccaagaatgggagcgagagtttcagctatgggaggaacaactccattcctatcctcataaagatcagcttcaggagtatgagaagcagtggaaaacatggcagggacatatgaaagccactcagagctatctccaggagaaagtcaattcatttcagaacatgaagaaccagtatatggggaacatgtcaatgccacctccttttgttccatattctcagatgcctccacctctacctacaatgccccctccagtgttgcctccttcattgccaccaccagtgatgccccctgccctccctgctacagtgccaccacctggcatgcccccacctgttatgccaccttctctaccaacctctgttcccccaccagggatgcctccttctctctcttctgcagggccaccaccagttctccccccaccttccctgtcttctgcagggccaccaccagttcttcccccaccatctctctcttcaacagcacctccacctgtcatgcccctcccaccattgtcttcagctacacctcctccaggaatacctccccctggagttccacaagggatacctcctcagttaacagcagccccagttccaccagcctccagttcacagagctcgcaagttccagagaaacctagaccagcactgcttcctactcctgtgtcttttggttctgccccaccgacaacttaccatcctccgttgcaatcagctggtccatcagaacaagtgaattcaaaagctcctttgagcaagtctgctctgccatacagttcattctcatctgatcaaggacttggggagtcttcagctgctccatctcagccaatcactgcagtgaaggacatgccagtgagatcaggtggcctgcttccagatcctcctagaagtagttacttggaaagtccaagaggcccaagatttgatggtcctcgaagatttgaggatttagggtcaaggtgtgaaggaccgagacccaaagggcctcgttttgaaggaaatcgccccgatgggccaagacccagatatgaaggtcacccagcagagggcactaaaagcaagtggggaatgattccccgggggccagcatctcaattttatattacccccagtacatccctaagtcctcgacagagtggaccacagtggaaaggccccaaaccagcttttggacagcagcatcagcagcaacctaagtcacaagcagaacctctttcaggaaacaaagaaccattagcagacaccagtagtaaccagcagaagaattttaaaatgcaatcagctgcattttccattgctgcagatgtaaaggatgtcaaggcggctcagtcaaatgagaatctaagcgactctcaacaagagccacctaaaagtgaagtctcggaagggcccgtagagccctctaattgggaccagaatgttcaaagtatggagactcaaatcgacaaagcccaagctgttactcagcctgtaccccttgcgaataagcctgtacctgctcaatctacttttccttcaaaaacaggggggatggagggaggaacagcagtagcaacatcatcattaacagcagataatgattttaaacctgtgggtattggtctaccccattcagaaaacaaccaagataaaggcctgcctcggccagataatagagataatagattagaaggcaatagaggcaacagctcatcttacagaggtcctgggcaaagcagaatggaagacacacgggataaaggtctagtaaacagaggtcgcggccaggcaatcagtcgaggcccaggattggtcaagcaagaagactttcgggataagatgatgggtagaagagaagatagtcgagagaagatgaacagaggagaaggtagccgggacagagggttggtgaggcctggaagcagtcgggagaaagtgccaggtggtcttcaagggagccaggacaggggtgcagctggcagccgagaaaggggaccacctcggagggctggcagtcaggagaggggacctcttcgaagggctgggagtagagagagaataccaccccgaagagctgggagcagggagagaggaccacctcgagggcctggcagtcgagaaaggggactgggaagatcagattttggtcgtgatagaggtccattcagaccagaaccaggagatggtggggaaaaaatgtatccatatcaccgggatgagcctcctagggctccatggaaccatggagaagagcgagggcatgaagagtttccattagatggtagaaatgctccaatggaacgagaaagactcgatgactgggatagagagagatactggagagaatgtgaacgtgactatcaagatgatacactagagctctataacagagaggacaggttctcagcaccaccatctcggtctcatgatggagataggcgaggcccttggtgggatgattgggagagagaccaggatatggatgaggactacaatagggaaatggaaagggacatggacagggatgtggatcggatttcaagacctatggatatgtatgatagaagtttggataatgagtgggacagagattatgggagaccactggatgaacaagaatcacagtttcgtgaacgggatattccatctcttccacctttaccgcccctcccacctcttccacctttggatagatatcgggatgatagatggagagaagaaagaaatcgagagcatgggtatgatcgagatttccgtgataggggtgagttgaggattcgagagtatccagaaagaggagatacatggcgggaaaagcgagattatgttcctgacagaatggactgggaaagagaacggttgtcagacagatggtacccatctgatgtggatagacattcccccatggcggaacatatgccctcctcacatcattcctcagaaatgatggggtccgatgcaagcttagactctgaccaaggccttggaggggtaatggttctcagtcagaggcagcatgaaatcattttgaaagctgcacaagaactgaaaatgcttcgggaacagaaagaacagcttcaaaagatgaaagacttcgggtctgagccacagatggctgaccatctaccacctcaggaatcaagattgcagaatacatcttcaagacctggaatgtatccgcctccagggtcgtatagacctccccctcctatgggcaaaccaccaggttcaattgtaagaccctctgctccaccagcaagatcatctgttcctgtgaccaggccacctgtcccaataccaccacctccacctcctccacctctacctcctcctcctccagtgataaagccacaaacttcagctgtagaacaggaacgatgggatgaagattctttctatgggctctgggatacaaatgatgaacaaggactgaattcagaatttaagtcagaaactgcagcaattccatctgctccagtattaccacccccacctgttcactcttccattccccctcctggcccagtgcctatgggtatgccaccaatgtccaagccaccaccagtacaacagactgttgattatggccatggccgagatatatccactaataaagttgaacagataccttatggagaaagaataactctacgcccagatccactacctgaaagatcaacttttgagacagagcatgcaggccaacgtgatcgttatgatagagaaagagatcgtgagccttattttgatcgtcaaagtaatgtcatagcagatcatcgagattttaaaagggatcgtgagacacatagagatcgagaccgggatcgtggtgttattgactatgaccgggatcgatttgacagagaacgccgaccccgagatgatagagctcagtcatatcgagacaaaaaagaccattcctcatccagaagagggggttttgataggccatcctatgaccggaagtctgaccgaccagtctatgaaggaccatccatgtttggaggagaacgaaggacttatcctgaggagcgaatgcctctgccagctccttcactgagccaccagcctcctccagctccacgagtcgagaagaagcctgaatcaaagaatgtggacgatattttgaaaccaccgggccgggagagcagacctgagagaattgttgttataatgagaggattacctggcagtggaaagacacatgttgcaaaacttattcgagataaggaggtagaatttggaggacctgcacccagagttctaagcctggatgattacttcatcactgaagtggaaaaagaagaaaaagatccagattctggaaagaaagtgaaaaagaaggtaatggaatatgaatatgaagctgagatggaggagacttaccgcaccagcatgttcaaaactttcaaaaagactctggatgatggcttttttcccttcatcatcctggatgccatcaatgacagagttaggcattttgaccagttttggagtgcagcaaaaaccaagggatttgaggtatatttggctgaaatgagtgcagataaccagacttgtggcaagagaaatattcatggaagaaagcttaaagaaataaataagatggctgatcactgggaaactgcacctcgtcacatgatgcgtctagatattcgttctttgctgcaagatgctgctattgaagaggtagagatggaagattttgatgcaaatatcgaagaacagaaagaagaaaagaaagatgcagaggaagaggaaagcgaactgggttacattccgaaaagcaaatgggagatggacacatctgaggcaaagctagacaagttggatggcttgaggactggtactaaaaggaaacgtgactgggaggccattgccagcagaatggaggattatcttcagctccccgatgattatgatactcgtgcttctgagcctgggaagaagagggtcagatgggcagacctggaagagaagaaggatgcagataggaaaagggccataggttttgtggtcggacagactgattgggagaagatcacagatgaaagtggtcacctggctgaaaaagccctcaatcgaaccaaatatatatgagacttagtttttgaacggagtcattattcctctaaggtggttcgctttgaggtggtctgaagccaaggcctcgcggagcttctttgtgtgtcaccttgcttccacgtttcagttcttgttttgtttctactgctttagttttttttaaagttctccagtgtccccaagaggtattagaatcttgctgtacccaagcaagacgttaatttttcttttaactgttttggggagggagggagtgatagcttaactgctgaagccaggcgggggtctgctggaggattccaacagagagtatttcctccactgtacaatgtcacagactatctctatcatcattgctttgtggctgtttctgttttttactgtatgtaactggtagctgattgtactaggattaaaaacaataaactttcatgataaagccgatgagattcatgggctatacagcatgggcccttttctcttgttttcttaattttatttttaattgctttttaaatatggtatgtcctaattaaatgctagctgaacatcccaaaa

SEQ ID NO: 1587 - protein, 2146 aa, Homo sapiens
MYPNWGRYGGSSHYPPPPVPPPPPVALPEASPGPGYSSSTTPAAPSSSGFMSFREQHLAQLQQLQQMHQKQMQCVLQPHHLPPPPLPPPPVMPGGGYGDWQPPPPPMPPPPGPALSYQKQQQYKHQMLHHQRDGPPGLVPMELESPPESPPVPPGSYMPPSQSYMPPPQPPPSYYPPTSSQPYLPPAQPSPSQSPPSQSYLAPTPSYSSSSSSSQSYLSHSQSYLPSSQASPSRPSQGHSKSQLLAPPPPSAPPGNKTTVQQEPLESGAKNKSTEQQQAAPEPDPSTMTPQEQQQYWYRQHLLSLQQRTKVHLPGHKKGPVVAKDTPEPVKEEVTVPATSQVPESPSSEEPPLPPPNEEVPPPLPPEEPQSEDPEEDARLKQLQAAAAHWQQHQQHRVGFQYQGIMQKHTQLQQILQQYQQIIQPPPHIQTMSVDMQLRHYEMQQQQFQHLYQEWEREFQLWEEQLHSYPHKDQLQEYEKQWKTWQGHMKATQSYLQEKVNSFQNMKNQYMGNMSMPPPFVPYSQMPPPLPTMPPPVLPPSLPPPVMPPALPATVPPPGMPPPVMPPSLPTSVPPPGMPPSLSSAGPPPVLPPPSLSSAGPPPVLPPPSLSSTAPPPVMPLPPLSSATPPPGIPPPGVPQGIPPQLTAAPVPPASSSQSSQVPEKPRPALLPTPVSFGSAPPTTYHPPLQSAGPSEQVNSKAPLSKSALPYSSFSSDQGLGESSAAPSQPITAVKDMPVRSGGLLPDPPRSSYLESPRGPRFDGPRRFEDLGSRCEGPRPKGPRFEGNRPDGPRPRYEGHPAEGTKSKWGMIPRGPASQFYITPSTSLSPRQSGPQWKGPKPAFGQQHQQQPKSQAEPLSGNKEPLADTSSNQQKNFKMQSAAFSIAADVKDVKAAQSNENLSDSQQEPPKSEVSEGPVEPSNWDQNVQSMETQIDKAQAVTQPVPLANKPVPAQSTFPSKTGGMEGGTAVATSSLTADNDFKPVGIGLPHSENNQDKGLPRPDNRDNRLEGNRGNSSSYRGPGQSRMEDTRDKGLVNRGRGQAISRGPGLVKQEDFRDKMMGRREDSREKMNRGEGSRDRGLVRPGSSREKVPGGLQGSQDRGAAGSRERGPPRRAGSQERGPLRRAGSRERIPPRRAGSRERGPPRGPGSRERGLGRSDFGRDRGPFRPEPGDGGEKMYPYHRDEPPRAPWNHGEERGHEEFPLDGRNAPMERERLDDWDRERYWRECERDYQDDTLELYNREDRFSAPPSRSHDGDRRGPWWDDWERDQDMDEDYNREMERDMDRDVDRISRPMDMYDRSLDNEWDRDYGRPLDEQESQFRERDIPSLPPLPPLPPLPPLDRYRDDRWREERNREHGYDRDFRDRGELRIREYPERGDTWREKRDYVPDRMDWERERLSDRWYPSDVDRHSPMAEHMPSSHHSSEMMGSDASLDSDQGLGGVMVLSQRQHEIILKAAQELKMLREQKEQLQKMKDFGSEPQMADHLPPQESRLQNTSSRPGMYPPPGSYRPPPPMGKPPGSIVRPSAPPARSSVPVTRPPVPIPPPPPPPPLPPPPPVIKPQTSAVEQERWDEDSFYGLWDTNDEQGLNSEFKSETAAIPSAPVLPPPPVHSSIPPPGPVPMGMPPMSKPPPVQQTVDYGHGRDISTNKVEQIPYGERITLRPDPLPERSTFETEHAGQRDRYDRERDREPYFDRQSNVIADHRDFKRDRETHRDRDRDRGVIDYDRDRFDRERRPRDDRAQSYRDKKDHSSSRRGGFDRPSYDRKSDRPVYEGPSMFGGERRTYPEERMPLPAPSLSHQPPPAPRVEKKPESKNVDDILKPPGRESRPERIVVIMRGLPGSGKTHVAKLIRDKEVEFGGPAPRVLSLDDYFITEVEKEEKDPDSGKKVKKKVMEYEYEAEMEETYRTSMFKTFKKTLDDGFFPFIILDAINDRVRHFDQFWSAAKTKGFEVYLAEMSADNQTCGKRNIHGRKLKEINKMADHWETAPRHMMRLDIRSLLQDAAIEEVEMEDFDANIEEQKEEKKDAEEEESELGYIPKSKWEMDTSEAKLDKLDGLRTGTKRKRDWEAIASRMEDYLQLPDDYDTRASEPGKKRVRWADLEEKKDADRKRAIGFVVGQTDWEKITDESGHLAEKALNRTKYI

SEQ ID NO: 1588 - DNA, 1779 bp, Homo sapiens
atggatccaaactccatcttgctttctcctcagccccagatctgctcccacctagcagaagcttgtacggaaggcgagagaagctcatcccctccagagctggatagagactccccgtttccctggagtcaggtccccagctccagccctacagaccccgaatggtttggtgatgagcacatccaggcaaagagggccagagtggagaccattgtccgaggcatgtgtctctccccgaatcctctggtgccaggcaatgcgcaagctggggtcagcccacgctgcccaaagaaggcccgagagaggaagaggaagcagaaccttcccacaccgcaaggcctcctgatgccagcccctgcctgggaccagggcaacaggaaggggggccctcgtgtgagagaacaacttcatctgctgaagcaacagctaagacatctgcaagagcacatcctacaggctgccaagcccagggacacagctcaggggccaggaggctgtggcacggggaaaggccctctgagtgcaaagcaggggaatggctgtgggcctcgcccctgggttgtggacggtgaccaccagcaaggtaccagcaaggacctctctggggcagaaaaacaccaagagtctgagaagcccagtttccttccttctggagcaccagcttcactagagattctgaggaaagagctgaccagggcagtgtcccaggctgtggactcggtattacaaaaggtactattggatccaccaggccacctgactcagctgggcagaagcttccaggggcaggtggcagagggtagaagcgagccctcacctcctgtgggaggggcctgtaaagatccacttgctttggctgccttgcccaggagggtccagctacaagctggggtcccagtaggaaatttatcactggccaagcgtctagattctcctaggtaccctatccctccaagaatgacccccaaaccctgtcaggatcccccagcaaactttcccttgactgcaccttcccacatccaggaaaatcagattcttagccagctactgggtcatagatacaacaatggccattggagtagcagtcctccccaggactcatcttcccagaggcacccctcctcagagcctgccctacgaccttggagaactactaagccgcaaccattggtcctgagccagcagcagtgtcccttgcctttcacctctgcccatctggaaagtctaccccttcttccctcggtgaagatggaacagagaggcctgcatgctgtcatggaggcactgcctttctctttgttgcatatccaggagggtctaaaccctggtcacttgaagaaggccaaactaatgtttttcttcacacgatatcccagctccaacctcctgaaggtttattttcctgatgttcagttcaaccgctgcattacctcccagatgatcaagtggttcagcaactttcgtgagttttattacatccaaatggaaaaatctgcccggcaagcaatttcagatggtgtcacaaatcccaaaatgctggtggttctccgcaattcagaactttttcaagctctcaatatgcactacaacaagggaaatgactttgaggttccagattgcttcttggaaattgccagcttgacgttacaggagttcttcagggctgtctccgcagggagagactcagatccttcctggaagaaacccatttataaaattatttcgaaactggacagtgacatcccagagatattcaaatcttccagctatccccagtag

SEQ ID NO: 1589 - protein, 592 aa, Homo sapiens
MDPNSILLSPQPQICSHLAEACTEGERSSSPPELDRDSPFPWSQVPSSSPTDPEWFGDEHIQAKRARVETIVRGMCLSPNPLVPGNAQAGVSPRCPKKARERKRKQNLPTPQGLLMPAPAWDQGNRKGGPRVREQLHLLKQQLRHLQEHILQAAKPRDTAQGPGGCGTGKGPLSAKQGNGCGPRPWVVDGDHQQGTSKDLSGAEKHQESEKPSFLPSGAPASLEILRKELTRAVSQAVDSVLQKVLLDPPGHLTQLGRSFQGQVAEGRSEPSPPVGGACKDPLALAALPRRVQLQAGVPVGNLSLAKRLDSPRYPIPPRMTPKPCQDPPANFPLTAPSHIQENQILSQLLGHRYNNGHWSSSPPQDSSSQRHPSSEPALRPWRTTKPQPLVLSQQQCPLPFTSAHLESLPLLPSVKMEQRGLHAVMEALPFSLLHIQEGLNPGHLKKAKLMFFFTRYPSSNLLKVYFPDVQFNRCITSQMIKWFSNFREFYYIQMEKSARQAISDGVTNPKMLVVLRNSELFQALNMHYNKGNDFEVPDCFLEIASLTLQEFFRAVSAGRDSDPSWKKPIYKIISKLDSDIPEIFKSSSYPQ

SEQ ID NO: 1590 - DNA, 6148 bp, Homo sapiens
caggactggagggcttgaggaatgtggtggtccctctcttcgttgtttctgccccctgaggttgtgctttctcagggatatgcactctgcacttccattcctgcagtgaaattaactcgagcttggcagctcgagaggagaatgtggccactttccgaggctcagagtatctgtgctacgacctgtctcagaacccgatccagagcagcagtgatgaaatcaccctctcctttaagacctggcagcgtaacggcctcatcctgcacacgggcaagtcggctgactatgtcaacctggctctgaaggatggtgcggtctccttggtcattaacctggggtccggggcctttgaggccattgtggagccagtgaatggaaaattcaacgacaacgcctggcatgatgtcaaagtgacacgcaacctccggcaggtgacaatctctgtggatggcattcttaccacgacgggctacactcaagaggactataccatgctgggctcggacgacttcttctatgtaggaggaagcccaagtaccgctgacttgcctggctcccctgtcagcaacaacttcatgggctgccttaaagaggttgtttataagaataatgacatccgtctggagctgtctcgcctggcccggattgcggacaccaagatgaaaatctatggcgaagttgtgtttaagtgtgagaatgtggccacactggaccccatcaactttgagaccccagaggcttacatcagcttgcccaagtggaacactaaacgtatgggctccatctcctttgacttccgcaccacagagcccaatggcctgatcctcttcactcatggaaagccccaagagaggaaggatgctcggagccagaagaatacaaaagtagacttctttgccgtggaactcctcgatggcaacctgtacttgctgcttgacatgggctctggcaccatcaaagtgaaagccactcagaagaaagccaatgatggggaatggtaccatgtggacattcagcgagatggcagatcaggtactatatcagtgaacagcaggcgcacgccattcaccgccagtggggagagcgagatcctggacctggaaggagacatgtacctgggagggctgccggagaaccgtgctggccttattctccccaccgagctgtggactgccatgctcaactatggctacgtgggctgcatccgcgacctattcattgatgggcgcagcaagaacattcgacagctggcagagatgcagaatgctgcgggtgtcaagtcctcctgttcacggatgagtgccaagcagtgtgacagctacccctgcaagaataatgctgtgtgcaaggacggctggaaccgcttcatctgcgactgcaccggcaccggatactggggaagaacctgcgaaagggaggcatccatcctgagctatgatggtagcatgtacatgaagatcatcatgcccatggtcatgcatactgaggcagaggatgtgtccttccgcttcatgtcccagcgagcttatgggctgctggtggctacgacctccagggactctgccgacaccctgcgtctggagctggatggggggcgtgtcaagctcatggttaacttagactgtatcaggataaactgtaactccagcaaaggaccagagaccttgtatgcagggcagaagctcaatgacaacgagtggcacaccgttcgggtggtgcggagaggaaaaagccttaagttaaccgtggatgatgatgtggctgagggtacaatggtgggagaccatacccgtttggagttccacaacattgaaacgggaatcatgactgagaaacgctacatctccgttgtcccctccagctttattggccatctgcagagcctcatgtttaatggccttctctacattgacttgtgcaaaaatggtgacattgattattgtgagctgaaggctcgttttggactgaggaacatcatcgctgaccctgtcacctttaagaccaagagcagctacctgagccttgccactcttcaggcttacacctccatgcacctcttcttccagttcaagaccacctcaccagatggcttcattctcttcaatagtggtgatggcaatgacttcattgcagtcgagcttgtcaaggggtatatacactacgtttttgacctcggaaacggtcccaatgtgatcaaaggcaacagtgaccgccccctgaatgacaaccagtggcacaatgtcgtcatcactcgggacaatagtaacactcatagcctgaaagtggacaccaaagtggtcactcaggttatcaatggtgccaaaaatctggatttgaaaggtgatctctatatggctggtctggcccaaggcatgtacagcaacctcccaaagctcgtggcctctcgagatggctttcagggctgtctagcatcagtggacttgaatggacgcctgccagacctcatcaatgatgctcttcatcggagcggacagatcgagcgtggctgtgaaggacccagtaccacctgccaggaagattcatgtgccaaccagggggtctgcatgcaacaatgggagggcttcacctgtgattgttctatgacctcttattctggaaaccagtgcaatgatcctggcgctacgtacatctttgggaaaagtggtgggcttatcctctacacctggccagccaatgacaggcccagcacgcggtctgaccgccttgccgtgggcttcagcaccactgtgaaggatggcatcttggtccgcatcgacagtgctccaggacttggtgacttcctccagcttcacatagaacaggggaaaattggagttgtcttcaacattggcacagttgacatctccatcaaagaggagagaacccctgtaaatgacggcaaataccatgtggtacgcttcaccaggaacggcggcaacgccaccctgcaggtggacaactggccagtgaatgaacattatcctacaggccggcagttaaccatcttcaacactcaggcgcaaatagccattggtggaaaggacaaaggacgcctcttccaaggccaactctctgggctctattatgatggtttgaaagtactgaacatggcggctgagaacaaccccaatattaaaatcaatggaagtgttcggctggttggagaagtcccatcaattttgggaacaacacagacgacctccatgccaccagaaatgtctactactgtcatggaaaccactactacaatggcgactaccacaacccgtaagaatcgctctacagccagcattcagccaacatcagatgatcttgtttcatctgctgaatgttcaagtgatgatgaagactttgttgaatgtgagccgagtacagcaaaccccacggagccgggaatcagacgggttccgggggcctcagaggtgatccgggagtcgagcagcacaacagggatggtcgtcggcattgtggctgctgccgccctctgcatcttgatcctcctgtacgccatgtacaagtacaggaacagggacgaggggtcctatcaagtggacgagacgcggaactacatcagcaactccgcccagagcaacggcacgctcatgaaggagaagcagcagagctcgaagagcggccacaagaaacagaaaaacaaggacagggagtattacgtgtaaacatgcgaacactgctcacacgcgagttttcacagttatttctatccacgcctatgaatctttggacggtgagatctcacagatgtcagaactgctggaactatgaaatggggtatataaccacgactctggtggggaaaaccgttttttaaaggacacacacacacacagcgatgcatctctctctaaagctcagccacggctgcggcaaggtcccagcggtcgctgggagacagaaggttttgtgccctgctgtatcataaagcacacacttagcgctctggagccggacggtggctccaccacttccgcaggcctggaaacttccttctccggaggaccttttactaaaaggtagaagacttcatggcttacttgttccataactccaagtgagtctgtaatgtttgtgaagcttgactgtaaccatgttttttctgtttaattatgtaaaaaacaaaactacaacaacaaaaaaagaaaaaagttaaaaaagaaaaaaacaccaaaaaacaaaaacaaacaaaaaaaaaaacccacaacccttatctggttctgaccagtgtgcgtgtaactttatgatctgaggggaaaaatggcttttgggtttttgtttatttttttgataatgactggacatcagaagaggaaaaaaactcaaaacaaaagcgagagagactattgccatatgaactcaaaagctatcatggtgttcactctacatatcaggttatggtgtctctagaatctgttgtttgtttcctataagatgctttgctgaacacatagcaaaattcatgtgacggatgataaattgattcgaaaagctggtcccccaggatctaatttcagaatttaccacccaaacccggaacagatgggtttagggctggtgttatcagagctattggctttacgtaacaatattgttcctgtccattcacccagccaaattgtgttaaagaggaaagccccacaaactaaaacagcctttcctagggaagaggaaggggaggtgggctggatctgtgactgattgaaatgcatgcaaataaaaaagacaatattaaagtctgttatcaaaccagacagtaggggagttcaactcgtgatggaaccacaaaaggtcacacaagccaaccatgtcatgccagagtacaaaacacatagttctttccccgccccgaatgtgacaatggttttcatagtggtttaattttgtagcctgacatttatggataactctgtccttccatttgctcacttctctcttcacccatcttttttaaaaacaaataaatgaataaagctgctgtgacacacacacaaaaggaatttaatagtataatatatatataaataaatatatatacagatatatttatcatggtatgtttgatgggatgactgacacaggaaatctgttaaagtcttaaaatggaatgagaatgttgttttaaaagaaaatagcaaaacaacaaaaaagcaaaccttaaaatgtgaagaaagtgtgaattttagttttgtcacagttaactgtgtcaaagagaattaaaaaaaaaaacttcagattttgtttacatattttactacatttttgctggtataattccttagccacctatgtacatactgctttaagaaatgtttttttcctgtttatttctgtttggtttatattctggttgtctttttctttttgtaaagaggaaacaatgtacagaaaaacaataaactggttgtatggccatagctatccgaaaagcaagagacaaagcaagacaaatattcacacaaaaatgaagtgtgtcctctggagggtcatatatacaatttcttttgtacagatgaaaatcaatcagctgcttagatttagaaatctactcttgctggtctttgtaagttgcatgaatatttgactttgaaaaaatatcttaacgacatggggcaaaaagtgcaatctaaatggtagcctttactaatgtgtgtggaaagaggtgttcctcattatctaatatttcaatgtgttaagagtttaatttttttgttatcattaaaaaagacaggattataaagagatatcaaagcacgattttagataacctaaacggcccagcctatacgaagttgattatatctcgatgtctgtaaaagattgctgttcttggagtcttgaggtcttgtgaattgatttcctgctttctttcatttttttcaatttaagtaataatacatttgttatattcctttcagtgtaagtttctatttggacaattttatgggaacatgtgcattctctatgtgagcttctatcatattcctgttttattagcagaacctaaaggaatttatttaatgatgttgtgacattactgctttttcttttttcttttcttagttcatatttgcattttcgttcaaggatatgcttagcaataaaatgttcttcccaaaaaaaaaaaaaaaaaaaa

SEQ ID NO: 1591 - protein, 1061 aa, Homo sapiens
MLGSDDFFYVGGSPSTADLPGSPVSNNFMGCLKEVVYKNNDIRLELSRLARIADTKMKIYGEVVFKCENVATLDPINFETPEAYISLPKWNTKRMGSISFDFRTTEPNGLILFTHGKPQERKDARSQKNTKVDFFAVELLDGNLYLLLDMGSGTIKVKATQKKANDGEWYHVDIQRDGRSGTISVNSRRTPFTASGESEILDLEGDMYLGGLPENRAGLILPTELWTAMLNYGYVGCIRDLFIDGRSKNIRQLAEMQNAAGVKSSCSRMSAKQCDSYPCKNNAVCKDGWNRFICDCTGTGYWGRTCEREASILSYDGSMYMKIIMPMVMHTEAEDVSFRFMSQRAYGLLVATTSRDSADTLRLELDGGRVKLMVNLDCIRINCNSSKGPETLYAGQKLNDNEWHTVRVVRRGKSLKLTVDDDVAEGTMVGDHTRLEFHNIETGIMTEKRYISVVPSSFIGHLQSLMFNGLLYIDLCKNGDIDYCELKARFGLRNIIADPVTFKTKSSYLSLATLQAYTSMHLFFQFKTTSPDGFILFNSGDGNDFIAVELVKGYIHYVFDLGNGPNVIKGNSDRPLNDNQWHNVVITRDNSNTHSLKVDTKVVTQVINGAKNLDLKGDLYMAGLAQGMYSNLPKLVASRDGFQGCLASVDLNGRLPDLINDALHRSGQIERGCEGPSTTCQEDSCANQGVCMQQWEGFTCDCSMTSYSGNQCNDPGATYIFGKSGGLILYTWPANDRPSTRSDRLAVGFSTTVKDGILVRIDSAPGLGDFLQLHIEQGKIGVVFNIGTVDISIKEERTPVNDGKYHVVRFTRNGGNATLQVDNWPVNEHYPTGRQLTIFNTQAQIAIGGKDKGRLFQGQLSGLYYDGLKVLNMAAENNPNIKINGSVRLVGEVPSILGTTQTTSMPPEMSTTVMETTTTMATTTTRKNRSTASIQPTSDDLVSSAECSSDDEDFVECEPSTANPTEPGIRRVPGASEVIRESSSTTGMVVGIVAAAALCILILLYAMYKYRNRDEGSYQVDETRNYISNSAQSNGTLMKEKQQSSKSGHKKQKNKDREYYV

SEQ ID NO: 1592 - DNA, 4723 bp, Homo sapiens
atatgacttgcccatttgtgaatttggctccccaactcctcgcttcacttcacctgtgcctccctggtccgcgcacttcgcaggcgcccgcccgcctctcggccacctctgcagcctgccaggcacctcctcttgcgctctcgctgatttcgcccacccacctccctccaccccgtgccacgttggtttgggtggctgctccgcaccgggttcctcctcctctcctctttccctccagtccttcttattctcttcctctggctgcggtggctgctgctgctgctggttttcatccagttgggaaacccaggaagccggcggctgctccgtggcgctagtccagcacgcccagggttaaaagcctcgcgcccttccgcggagactcccaggaacacccgaagaactcttccacctgcagcccccttttgcctggcagttctgcattgcatctcatggaagtggaaacaggaaaataaaaatgttcaaactccttggatgttgggataaactcacctgaacccacttgggttcgggctgcctccttctcttccttcattgccacctttcctctgtgtggctcccgggagtgtgcggttaagtcatcagactcgaagtgcctagagatccggaggaagccgcgccggtcttcccctgacatgcgtggcatgccggggctccgtaggaggtttgctatacctgggaggaccctggcattctaaatttcagctccgggaaagagaaggggctttttgccttttatcttttttttttctttctttaagtagtaattttttaactgattcattgtttggaaagcgcatattgcttccctcttccccgaattctggcaactcttcctcctgctatgatgggcccttgggcatcatgaacttcattactcctcactggctggaattcaaactgcccatctgtagtggtcccgtgcgttgaccatgcacctgagaatccacgcgagacggagccctcctcgccggccggcctggacgcttgggatctggttcctgttctggggatgtatcgtcagctctgtatggagttcttctaatgtagcttcctcctcctccacctcttcctcgccggggtctcactctcagcacgagcaccatttccatggcagcaagcatcactcagtgcctatttctatctatcgttcccctgtttcccttcgaggaggacacgctggcgctacgtacatctttgggaaaagtggtgggcttatcctctacacctggccagccaatgacaggcccagcacgcggtctgaccgccttgccgtgggcttcagcaccactgtgaaggatggcatcttggtccgcatcgacagtgctccaggacttggtgacttcctccagcttcacatagaacaggggaaaattggagttgtcttcaacattggcacagttgacatctccatcaaagaggagagaacccctgtaaatgacggcaaataccatgtggtacgcttcaccaggaacggcggcaacgccaccctgcaggtggacaactggccagtgaatgaacattatcctacaggccggcagttaaccatcttcaacactcaggcgcaaatagccattggtggaaaggacaaaggacgcctcttccaaggccaactctctgggctctattatgatggtttgaaagtactgaacatggcggctgagaacaaccccaatattaaaatcaatggaagtgttcggctggttggagaagtcccatcaattttgggaacaacacagacgacctccatgccaccagaaatgtctactactgtcatggaaaccactactacaatggcgactaccacaacccgtaagaatcgctctacagccagcattcagccaacatcagatgatcttgtttcatctgctgaatgttcaagtgatgatgaagactttgttgaatgtgagccgagtacaggtaggtcagcaaaccccacggagccgggaatcagacgggttccgggggcctcagaggtgatccgggagtcgagcagcacaacagggatggtcgtcggcattgtggctgctgccgccctctgcatcttgatcctcctgtacgccatgtacaagtacaggaacagggacgaggggtcctatcaagtggacgagacgcggaactacatcagcaactccgcccagagcaacggcacgctcatgaaggagaagcagcagagctcgaagagcggccacaagaaacagaaaaacaaggacagggagtattacgtgtaaacatgcgaacactgctcacacgcgagttttcacagttatttctatccacgcctatgaatctttggacggtgagatctcacagatgtcagaactgctggaactatgaaatggggtatataaccacgactctggtggggaaaaccgttttttaaaggacacacacacacacagcgatgcatctctctctaaagctcagccacggctgcggcaaggtcccagcggtcgctgggagacagaaggttttgtgccctgctgtatcataaagcacacacttagcgctctggagccggacggtggctccaccacttccgcaggcctggaaacttccttctccggaggaccttttactaaaaggtagaagacttcatggcttacttgttccataactccaagtgagtctgtaatgtttgtgaagcttgactgtaaccatgttttttctgtttaattatgtaaaaaacaaaactacaacaacaaaaaaagaaaaaagttaaaaaagaaaaaaacaccaaaaaacaaaaacaaacaaaaaaaaaaacccacaacccttatctggttctgaccagtgtgcgtgtaactttatgatctgaggggaaaaatggcttttgggtttttgtttatttttttgataatgactggacatcagaagaggaaaaaaactcaaaacaaaagcgagagagactattgccatatgaactcaaaagctatcatggtgttcactctacatatcaggttatggtgtctctagaatctgttgtttgtttcctataagatgctttgctgaacacatagcaaaattcatgtgacggatgataaattgattcgaaaagctggtcccccaggatctaatttcagaatttaccacccaaacccggaacagatgggtttagggctggtgttatcagagctattggctttacgtaacaatattgttcctgtccattcacccagccaaattgtgttaaagaggaaagccccacaaactaaaacagcctttcctagggaagaggaaggggaggtgggctggatctgtgactgattgaaatgcatgcaaataaaaaagacaatattaaagtctgttatcaaaccagacagtaggggagttcaactcgtgatggaaccacaaaaggtcacacaagccaaccatgtcatgccagagtacaaaacacatagttctttccccgccccgaatgtgacaatggttttcatagtggtttaattttgtagcctgacatttatggataactctgtccttccatttgctcacttctctcttcacccatcttttttaaaaacaaataaatgaataaagctgctgtgacacacacacaaaaggaatttaatagtataatatatatataaataaatatatatacagatatatttatcatggtatgtttgatgggatgactgacacaggaaatctgttaaagtcttaaaatggaatgagaatgttgttttaaaagaaaatagcaaaacaacaaaaaagcaaaccttaaaatgtgaagaaagtgtgaattttagttttgtcacagttaactgtgtcaaagagaattaaaaaaaaaaacttcagattttgtttacatattttactacatttttgctggtataattccttagccacctatgtacatactgctttaagaaatgtttttttcctgtttatttctgtttggtttatattctggttgtctttttctttttgtaaagaggaaacaatgtacagaaaaacaataaactggttgtatggccatagctatccgaaaagcaagagacaaagcaagacaaatattcacacaaaaatgaagtgtgtcctctggagggtcatatatacaatttcttttgtacagatgaaaatcaatcagctgcttagatttagaaatctactcttgctggtctttgtaagttgcatgaatatttgactttgaaaaaatatcttaacgacatggggcaaaaagtgcaatctaaatggtagcctttactaatgtgtgtggaaagaggtgttcctcattatctaatatttcaatgtgttaagagtttaatttttttgttatcattaaaaaagacaggattataaagagatatcaaagcacgattttagataacctaaacggcccagcctatacgaagttgattatatctcgatgtctgtaaaagattgctgttcttggagtcttgaggtcttgtgaattgatttcctgctttctttcatttttttcaatttaagtaataatacatttgttatattcctttcagtgtaagtttctatttggacaattttatgggaacatgtgcattctctatgtgagcttctatcatattcctgttttattagcagaacctaaaggaatttatttaatgatgttgtgacattactgctttttcttttttcttttcttagttcatatttgcattttcgttcaaggatatgcttagcaataaaatgttcttcccaaaaaaaaaaaaaaaaaaaa

SEQ ID NO: 1593 - protein, 432 aa, Homo sapiens
MHLRIHARRSPPRRPAWTLGIWFLFWGCIVSSVWSSSNVASSSSTSSSPGSHSQHEHHFHGSKHHSVPISIYRSPVSLRGGHAGATYIFGKSGGLILYTWPANDRPSTRSDRLAVGFSTTVKDGILVRIDSAPGLGDFLQLHIEQGKIGVVFNIGTVDISIKEERTPVNDGKYHVVRFTRNGGNATLQVDNWPVNEHYPTGRQLTIFNTQAQIAIGGKDKGRLFQGQLSGLYYDGLKVLNMAAENNPNIKINGSVRLVGEVPSILGTTQTTSMPPEMSTTVMETTTTMATTTTRKNRSTASIQPTSDDLVSSAECSSDDEDFVECEPSTGRSANPTEPGIRRVPGASEVIRESSSTTGMVVGIVAAAALCILILLYAMYKYRNRDEGSYQVDETRNYISNSAQSNGTLMKEKQQSSKSGHKKQKNKDREYYV

SEQ ID NO: 1594 - DNA, 5106 bp, Homo sapiens
gaacgcttgggctgttgtacgggttccctacgggactctgaaggctgaggatatccggcccggagcgtttgtgcggcgcggagttaagcgccccggcagtaacttaagggaagtggaccagggttgccgctgcccagagcggtcctttagtttccactggagtggagggaagagtgctgccatggcagcccctgcgcagcccaagaagatcgtggcccctacggtgtcccaaatcaatgcggagttcgtgacccagttagcatgtaaatactgggctccccacatcaagaagaaatcaccttttgatataaaggttattgaagatatatatgaaaaagagattgtcaaatcaaggtttgctattagaaagataatgctcttggaatttagccagtatcttgaaaattatctctggatgaattattctcctgaggtatctagcaaggcctatttaatgtcaatctgctgtatggtgaatgagaagtttagagaaaacgtgcctgcatgggagatttttaagaagaagccagaccacttcccattcttttttaaacacatcttgaaggcggcattagctgaaactgatggtgaattttcacttcatgaacagacagtcttactactttttcttgatcattgcttcaatagtttggaagtagacttgatacgaagtcaagtacagcagcttatctccctcccaatgtggatgggcttacagctggcacgattggaattagaattaaaaaagacacctaagctaagaaaattctggaacttgattaaaaagaatgatgaaaagatggatccagaagcaagagaacaggcatatcaagagaggagatttctttcacaactcatccagaagtttatctctgtgctgaaatcagtcccactttctgaacctgtcactatggacaaagttcattactgtgaaagattcattgaacttatgattgatctagaggccctgctacccacaaggcgctggtttaataccatcctggatgattcccaccttctggttcactgttacctttccaatcttgttcgtagagaagaggatggccatcttttttcccagcttttggacatgcttaaattctatactggttttgaaattaatgaccaaactggaaatgctctgacagagaatgagatgaccacaattcactatgatagaattacttctctacagagagctgcttttgcacattttcctgaactctatgattttgccctctcaaatgtggcagaagtagatactcgggagtccttggtcaagttttttggacctcttagttcaaacacactccaccaggtggcatcatacctctgcttgttgccaactcttcctaaaaatgaagacacaacttttgataaagaatttcttctagaattgctggtatctcgtcatgaacgtcgaatttctcagattcagcagttgaaccagatgcctttgtatccaactgagaaaattatatgggatgaaaatattgtcccaactgagtactattctggagaaggttgtcttgctcttcccaaattgaatttgcagtttttgactcttcatgactacctgctaaggaactttaacctcttccgcttagaatcaacttatgaaattcgtcaggacattgaagatagtgtcagcagaatgaagccatggcaatctgaatatggcggtgtagtgtttggtggttgggcgcgaatggcccagcccattgtggctttcactgtcgttgaagtggccaaacccaacataggtgaaaactggccaacccgagttcgtgcagatgttaccataaatctcaatgtcagagatcacatcaaagatgaatgggaaggtcttcgtaagcatgatgtatgctttttaattaccgtacgtcccacaaaaccttatggcactaagtttgaccggaggagaccttttattgagcaggttggcctggtttatgtcagaggctgtgaaattcagggcatgctggatgataaaggacgtgtcattgaagatggacctgaacccagacccaatcttagaggagaatcaaggacatttagagtgtttttggatccaaaccagtatcaacaagatatgaccaatactatacaaaatggagcagaggatgtgtatgaaacttttaatataataatgaggagaaaaccaaaggaaaataactttaaggctgtgctggagactattcggaacctgatgaatactgattgtgtggtacctgactggctgcacgatatcattttaggttatggggacccaagtagtgcacattattcgaaaatgcccaatcagattgccacccttgatttcaatgatacatttctctccattgagcatttaaaagccagcttccctggtcataatgttaaagtaactgtagaagaccctgctctacaaataccccctttcaggataacttttccagtaagaagtggaaaagggaagaaaaggaaagatgcggatgtggaagatgaagacaccgaggaagcaaaaaccttaattgttgagccccatgttattcctaataggggtccttatccttataatcaacccaaacgtaatacgattcagttcactcatacacagatagaagccatccgtgctggaatgcagcctgggctgactatggttgtgggcccacctggtacaggcaaaacagatgtggcagttcagatcatatccaacatctaccacaacttcccagaacagaggactctaattgttactcattccaatcaggccctaaaccagttgtttgagaaaatcatggcattagacattgatgagcgccacctactgcgtcttggtcatggagaagaagagctggagacagagaaagatttcagcaggtatggaagagttaattatgttctggctcgaagaatagaacttttagaagaagtcaaacgattgcaaaagagtctaggggttccaggagatgcctcatatacctgtgaaactgcaggctatttcttcttataccaggtaatgtctcgctgggaagagtatatcagcaaagtgaaaaataaaggtagtacattgccagatgttacggaagtctccactttcttccctttccatgaatactttgcaaatgctcctcaacccatttttaaaggaagatcttatgaagaagacatggaaattgctgaaggatgtttcaggcatattaagaaaatctttacgcagcttgaggaattcagagcctctgaattgcttcgaagtggactggacagatctaaataccttttagtgaaagaagccaaaattattgctatgacctgtactcatgctgccttaaaacgacatgacttggtcaagctaggtttcaagtatgacaacattttgatggaagaggctgctcagattctggagatagaaacttttatccctcttcttctacagaatcctcaggatggatttagccgactaaaacgatggattatgattggcgatcatcaccagttacctccagttattaagaacatggcctttcaaaagtactcaaacatggagcagtctctcttcactcgctttgttcgcgttggagttccgactgttgaccttgatgctcaagggagagccagagcaagcttgtgcaacctctacaactggcgatacaagaatctaggaaacttaccccatgtgcagctcttgccagagtttagtacagcaaatgctggcttactgtatgacttccagctcattaatgttgaagattttcaaggagtgggagaatctgaacctaatccttacttctatcagaatcttggagaggcagaatatgtagtagcactttttatgtacatgtgtttacttggttaccctgctgacaaaatcagtattctaacaacatataatggccaaaagcatcttattcgcgacatcatcaatagacgatgtggaaacaatccattgattggaagaccaaacaaggtgacaactgttgatagatttcaaggtcaacagaatgactatattcttctttctctggtacgaaccagggcagtgggccatctgagggatgtccgtcgcttggtagtggccatgtctagagccagacttggactttatatcttcgccagagtatccctcttccaaaactgttttgaactgactccagctttcagtcagctcacagctcgcccccttcatttgcatataattccaacagaacctttcccaactactagaaagaatggagagagaccatctcatgaagtacaaataataaaaaatatgccccagatggcaaactttgtatacaacatgtacatgcatttgatacagactacacatcattatcatcagactttattacaactaccacctgctatggtagaagagggtgaggaagttcaaaatcaagaaacagaattggaaacagaagaagaggccatgactgttcaagctgacatcatacccagtccaacagacaccagctgccgtcaagaaactccagcctttcaaactgacaccacccccagtgagacaggagccacttccactccagaagccatccctgctttatctgagaccacccctactgtggtaggagctgtatctgcaccggcagaagctaacacacctcaggatgccacatctgccccagaagagaccaagtagccaaactgtagtccttctaaaggaggacatggcagtcaaaaagtctgagtaaagctgttttttgtattttatatttgcttctgccattttactgtcactaattaatgtttagttcttatatttgttaactgatttcggtgtcttgaatatatttttttaaattatgtgtatgaacaattctagtttcatttgttcaatcagaagagcaaataaccattcctttcatgttttgatcactgagtgtgtctgtaatcatacctacattaaaatcattttctatgaatatataatatatacttcacatttttagtgaacttctctaaagaagaggacagaatatactggacttaaccacgaatacccttgagtgtccaaattgggaaggaacttgtttcttctgttatactatcaaatgcttaaattctgtttccttttttcttaaaaaaaaaaaaaaaaaaaaaaaaaaa

SEQ ID NO: 1595 - protein, 1485 aa, Homo sapiens
MAAPAQPKKIVAPTVSQINAEFVTQLACKYWAPHIKKKSPFDIKVIEDIYEKEIVKSRFAIRKIMLLEFSQYLENYLWMNYSPEVSSKAYLMSICCMVNEKFRENVPAWEIFKKKPDHFPFFFKHILKAALAETDGEFSLHEQTVLLLFLDHCFNSLEVDLIRSQVQQLISLPMWMGLQLARLELELKKTPKLRKFWNLIKKNDEKMDPEAREQAYQERRFLSQLIQKFISVLKSVPLSEPVTMDKVHYCERFIELMIDLEALLPTRRWFNTILDDSHLLVHCYLSNLVRREEDGHLFSQLLDMLKFYTGFEINDQTGNALTENEMTTIHYDRITSLQRAAFAHFPELYDFALSNVAEVDTRESLVKFFGPLSSNTLHQVASYLCLLPTLPKNEDTTFDKEFLLELLVSRHERRISQIQQLNQMPLYPTEKIIWDENIVPTEYYSGEGCLALPKLNLQFLTLHDYLLRNFNLFRLESTYEIRQDIEDSVSRMKPWQSEYGGVVFGGWARMAQPIVAFTVVEVAKPNIGENWPTRVRADVTINLNVRDHIKDEWEGLRKHDVCFLITVRPTKPYGTKFDRRRPFIEQVGLVYVRGCEIQGMLDDKGRVIEDGPEPRPNLRGESRTFRVFLDPNQYQQDMTNTIQNGAEDVYETFNIIMRRKPKENNFKAVLETIRNLMNTDCVVPDWLHDIILGYGDPSSAHYSKMPNQIATLDFNDTFLSIEHLKASFPGHNVKVTVEDPALQIPPFRITFPVRSGKGKKRKDADVEDEDTEEAKTLIVEPHVIPNRGPYPYNQPKRNTIQFTHTQIEAIRAGMQPGLTMVVGPPGTGKTDVAVQIISNIYHNFPEQRTLIVTHSNQALNQLFEKIMALDIDERHLLRLGHGEEELETEKDFSRYGRVNYVLARRIELLEEVKRLQKSLGVPGDASYTCETAGYFFLYQVMSRWEEYISKVKNKGSTLPDVTEVSTFFPFHEYFANAPQPIFKGRSYEEDMEIAEGCFRHIKKIFTQLEEFRASELLRSGLDRSKYLLVKEAKIIAMTCTHAALKRHDLVKLGFKYDNILMEEAAQILEIETFIPLLLQNPQDGFSRLKRWIMIGDHHQLPPVIKNMAFQKYSNMEQSLFTRFVRVGVPTVDLDAQGRARASLCNLYNWRYKNLGNLPHVQLLPEFSTANAGLLYDFQLINVEDFQGVGESEPNPYFYQNLGEAEYVVALFMYMCLLGYPADKISILTTYNGQKHLIRDIINRRCGNNPLIGRPNKVTTVDRFQGQQNDYILLSLVRTRAVGHLRDVRRLVVAMSRARLGLYIFARVSLFQNCFELTPAFSQLTARPLHLHIIPTEPFPTTRKNGERPSHEVQIIKNMPQMANFVYNMYMHLIQTTHHYHQTLLQLPPAMVEEGEEVQNQETELETEEEAMTVQADIIPSPTDTSCRQETPAFQTDTTPSETGATSTPEAIPALSETTPTVVGAVSAPAEANTPQDATSAPEETK

SEQ ID NO: 1596 - DNA, 745 bp, Homo sapiens
tatgtattgatagtttgtaaaatgtcatgaccaaggcttgcaggaacctaaccctgtatttccccaaggagtaatggttcagcattagctcattcaatgttcatagctactttataaaatgaacataactacctcaaataagaactgactgcatattttaaaagataaagcatttcaataataaactagtttggtaagttggctaaaactatcaccaaattactaatactaataaaatcttgtttctgtttagtttctgataaaaaaatcacatctatttatatttctatttgttctgtttagtttaataaatgttaaagaggctttctgtgccgataacgctcacgcaagcatggttaacgtccctaaaacccgccggactttctgtaagaagtgtggcaagcaccaaccccataaagtgacacagtacaagaagggcaaggattctctgtatgcccagggaaagcggcgttatgacaggaagcagagtggctatggtgggcaaactaagccaattttctggaaaaaggctaaaactacaaagattgtgctaaggcttgagtgcattgagcccaactgcagatctaagagaatgctggctattaaaagatgcaagcattttgaactgggaggagataagaagagaaagggccaagtgattcagttctaagtgtcatcttttattatgaagacaataaaatcttgagtttatgttcaaaataaataaataaataaataaataaat

SEQ ID NO: 1597 - protein, 105 aa, Homo sapiens
MVNVPKTRRTFCKKCGKHQPHKVTQYKKGKDSLYAQGKRRYDRKQSGYGGQTKPIFWKKAKTTKIVLRLECIEPNCRSKRMLAIKRCKHFELGGDKKRKGQVIQF

SEQ ID NO: 1598 - DNA, 5418 bp, Homo sapiens
gccttcgcggcacctgggcctgaggtgcgtgcctcccgggccctcgccagctccagatgcgtgaggaggacttcagaaacccgactgagaagtggagcgacccccagggagggtcggacctgcctcaataccgccaaggtctttcatttcttgttcgcttactttcgtgaaatcctcacatcgttttaatggtactagtcaagacaagaaaatcaacaggctttcagccttgaggcaacattggatattattgagacatctgtggaatttaagaacagtatggagctcatcagagtatatcattgaagaatatgatggctgaaaacaatttaaaaatgctaaagattcaacagtgtgtggtagccaacaaactacctagaaacaggccatatgtttgcaatatttgttttaagcactttgaaacaccatcaaaattagctaggcactatctcattcatactggtcaaaagccatttgaatgtgatgtgtgtcataaaacctttagacaactagttcatctggagaggcatcaactaactcatagtctgccttttaaatgtagtatttgtcagcgtcactttaaaaatctgaagacatttgtgaagcaccaacaacttcacaatgaaacctatcagaataatgttaaacaggtcagaagattgctggaggccaagcaagaaaagtcaatgtatggagtgtataatacttttaccacagaggaaagatgggcattacacccgtgctctaagtctgatcccatgtatagcatgaaaagaagaaagaatattcatgcatgtacaatctgtggcaagatgtttccatcacagtcaaaacttgataggcatgtacttattcatactggtcagaggccttttaaatgtgtcttgtgtactaaatcttttcgacagtcaactcacttaaaaatccaccaacttacacattcagaagaaagaccttttcaatgttgtttttgtcaaaaaggatttaagattcaaagcaaacttctgaagcataaacaaatccatactaggaataaggcttttcgggctcttttattaaagaagaggcgtacagaatctcgccccctgcctaataagttaaatgcaaatcagggtggttttgaaaatggtgagattggtgaatctgaggagaataatccacttgatgtccactcaatttatattgtcccttttcaatgtccaaagtgtgaaaagtgttttgaatcagagcagattctcaatgaacacagctgttttgctgctagaagtggcaaaattccaagcaggttcaaaagaagctacaactataaaaccattgttaaaaaaatcttggccaagcttaagcgtgctaggagtaaaaaattagataactttcaatctgagaaaaaagtatttaaaaagagtttcttgagaaattgtgatcttatttctggtgagcagagctctgaacaaacccagagaacatttgtgggttctcttggcaaacatggaacatataaaacaattggcaatagaaagaagaaaacattgactttgccattttcttggcaaaatatgggaaaaaatttgaaaggcatccttacgacagaaaacatattaagcattgataattcagtgaataagaaagacttgtcaatctgtggttcatcaggtgaggaattctttaataactgtgaggtacttcagtgtggtttttcagttccaagggaaaacatacgtactagacataagatatgtccttgtgacaaatgtgagaaggtatttccttctatatccaaactaaaaagacactatttaattcatactggacagaggccctttggctgtaatatttgtgggaaatcttttagacagtcagctcacttaaaaagacatgaacagactcataatgaaaagagtccttatgcatctctttgccaagtagaatttggaaacttcaacaatctttctaatcattcaggtaataatgttaactataatgcttcccaacaatgtcaggctcctggtgttcaaaaatacgaggtctcagagtcagatcaaatgtcaggagttaaggcagagtcacaggattttattcctggtagcaccgggcaaccctgtcttcctaatgtacttttggaatcagagcaaagcaatcctttttgcagttattcagagcatcaggagaaaaatgatgtcttcctgtaccgatgcagtgtttgtgctaaaagtttccgatctccatctaaactggaaagacactacctaattcatgcagggcagaaaccatttgaatgctcagtttgtggcaaaacattcagacaggctcctcactggaagagacatcagcttactcactttaaagaacgaccacaagggaaagtggttgccttagattcggttatgtaaattgtcgcaaccactaacaattgtggtctctggtgatcttatttttaaagcctgtattatttaaaatgcatttttattgaaaggcctgcattaaactgaatggtttcacaggcatttgcttgtcctgcatagtaaggaggtagaatacatagaaaattaatacaatgttttagaaacagccaagttaattttagaggcaagaacatgatttgatgctataaagtaggcattttaatattgtaaacatatactttggctgtattgaaaaatataaatccatgatggctgtacaaataatttagcctcattcattttttaaaggaattattccttaagacatgccatctctttttagatatactcaaaagactgagaggcaaaacttggcttttagctgcagcacatagccctgttatatttgatttattttacatttcatatgaaagcataattttgtccacatgtgactcaaattgcattggtaattttttttttttttttgtaagttaaaaaaactacagagacactaaaggtgaaaatggatgagacaattatagtattattttcattggtctttttttttgagatggagtctcactctttcgccaggctagagtgcagtggcgccatctaggctcactgcaacctccgcatcccagattccagcgattctcctgcctcagcctcctgagtagctgggattacaggtgcctgccatcacgcctggctaatttttgtatttttagtagagacgggggttcaccaagttggccaggatggtctcgatctcttgaccttgtgactcacccgcatcggcctcccaaagtgctgggattacaggcatgagccaccgcacccgacggtcttttcaaagctatttatttttaggactatgtggtaatttcaccttcaggtgataaggattttttttttctcccagctagtgctatctttctcaaaataatttaaaagtaggcgagaggctaggatgtacctatatttaccatgtttacttaccaggaatattttctaagtgccatagtctttttcataatacgtatgagttttaccttttcagaggaataatttcaagtcatttatttgctcattaatgatagcagtagtcatagacttaagactattctagagatcttcatctccataagacttttacatttattttagtaaacttttctttctatgcctctttaatggagtggttctgttatttaagcctgttctaagtttgatcaaatggcaatgactaggtctagttttagtttttatttttgcaggagtctattgctaaagaattttattttgatccttgttaaatttttattttaattaataaggtagtcattcctgtagagggataagatgcttgtagagttgtgggtatcattccaaatagaactgttatgatttgggaaatattctttactacaaaggacttatttcataattacaaattttccttcatatttgcctttgtttataaaatcttcaggaatgacattctctagcaataaaaggaatgaaccgttatgtttctaagctgaaaagaggaacaggtgggtaattatcctgccatacttaaatatagtggaaaatcctctattgagaatgtggataaatgaacaattgtaagttttgcatcataaactgagaactttcttttgacaggggggaggcgggagggatagtaggtgggggtgatctgcttgcttcttttaccacaggtgatttttaagtaacttgggtttaatttacagagatgaaacatgacagtctgagtaaaatacccagtgatgtagaagtgtgcctgtttattatgtagatacagacatccagcaaaaacaggagaatcacatgctttaaagaacactttctcttaggtttccttgagatatgttcctccagtgcaagcaagataatggtttacagaatttgctttacacaaaacttgtcaagaactcatctgttaaaagcaaggaataactagtttatattttccaataatgttcaaggttttctccttaatatgtttgaaattattgattttggcatttttctaagcaatttatgtaattttatttgaagaaaatgttttgtataatgtttttcccagcctaaacagggagagtcctaacagtgttgtgcttgtatgattctgagactttatttgcgtaagtgatactactatactttatttttgacccatgcctttttaagctgtttcatattgaaaggtggaatattgtaaaaattttgtcaaagatgtactgtagtgctatttgaagtacctgtaacaaaacagttggccctctgtatccatgtactctgcatctgtggattaaaccaattgcagatcaaaaatattagaaaaaataaaaataatacaaataaaaatacagtataacagttatttaaatagcatttacattgcattaggtattagtctagggataaagtatacaggcggatgtgcgttggttatatacaaatatgtcattttatgtaagggacttgagtatacttggatttttggtatctgtgggttggggggacggtccaggaaccaataccccatggataccaagggacaactgtacttatttacctttattgtcattgcaagcttcttatggaaactttataggaatgaaaatatacatgttaagaagattaaacattagatagtagatggtttgttgcatgctagaactgttagtattgttgaatcaattactttggtttcatgaaaaaataaacgataaatatctttaaagagaactagaagaattttttgtttgagtgattccaggctgtagtatgatcatttactgaagtagtttgattggctggctaacttagaattattgtttcttgttttgtactgcaataggggttataattgtaagataaaaatgtgtgtgtgtttaagggaagtaggtggtggttaaaattcttggaaaattttcagaatactttaaaaataaagttccaagttacaaaaaaaaaaaaaaaa

SEQ ID NO: 1599 - protein, 691 aa, Homo sapiens
MMAENNLKMLKIQQCVVANKLPRNRPYVCNICFKHFETPSKLARHYLIHTGQKPFECDVCHKTFRQLVHLERHQLTHSLPFKCSICQRHFKNLKTFVKHQQLHNETYQNNVKQVRRLLEAKQEKSMYGVYNTFTTEERWALHPCSKSDPMYSMKRRKNIHACTICGKMFPSQSKLDRHVLIHTGQRPFKCVLCTKSFRQSTHLKIHQLTHSEERPFQCCFCQKGFKIQSKLLKHKQIHTRNKAFRALLLKKRRTESRPLPNKLNANQGGFENGEIGESEENNPLDVHSIYIVPFQCPKCEKCFESEQILNEHSCFAARSGKIPSRFKRSYNYKTIVKKILAKLKRARSKKLDNFQSEKKVFKKSFLRNCDLISGEQSSEQTQRTFVGSLGKHGTYKTIGNRKKKTLTLPFSWQNMGKNLKGILTTENILSIDNSVNKKDLSICGSSGEEFFNNCEVLQCGFSVPRENIRTRHKICPCDKCEKVFPSISKLKRHYLIHTGQRPFGCNICGKSFRQSAHLKRHEQTHNEKSPYASLCQVEFGNFNNLSNHSGNNVNYNASQQCQAPGVQKYEVSESDQMSGVKAESQDFIPGSTGQPCLPNVLLESEQSNPFCSYSEHQEKNDVFLYRCSVCAKSFRSPSKLERHYLIHAGQKPFECSVCGKTFRQAPHWKRHQLTHFKERPQGKVVALDSVM

SEQ ID NO: 1600 - DNA, 1617 bp, Homo sapiens
cctcacatgatccagtttaatcctcctcttctcccttcctgaagctgcacgctgcagtaagagcacagcagaaatgcagacaaaagggggccaaacatgggcgagaagggctctgttgctcggcatcctgtgggccactgcacatctgcctctctcagggacctccctgccccaacgtctcccaagggccacaggaaatagcacccaatgtgttatttctccatcatcggagtttcccgaagggtttttcacgagacaggagcgcagagatggaggcatcataatctatttcctaattatcgtttacatgttcatggccatatctattgtctgtgatgaatacttcctaccctccctggaaatcatcagtgaatcccttggattgtctcaggatgttgcaggcacaactttcatggcagcgggcagttcagctcctgaattagttactgctttcctaggtgtatttatcacaaagggagatattggcattagcaccatccttggatctgcaatttataatctccttggcatctgtgctgcctgtggtttgctatctaatacggtctcaacactatcatgttggcccctattcagagactgtgcagcgtacacaattagtgcagcagcagttcttggtataatatatgacaaccaagtttactggtatgaaggggctttactgcttttgatatatggattgtatgttttggtgctgtgttttgacattaaaattaaccaatatattataaagaaatgcagtccttgctgcgcctgtcttgccaaagctatggagagaagtgaacaacagccactgatgggctgggaagatgaaggtcaaccattcattcgtcggcaatcaagaactgatagtggaatattttatgaagattctggctactctcagctctctataagtttacatggccttagtcaggtttctgaagatccaccaagtgttttcaacatgcctgaagcagacttaaaaagaattttttgggtattatcccttcctattattacattactttttctaaccacaccagattgtagaaaaaagttttggaaaaactactttgtgataacctttttcatgtctgcaatatggatatccgcatttacatatatcctggtttggatggtcacaataactggggaaacactagaaattcccgatacagtaatgggccttactttattagcagcaggaacaagcataccagacacaattgcaagtgtgttggttgcaagaaaagggaaaggagatatggctatgtctaacatcgtgggatccaatgtgtttgatatgttgtgccttggtattccatggtttattaaaactgcatttataaatggatcagctcctgcagaagtaaacagcagaggactaacttacataaccatctctctcaacatttcaattatttttctttttttagcagttcacttcaatggctggaaactagacagaaagttgggaatagtctgcctattatcatacttggggcttgctacattatcagttctatatgaacttggaattattggaaataataaaataaggggctgtggaggttgatattattaatagtgttatgcagaaaatatgaatggcaggga

SEQ ID NO: 1601 - protein, 500 aa, Homo sapiens
MQTKGGQTWARRALLLGILWATAHLPLSGTSLPQRLPRATGNSTQCVISPSSEFPEGFFTRQERRDGGIIIYFLIIVYMFMAISIVCDEYFLPSLEIISESLGLSQDVAGTTFMAAGSSAPELVTAFLGVFITKGDIGISTILGSAIYNLLGICAACGLLSNTVSTLSCWPLFRDCAAYTISAAAVLGIIYDNQVYWYEGALLLLIYGLYVLVLCFDIKINQYIIKKCSPCCACLAKAMERSEQQPLMGWEDEGQPFIRRQSRTDSGIFYEDSGYSQLSISLHGLSQVSEDPPSVFNMPEADLKRIFWVLSLPIITLLFLTTPDCRKKFWKNYFVITFFMSAIWISAFTYILVWMVTITGETLEIPDTVMGLTLLAAGTSIPDTIASVLVARKGKGDMAMSNIVGSNVFDMLCLGIPWFIKTAFINGSAPAEVNSRGLTYITISLNISIIFLFLAVHFNGWKLDRKLGIVCLLSYLGLATLSVLYELGIIGNNKIRGCGG

SEQ ID NO: 1602 - DNA, 4544 bp, Homo sapiens
cgccattgtcgcgctcggagcccctcagctcaggcggccgaggcggaggcagcggcggcgggatggcggacgccaacaaggccgaggtgcccggggccactggtggcgacagcccgcacctgcagcccgcagagccgccgggcgagccgcggcgagagccgcaccccgcggaggcggagaagcagcagccgcagcacagcagcagctccaatggcgttaaaatggagaatgatgaatcagcaaaagaagagaaatctgacttaaaggaaaaatctacaggaagtaagaaggccaatagatttcatccttattcaaaagacaagaattcgggcactggagaaaagaagggtccaaatcgtaacagagttttcattagcaacatcccatatgacatgaaatggcaagctattaaagatctaatgagagagaaagttggtgaggttacatacgtggagctctttaaggatgcggaaggaaaatcaaggggttgtggtgtggttgaattcaaagatgaagaatttgtaaagaaagccctagaaactatgaacaaatatgatcttagtggaagaccccttaatattaaagaggatcctgatggagaaaatgctcgtagggcattgcagcgaacaggaggatcatttccaggaggacacgtccctgatatgggatcagggttgatgaatttaccaccttccatactcaataatccaaacattcctcctgaagtcatcagtaatttgcaggccggtagacttggttccacaatttttgttgccaatcttgacttcaaagttggttggaagaagctaaaggaagtgttcagcatagctggaactgtgaagcgggcagatattaaagaagacaaagatggcaagagcagaggaatgggcactgtcacttttgagcaagcaattgaagcagttcaagcaatttctatgttcaatgggcagtttttatttgatagacctatgcatgtgaaaatggatgacaagtctgttcctcatgaagagtaccgttcacatgatggtaaaacaccacaattaccacgtggtcttggaggcattgggatgggacttggtccgggtggacagcctattagtgccagccagttgaacataggtggagtaatgggaaatttaggtccaggtggtatgggaatggatggtccaggttttggaggaatgaatagaattggaggaggaatagggtttggtggtctggaagcaatgaatagcatgggaggatttggaggagttggccgaatgggagagctgtaccgtggtgcgatgactagtagcatggagcgagattttggacgtggtgatattggaataaatcgaggctttggagattcctttggtagacttggcagtgcaatgattggagggtttgcaggaagaataggatcttctaacatgggtccagtaggatctggaataagtggtggaatgggtagcatgaacagtgtgactggaggaatggggatgggactggaccggatgagttccagctttgatagaatgggaccaggtataggagctatactggaaaggagcatcgatatggatcgaggatttttatcgggtccaatgggaagcggaatgagagagagaataggctccaaaggcaaccagatatttgtcagaaatctaccttttgacttgacttggcagaaactaaaagagaaattcagtcagtgtggtcatgtaatgtttgcagaaataaaaatggagaatggaaagtcaaaaggctgtggaacagtcagatttgactccccagaatcagctgaaaaagcctgcagaataatgaatggcataaaaatcagtggcagagaaattgatgttcgcttggatcgtaatgcataatttcaagccatggttggaacattcctacatctgttttgctgaatctcctagtaaaagtcatttttttaaagtaatattgtatgcttacaaaagctgtaaaaatgaacttttaaaactcccaccagcttttaacagtataatgttaaaaatatactgtaatttttgttaatctcaagtttgggtttttaaagacagcaagtctggtcattcagtttaaatgaatggttatactgtttttaatgaaataagccattttcttgttgttttcagtactacatagttggatttgtttgttctagtttctccagtttttgtcaacttattgtatggtaaaacatagattttttccccccaaacttctgttttataatatgtaatttttcatgaaaagaaagggctcagaaaaattaggatgtgattttggttggttttaaattactgtaagttttagattctaaggttcaagatttttaaaatttgatttaaatgaagaaatggatttttctctctgcccctccctgccattcatattttctgcataacactattaataatatcaacctccacagccccttattttattatttccaataattccaagttcatatagaactgataatgtagcaagccccaagtatgataataggcagactattcccaactttctgtctagtttccagccattgaagtgaactgctaaaaaaagaaaaataattgaaatgttgagagagatggttatgtaagttagtcctctgctgtttacttctgcaggagctgatccatttataaatgcagttttaataaaccatggaataccaaggcacaacatatcaaacacattggatcccacgatgttagacatagccatatctcctttccctacaaaagaaaagcatactgttaaaatgtgcttaccaatactgtgttttattaataatcttcataagaaaagaaacactggatacttttttgttgttgattcgttttgaaaaattgttgttagagcaaaagtcttactgaatttgtatttttaaatttttcttgggttagtatttaaagtcttaacatttatttaataattatatttattaaaccatttttcaataaggtatatagcttatttgttgcttttcattgtaatttaacatggttaatggttaattactatttaacacacatttcaaatgaatattatttgggggattagattgagtgaaattaacctgctattaaatagtaaacttttcctctggagtcacttttttcccccttcaaagtatgttactgaggaagtaaacttttttttttttttttggtttttgttttttgagacacagtctcgctctgttgcccaggctgctggagtgccgtggcgcaatctcggctcactgcaacctccgcctcctggattcaaacaattctcctgcctcagcctcctgagtagctgggattacaggcacatgccaccacgcccggctaatttttgtatttttagtagagactgggtttcaccatgttggtcaggctggtctcaaactcctgacctcgtgatccacccgcctcggcctcccaaaatcctgggattacaggcgcgagccaccacacccggccggaagtaaacatttttaaagctacttttactcattctagccttgtagaatgaccattgcagcttgagggacctagttcttaccttttcttgcaaccaacacacttgcaattgtgtctggtatgcttgttcctgctgctaataaagtaaggcccattactgtatcgggaatttctagtgtttcccctgtaataaacagatatttcaagttacaaatcttaaagattcactaaccatcctttgcagttattttggatatttccttcgtgaacaaaaataaaataggcacatttagaattcagagccaatatgtgcttgcttattagttttttagctagcaacatatttgaatcaggctggtaattcgggtaacccaggtagcacagatttttaatgacatatctaaagatacgtaacagctaaaattctgccagtgagaaattttcctgtttgatattcttacaaaagatgtttatgtccaccattatctcatcagggctgtgctgaatatttgataatgagactgatcattccgctttttctttcttaaaaatattagtcagagttaagcaaattaattatagctatctttaagctataaatgtgttaacatgtatatataccatttattatgttctactttagtgatataccttaatttagtgggctttggcagggcgggggagggggaacgttcattaatctctgaggaaaacaaaacctgttttctacttgagtctaacatatggtcccaatttattaatacttctgttaaatttgatgtcaggtcaacatttttcagaaatgtatttattctcagaaacagaaccagagagaagttaaacaaaaggttatgtaactgttcctttaatgttgtaattgaaaacttggtttagcgtcttttttttctttctcttttttttttcttaaaatgccaactaaaataattagaaagtagcttatttattgcatgcttatacattgatattggaattggaattggttgttaatttctgttactggctttgctagaattcatatgtgcataaataacactaatatttatcatc

SEQ ID NO: 1603 - protein, 600 aa, Homo sapiens
MADANKAEVPGATGGDSPHLQPAEPPGEPRREPHPAEAEKQQPQHSSSSNGVKMENDESAKEEKSDLKEKSTGSKKANRFHPYSKDKNSGTGEKKGPNRNRVFISNIPYDMKWQAIKDLMREKVGEVTYVELFKDAEGKSRGCGVVEFKDEEFVKKALETMNKYDLSGRPLNIKEDPDGENARRALQRTGGSFPGGHVPDMGSGLMNLPPSILNNPNIPPEVISNLQAGRLGSTIFVANLDFKVGWKKLKEVFSIAGTVKRADIKEDKDGKSRGMGTVTFEQAIEAVQAISMFNGQFLFDRPMHVKMDDKSVPHEEYRSHDGKTPQLPRGLGGIGMGLGPGGQPISASQLNIGGVMGNLGPGGMGMDGPGFGGMNRIGGGIGFGGLEAMNSMGGFGGVGRMGELYRGAMTSSMERDFGRGDIGINRGFGDSFGRLGSAMIGGFAGRIGSSNMGPVGSGISGGMGSMNSVTGGMGMGLDRMSSSFDRMGPGIGAILERSIDMDRGFLSGPMGSGMRERIGSKGNQIFVRNLPFDLTWQKLKEKFSQCGHVMFAEIKMENGKSKGCGTVRFDSPESAEKACRIMNGIKISGREIDVRLDRNA

SEQ ID NO: 1604 - DNA, 3362 bp, Homo sapiens
aaaaaatcaattttggaagatgtcactgaacaactcttccaatgtatttctggattcagtgcccagtaataccaatcgctttcaagttagtgtcataaatgagaaccatgagagcagtgcagctgcagatgacaatactgacccaccacattatgaagaaacctcttttggggatgaagctcagaaaagactcagaatcagctttaggcctgggaatcaggagtgctatgacaatttcctccacagtggagaaactgctaaaacagatgccagttttcacgcttatgattctcacacaaacacatactatctacaaacttttggccacaacaccatggatgccgttcccaagatagagtactatcgtaacaccggcagcatcagtgggcccaaggtcaaccgacccagcctgcttgagattcacgagcaactcgcaaagaatgtggcagtcaccccaagttcagctgacagagttgctaacggtgatgggatacctggagatgaacaagctgaaaataaggaagatgatcaagctggtgttgtgaagtttggatgggtgaaaggtgtgctggtaagatgcatgctgaacatctggggagtcatgctcttcattcgcctctcctggattgttggagaagctggaattggtcttggagttatcatcattggcctatccaccatagtaacgacaatcacaggtatgtccacgtctgctattgccacgaacggagttgttagaggaggtggggcctactatcttatttccagaagtttagggcccgagttcggtgggtcaataggcctgatctttgcttttgctaatgcagtggctgttgctatgtatgtggtgggattcgctgaaactgtagtagatctacttaaggagagtgattcgatgatggtggatccaaccaatgacatccggattataggctccatcacagtggtgattcttctaggaatttcagtagctggaatggaatgggaggcaaaggcccaagtcattcttctggtcattcttctaattgctattgcaaacttcttcattggaactgtcattccatccaacaatgagaaaaagtccagaggtttctttaattaccaagcatcaatatttgcagaaaactttgggccacgcttcacaaagggtgaaggcttcttctctgtctttgccatttttttcccagcagctactgggattcttgctggtgccaatatctcaggagatttggaggatccccaagatgccatccccagaggaaccatgctggccattttcatcaccactgttgcctacttaggggttgcaatttgtgtaggggcctgtgtggtccgagatgccaccgggaacatgaatgacaccatcatttctgggatgaactgcaatggttcagcagcatgtgggttgggctatgacttctcaagatgtcgacatgaaccatgtcagtacgggctgatgaacaatttccaggtcatgagcatggtatcagggttcggccccctcatcactgcgggaatcttttctgcaacactctcctccgccctggcctcccttgtcagcgcacccaaagtgttccaggctctgtgcaaggacaacatctacaaagccctgcagttttttgcaaagggatatgggaaaaacaatgaacccctgagaggatatattctcacttttcttatagccatggcatttattcttattgcggaactgaacaccattgctcccatcatctccaactttttcctggcctcatatgcacttattaatttctcctgcttccatgcctcttatgccaaatctccaggatggagacctgcgtatggaatttacaacatgtgggtatctctttttggagctgttttgtgctgtgcagtcatgtttgtcatcaactggtgggcagctgtcatcacctatgtcattgaattcttcctttacgtctatgtgacttgtaagaagccagatgtgaactggggctcctccacacaggctctttcctacgtgagtgctttagacaatgctctggaattaaccacagtggaagaccacgtaaaaaacttcaggccccagtgcattgtcttaacagggggacccatgacaagacctgctctcctggacataactcacgcctttaccaagaacagtggcctttgcatctgctgtgaagtctttgtgggaccgcgcaaactgtgtgttaaggagatgaacagtggcatggcgaaaaaacaggcctggcttataaagaacaaaatcaaggctttttatgctgcagtggcggcagactgtttcagggatggtgtccgaagtcttcttcaggcctcaggcttaggaagaatgaaaccaaacactctggtgattggatataagaaaaactggaggaaagctcccttgacagagattgagaactacgtgggaatcatacatgatgcatttgattttgagattggcgtggttatagtcagaatcagccaaggatttgacatctctcaggttcttcaggtgcaagaggaattagagagattagaacaggagagactagcattggaagcgactatcaaagataatgagtgtgaagaggaaagtggaggcatccgaggcttgtttaaaaaagctggcaagttgaacattactaagacaacgcctaaaaaagatggcagcattaacacaagccagtcgatgcatgtgggagagttcaaccagaaactggtggaagccagcactcaatttaaaaagaaacaagaaaaaggcacaattgatgtttggtggttgtttgatgatggagggttaacacttcttatcccctatatcttaactctcagaaaaaaatggaaagactgtaaattaagaatctatgtgggagggaagatcaaccgcattgaagaagaaaaaattgcaatggcttcccttctgagcaaatttaggataaaatttgcagacatccatatcatcggtgacatcaacattaggccaaacaaagagagctggaaagtctttgaagagatgattgaaccatatcgtctccatgaaagctgcaaagatttaacaactgctgagaaattaaaaagagaaactccgtggaaaattacagatgcagaactggaagcagtcaaggaaaagagttaccgccaagttcgactgaatgaactcttacaggagcactccagagctgctaatctcattgtcctgagccttcccgtggcaagaaagggatccatatcggatttgttgtatatggcttggttggaaatcctcacaaagaacctcccacctgtcttactagttagaggaaatcacaaaaatgtcttgacattttactcttaaaacatgaaagattggaatacattttaacttaatgtaatgcata

SEQ ID NO: 1605 - protein, 1099 aa, Homo sapiens
MSLNNSSNVFLDSVPSNTNRFQVSVINENHESSAAADDNTDPPHYEETSFGDEAQKRLRISFRPGNQECYDNFLHSGETAKTDASFHAYDSHTNTYYLQTFGHNTMDAVPKIEYYRNTGSISGPKVNRPSLLEIHEQLAKNVAVTPSSADRVANGDGIPGDEQAENKEDDQAGVVKFGWVKGVLVRCMLNIWGVMLFIRLSWIVGEAGIGLGVIIIGLSTIVTTITGMSTSAIATNGVVRGGGAYYLISRSLGPEFGGSIGLIFAFANAVAVAMYVVGFAETVVDLLKESDSMMVDPTNDIRIIGSITVVILLGISVAGMEWEAKAQVILLVILLIAIANFFIGTVIPSNNEKKSRGFFNYQASIFAENFGPRFTKGEGFFSVFAIFFPAATGILAGANISGDLEDPQDAIPRGTMLAIFITTVAYLGVAICVGACVVRDATGNMNDTIISGMNCNGSAACGLGYDFSRCRHEPCQYGLMNNFQVMSMVSGFGPLITAGIFSATLSSALASLVSAPKVFQALCKDNIYKALQFFAKGYGKNNEPLRGYILTFLIAMAFILIAELNTIAPIISNFFLASYALINFSCFHASYAKSPGWRPAYGIYNMWVSLFGAVLCCAVMFVINWWAAVITYVIEFFLYVYVTCKKPDVNWGSSTQALSYVSALDNALELTTVEDHVKNFRPQCIVLTGGPMTRPALLDITHAFTKNSGLCICCEVFVGPRKLCVKEMNSGMAKKQAWLIKNKIKAFYAAVAADCFRDGVRSLLQASGLGRMKPNTLVIGYKKNWRKAPLTEIENYVGIIHDAFDFEIGVVIVRISQGFDISQVLQVQEELERLEQERLALEATIKDNECEEESGGIRGLFKKAGKLNITKTTPKKDGSINTSQSMHVGEFNQKLVEASTQFKKKQEKGTIDVWWLFDDGGLTLLIPYILTLRKKWKDCKLRIYVGGKINRIEEEKIAMASLLSKFRIKFADIHIIGDINIRPNKESWKVFEEMIEPYRLHESCKDLTTAEKLKRETPWKITDAELEAVKEKSYRQVRLNELLQEHSRAANLIVLSLPVARKGSISDLLYMAWLEILTKNLPPVLLVRGNHKNVLTFYS

SEQ ID NO: 1606 - DNA, 2146 bp, Homo sapiens
gtcatgttcccaggacgggcgcgtcttcagggtggaagcctggcgcacgtccggaggtgccgaggacccaaccagcccaaactctgggggaaatgactcccctctgccctcgccccgcgctctgctaccatttccttacgtctctgcttcgctcagcgatgcaaaacgcgcgaggcgcacggcagagggccgaagccgcggtactctccgggccaggcccgcccctcggccgcgccgcgcagcacgggattccccggccgctgtccagcgctggccgcctgagccaaggctgccgcggagccagtacagtcggggccgctggctggaagggcgagcttcctaaggcggggggaagcccggcgccggggccggagacacccgccatttcacccagtaagcgggcccggcctgcggaggtgggcggcatgcagctccgctttgcccggctctccgagcacgccacggcccccacccggggctccgcgcgcgccgcgggctacgacctgtacagtgcctatgattacacaataccacctatggagaaagctgttgtgaaaacggacattcagatagcgctcccttctgggtgttatggaagagtggctccacggtcaggcttggctgcaaaacactttattgatgtaggagctggtgtcatagatgaagattatagaggaaatgttggtgttgtactgtttaattttggcaaagaaaagtttgaagtcaaaaaaggtgatcgaattgcacagctcatttgcgaacggattttttatccagaaatagaagaagttcaagccttggatgacaccgaaaggggttcaggaggttttggttccactggaaagaattaaaatttatgccaagaacagaaaacaagaagtcatacctttttcttaaaaaaaaaaaaaaagtttttgcttcaagtgttttggtgttttgcacttctgtaaacttactagctttaccttctaaaagtactgcattttttacttttttttatgatcaaggaaaagatcattaaaaaaaaacacaaagaagtttttctttgtgtttggatcaaaaagaaactttgtttttccgcaattgaaggttgtatgtaaatctgctttgtggtgacctgatgtaaacagtgtcttcttaaaatcaaatgtaaatcaattacagattaaaaaaaaaagcctgtatttaactcatatgatctcccttcagcaacttattttgctttaattgctttaaatcttaagcaatattttttattcagtaaacaaattctttcacaaggtacaaaatcttgcataagctgaactaaaataaaaatgaaaaggagagattaaaggtattccttgttcttcccttctcttcactagtctaaaaacttctttttaatcttaagattctttgtgatgagggtgagaaaaagaatcctcagtttatttttccactattaatctttcttttgataaatcctctattgactgggtagaggtatgtttgtgaaagacatgtaacttggggatttgttactttaggtttgttcccttgaatttcatctcatcaggcaaattgtactagttgtagttacgagttttccctcagtgaagtagcaataggctgtaatcaagaaaatatgccatttatagagataagataaatgaaataatacttcagccaccaggtttttctgtctcacatacataagcagcatttcattgcagatatgggactgattctgtggcttaccttgattaacatcttttggaagttttgctagtgtgctttcctttctttactatgtttctcagattcctttgtatcagggttttgggtgtcacttaggttttgtccatcagattctgtgagacaccaggcatcgttttgaggatgtgggttatacacatggagtgcttctggaactatcagcccacttgaccacccagtttgtggaagcacaggcaagagtgttcttttctggtgattctccaggccatttaataccctgcaatgtaattgtccctctgtggctcacatttcattagtgagccatgaaatcaactcagtgggacatagccagcatttttgcataccaggttgggctataaaatatttctgttgtcaataaattttaaatgttttcctgctaaactaa

SEQ ID NO: 1607 - protein, 252 aa, Homo sapiens
MTPLCPRPALCYHFLTSLLRSAMQNARGARQRAEAAVLSGPGPPLGRAAQHGIPRPLSSAGRLSQGCRGASTVGAAGWKGELPKAGGSPAPGPETPAISPSKRARPAEVGGMQLRFARLSEHATAPTRGSARAAGYDLYSAYDYTIPPMEKAVVKTDIQIALPSGCYGRVAPRSGLAAKHFIDVGAGVIDEDYRGNVGVVLFNFGKEKFEVKKGDRIAQLICERIFYPEIEEVQALDDTERGSGGFGSTGKN

SEQ ID NO: 1608 - DNA, 1830 bp, Homo sapiens
gtcatgttcccaggacgggcgcgtcttcagggtggaagcctggcgcacgtccggagagacacccgccatttcacccagtaagcgggcccggcctgcggaggtgggcggcatgcagctccgctttgcccggctctccgagcacgccacggcccccacccggggctccgcgcgcgccgcgggctacgacctgtacagtgcctatgattacacaataccacctatggagaaagctgttgtgaaaacggacattcagatagcgctcccttctgggtgttatggaagagtggctccacggtcaggcttggctgcaaaacactttattgatgtaggagctggtgtcatagatgaagattatagaggaaatgttggtgttgtactgtttaattttggcaaagaaaagtttgaagtcaaaaaaggtgatcgaattgcacagctcatttgcgaacggattttttatccagaaatagaagaagttcaagccttggatgacaccgaaaggggttcaggaggttttggttccactggaaagaattaaaatttatgccaagaacagaaaacaagaagtcatacctttttcttaaaaaaaaaaaaaaagtttttgcttcaagtgttttggtgttttgcacttctgtaaacttactagctttaccttctaaaagtactgcattttttacttttttttatgatcaaggaaaagatcattaaaaaaaaacacaaagaagtttttctttgtgtttggatcaaaaagaaactttgtttttccgcaattgaaggttgtatgtaaatctgctttgtggtgacctgatgtaaacagtgtcttcttaaaatcaaatgtaaatcaattacagattaaaaaaaaaagcctgtatttaactcatatgatctcccttcagcaacttattttgctttaattgctttaaatcttaagcaatattttttattcagtaaacaaattctttcacaaggtacaaaatcttgcataagctgaactaaaataaaaatgaaaaggagagattaaaggtattccttgttcttcccttctcttcactagtctaaaaacttctttttaatcttaagattctttgtgatgagggtgagaaaaagaatcctcagtttatttttccactattaatctttcttttgataaatcctctattgactgggtagaggtatgtttgtgaaagacatgtaacttggggatttgttactttaggtttgttcccttgaatttcatctcatcaggcaaattgtactagttgtagttacgagttttccctcagtgaagtagcaataggctgtaatcaagaaaatatgccatttatagagataagataaatgaaataatacttcagccaccaggtttttctgtctcacatacataagcagcatttcattgcagatatgggactgattctgtggcttaccttgattaacatcttttggaagttttgctagtgtgctttcctttctttactatgtttctcagattcctttgtatcagggttttgggtgtcacttaggttttgtccatcagattctgtgagacaccaggcatcgttttgaggatgtgggttatacacatggagtgcttctggaactatcagcccacttgaccacccagtttgtggaagcacaggcaagagtgttcttttctggtgattctccaggccatttaataccctgcaatgtaattgtccctctgtggctcacatttcattagtgagccatgaaatcaactcagtgggacatagccagcatttttgcataccaggttgggctataaaatatttctgttgtcaataaattttaaatgttttcctgctaaactaa

SEQ ID NO: 1609 - protein, 141 aa, Homo sapiens
MQLRFARLSEHATAPTRGSARAAGYDLYSAYDYTIPPMEKAVVKTDIQIALPSGCYGRVAPRSGLAAKHFIDVGAGVIDEDYRGNVGVVLFNFGKEKFEVKKGDRIAQLICERIFYPEIEEVQALDDTERGSGGFGSTGKN

SEQ ID NO: 1610 - DNA, 1874 bp, Homo sapiens
gttttggcgcgctccctgcggcgacgctcatcgtgcgctctcctcttcccccggtggtctcctcgctcgccttctggctctgccatgccctgctctgaagagacacccgccatttcacccagtaagcgggcccggcctgcggaggtgggcggcatgcagctccgctttgcccggctctccgagcacgccacggcccccacccggggctccgcgcgcgccgcgggctacgacctgtacagtgcctatgattacacaataccacctatggagaaagctgttgtgaaaacggacattcagatagcgctcccttctgggtgttatggaagagtggctccacggtcaggcttggctgcaaaacactttattgatgtaggagctggtgtcatagatgaagattatagaggaaatgttggtgttgtactgtttaattttggcaaagaaaagtttgaagtcaaaaaaggtgatcgaattgcacagctcatttgcgaacggattttttatccagaaatagaagaagttcaagccttggatgacaccgaaaggggttcaggaggttttggttccactggaaagaattaaaatttatgccaagaacagaaaacaagaagtcatacctttttcttaaaaaaaaaaaaaaagtttttgcttcaagtgttttggtgttttgcacttctgtaaacttactagctttaccttctaaaagtactgcattttttacttttttttatgatcaaggaaaagatcattaaaaaaaaacacaaagaagtttttctttgtgtttggatcaaaaagaaactttgtttttccgcaattgaaggttgtatgtaaatctgctttgtggtgacctgatgtaaacagtgtcttcttaaaatcaaatgtaaatcaattacagattaaaaaaaaaagcctgtatttaactcatatgatctcccttcagcaacttattttgctttaattgctttaaatcttaagcaatattttttattcagtaaacaaattctttcacaaggtacaaaatcttgcataagctgaactaaaataaaaatgaaaaggagagattaaaggtattccttgttcttcccttctcttcactagtctaaaaacttctttttaatcttaagattctttgtgatgagggtgagaaaaagaatcctcagtttatttttccactattaatctttcttttgataaatcctctattgactgggtagaggtatgtttgtgaaagacatgtaacttggggatttgttactttaggtttgttcccttgaatttcatctcatcaggcaaattgtactagttgtagttacgagttttccctcagtgaagtagcaataggctgtaatcaagaaaatatgccatttatagagataagataaatgaaataatacttcagccaccaggtttttctgtctcacatacataagcagcatttcattgcagatatgggactgattctgtggcttaccttgattaacatcttttggaagttttgctagtgtgctttcctttctttactatgtttctcagattcctttgtatcagggttttgggtgtcacttaggttttgtccatcagattctgtgagacaccaggcatcgttttgaggatgtgggttatacacatggagtgcttctggaactatcagcccacttgaccacccagtttgtggaagcacaggcaagagtgttcttttctggtgattctccaggccatttaataccctgcaatgtaattgtccctctgtggctcacatttcattagtgagccatgaaatcaactcagtgggacatagccagcatttttgcataccaggttgggctataaaatatttctgttgtcaataaattttaaatgttttcctgctaaactaa

SEQ ID NO: 1611 - protein, 164 aa, Homo sapiens
MPCSEETPAISPSKRARPAEVGGMQLRFARLSEHATAPTRGSARAAGYDLYSAYDYTIPPMEKAVVKTDIQIALPSGCYGRVAPRSGLAAKHFIDVGAGVIDEDYRGNVGVVLFNFGKEKFEVKKGDRIAQLICERIFYPEIEEVQALDDTERGSGGFGSTGKN

SEQ ID NO: 1612 - DNA, 5702 bp, Homo sapiens
gcccgctgcccgccgcccggctcccggctgctcgcggccccctgctcctgcctggcgctctggccaggctcgggctccggaggacaggaccgcgcgactggccggccgatccctgggccggccgcgggagcagctatgctgtgactgtccaggaatcgtatgcacaccccttcgatcagatctattacacacgatgcacagacatcctcaactggttcaagtgcaccaggcaccgccctgtgtacggaggagtgtgtgcacggccgctgcgtttccccggacacctgccactgcgagcctggctggggagggcccgactgctccagcggctgcgacagcgaccactgggggccccactgcagcaaccggtgccagtgccagaacggcgccctgtgtaaccccatcacaggcgcctgcgtgtgcgccgccggcttccgtggatggcgctgcgaggagctctgcgcgcctggcacccacggcaagggatgccagctgccgtgccagtgccgacacggtgccagctgcgacccccgcgccggcgagtgcctctgcgcacctggctacaccggcgtctactgcgaggagctgtgccctcctgggagccatggagctcactgtgagctgcgctgcccctgtcagaatgggggcacctgccaccacatcactggcgagtgtgcctgccccccaggctggacgggagcagtgtgtgcccagccctgcccaccagggacatttggccagaactgcagccaggattgtccttgccaccatggagggcagtgtgaccacgtgactggacagtgccactgtacagctggatacatgggggacaggtgccaagaggagtgccccttcgggtccttcggcttccagtgctcacagcgctgtgactgccacaatggggggcagtgttcacccaccacgggtgcctgcgagtgtgagcctggctacaagggcccacgctgccaggagcgactgtgcccggagggcctgcatggcccaggctgcaccctgccctgcccctgtgacgctgacaacaccatcagctgccacccagtaactggagcttgtacctgccagccaggctggtctggtcaccactgcaatgaatcctgccctgttggctactatggcgatggctgccagctgccttgcacctgtcagaatggcgccgactgccacagcatcactgggggctgcacttgtgctccgggcttcatgggagaggtctgtgccgtttcctgtgcagcagggacctatggccccaactgctcgtccatctgtagctgtaacaatggtggcacctgctccccagtagatggctcctgtacctgcaaggaagggtggcagggcctggactgcaccctgccatgtcccagtgggacgtggggcctgaactgcaacgagagctgcacctgtgccaatggggcagcctgcagccccatagacggctcctgctcctgcactcctggctggctgggagacacctgtgagctgccttgcccggatggcacatttgggctgaactgcagtgaacactgtgactgcagccatgctgatggatgtgaccccgtcacaggccactgctgctgcctggccggatggacaggcatccgctgtgacagcacgtgtccacctggccgctggggccccaactgctctgtctcctgcagctgtgagaatggaggctcctgctccccagaggatgggagctgcgagtgtgcccctggcttccgaggacccttatgccagagaatctgcccccctgggttctatggccacggctgcgcccagccatgccccctctgcgtgcacagcagcaggccctgccaccacatcagcggcatctgtgagtgcctcccaggattctctggagctctctgcaaccaagtgtgtgctggaggatactttgggcaggactgtgcccagctctgctcctgtgccaacaacgggacctgcagccctatcgatggctcctgccagtgctttcctggatggattggcaaggactgctcacaggcttgcccacccgggttctggggccccgcctgcttccacgcatgcagctgccacaacggggcgagctgcagcgccgaggacggggcctgccactgcacccctggctggactggactcttctgcacacagcgctgcccagcagcattttttgggaaggactgtgggcgcgtatgccagtgtcagaatggcgccagctgtgaccacatcagtggcaagtgcacctgccgcacaggcttcaccgggcaacactgtgagcagagatgtgccccaggaacctttggctatgggtgtcagcagctatgtgagtgcatgaacaactccacctgtgaccatgtcaccggcacctgttactgcagccctggcttcaaaggaatcaggtgtgaccaagctgccctcatgatggaggagctgaatccctacaccaagatcagcccagcactgggtgcagagcggcactcggtgggtgctgtcacaggcatcatgctcctgttattcttcattgtggtgctgctgggcctatttgcctggcatcggcggcggcagaaagagaagggccgagacctggctccccgtgtctcctacacacctgccatgaggatgaccagcaccgactactccctctcaggtgcttgtggaatggatagacgtcagaacacatacattatggacaaaggcttcaaagattacatgaaagaatccgtgtgcagttctagtacttgttccttgaatagcagtgaaaacccttacgccacaattaaggacccacccatcctcacctgcaagcttccagaaagcagctatgtagaaatgaagtcgcctgtgcacatggggtctccgtacacagatgtgccatccttgtcgacatctaataaaaatatatatgaagttgagcccacagtcagtgtggtccaagaaggttgcggtcataactccagctatatccagaatgcatacgacctacctaggaacagccatattcctggtcattatgacctcctcccagtaagacagagccctgccaatgggccgtcccaggacaagcaatcttaagagggataagcttctctcttgcagtgtgctctactgaatattctgactctgaaagaagacagtcccttgacttgaagtaatggtacagactggctccagctgcatgttagttattacgttcacctggaactaaagaagagcgtccaggtgggactgggataattgttcaaggaattgtgttctcaaaggcaaatcctatcacccactcagccccaaatgccctggattatatgatttttaaaacattttaagatacagctactcatcaacatcagctaaatatagctgatatatatatatatatttatctgaaacgtgatattttaaaaacatgtaggtttaacaaaccttcctaggacaaaaaggagactggggagggaagaggattactttaaagcacctgaaacgtatatgtacttttggttgctgttaccatcaacatctgttttattaccgaagacaattagtacacagacatgaactgttcttaaacagaacagtcttaaaatgtctgtacatatctgtctggtccatcaaattacaacagccaagattacagaatctatatagtctaatgctgacaacttctattttaaaaaacaagactttactttcttctgccccctaagtgataggtttaaacacacagagacacacacacacgtttccaaagtgcagcagtgtctctttcagtctacaataagattcctagggcagctttatcaaattttgccaattcaaagttcaaggacattacaagttagtcctggctttgtcatatctacttagtccatccgacacctgaatcattccatgtaaaacagagctctaagatgatcctttaagcaagcagtcatagactggtcgggattaagtaaaagacggctagttggcctcctcattttatttggtcagcatcccttgactcaagagtacttgctttcaagttcttcataaatcttgagattgacgtagtatgaaacctaaaagtatacaggaaattggacaaatgtggatacagcaagtttacactgcttaaagtacattatgctttttaatggaactaaatgatcaaaaaaagaatggactgtaaccagttgctgtaacatgatgtaaaaacgttactgtaaacagcatgaggatatgaagtccttccaccttctatcttaaaactactacttactgagctagcccaatatgcattacaatgagctaatgctccagatcccagtattcagatgtgtctataccttccactatgaacacagataaactgaggctcagataagtccaaatgaaatgaaatcaactcccaagccctaaagagaaccttctcacaagaattaaaaacaaaaagggcaaacctaggaagctaacggctactcctgtaccactctattcactggtacagtccagccagtaaaaaacacttccaaaaagatacacagaagaggaactaaatgactgcgaagctggaatactgctacaggaagtatgagagttctgaaacccttgatagaaactggaagcctgccatggaacacaatactttgggcaataatcagaaaaagcaaaaaaataaataaatgagtacatctccccttcccacatcactcaaggcataagcagattttactgttagaggaaaatatgtaatacttacatgaatgttgcatgtgtgcatgggagcaactgagtagcaatagtaaatttactttccaaaaaagccttattaaaatataaatattagaaaattactttggagacccaagtaaatatttctcatacatatgtagaaagaaatataggtaagcagcttacctcagtatttcagggcagcaagtgtttgtgaagcaaggatgagcagcatgaagatgtcagatcagcaaggagaaacttcaactcaatcccaggttttctcttcttcccttatcctgcatgtacaataactgctgcctggcaaactgcaaacaagcagcatcactcaagtttgaagtttcgccgcttttgtcaactatcctctgggcaaaggtattcagcaagaggtggaatggctagacactgaatcaagagatttcagtgttactctggtcaagttagtcgccctctctgggctccctttttttctatgcataaaaaggggagaagcagagagtgggaagacagctctactaacccttcagctctagcagtccatgactttttaaggaaatgtaatacaagtcaaaccaggcaatacagaggagaagggaaaggcagagggtgtgattatggtgacaatagctgccttcccctatcgaacagttatcagtaaaagacatttcaatcttacaaagcaactgttagaaacttctgtctaacaccatcacaaataggttcatggtcagcctaaacatgtatactgtgcattttatgggtgactttgaaagatctgttcaattatttttcagaaactaaattttcaaaaaattaatatgtgtacaattaaaatgaatgaaagaaaaaccattattgtacagaggtattaatgagactatgaaacggcaatacttttttaaatcacagatttgtaatatatgttcactgtgcagagggattgtaccttgtacaaaataaaacaaatttctcaaact

SEQ ID NO: 1613 - protein, 969 aa, Homo sapiens
MHTPSIRSITHDAQTSSTGSSAPGTALCTEECVHGRCVSPDTCHCEPGWGGPDCSSGCDSDHWGPHCSNRCQCQNGALCNPITGACVCAAGFRGWRCEELCAPGTHGKGCQLPCQCRHGASCDPRAGECLCAPGYTGVYCEELCPPGSHGAHCELRCPCQNGGTCHHITGECACPPGWTGAVCAQPCPPGTFGQNCSQDCPCHHGGQCDHVTGQCHCTAGYMGDRCQEECPFGSFGFQCSQRCDCHNGGQCSPTTGACECEPGYKGPRCQERLCPEGLHGPGCTLPCPCDADNTISCHPVTGACTCQPGWSGHHCNESCPVGYYGDGCQLPCTCQNGADCHSITGGCTCAPGFMGEVCAVSCAAGTYGPNCSSICSCNNGGTCSPVDGSCTCKEGWQGLDCTLPCPSGTWGLNCNESCTCANGAACSPIDGSCSCTPGWLGDTCELPCPDGTFGLNCSEHCDCSHADGCDPVTGHCCCLAGWTGIRCDSTCPPGRWGPNCSVSCSCENGGSCSPEDGSCECAPGFRGPLCQRICPPGFYGHGCAQPCPLCVHSSRPCHHISGICECLPGFSGALCNQVCAGGYFGQDCAQLCSCANNGTCSPIDGSCQCFPGWIGKDCSQACPPGFWGPACFHACSCHNGASCSAEDGACHCTPGWTGLFCTQRCPAAFFGKDCGRVCQCQNGASCDHISGKCTCRTGFTGQHCEQRCAPGTFGYGCQQLCECMNNSTCDHVTGTCYCSPGFKGIRCDQAALMMEELNPYTKISPALGAERHSVGAVTGIMLLLFFIVVLLGLFAWHRRRQKEKGRDLAPRVSYTPAMRMTSTDYSLSGACGMDRRQNTYIMDKGFKDYMKESVCSSSTCSLNSSENPYATIKDPPILTCKLPESSYVEMKSPVHMGSPYTDVPSLSTSNKNIYEVEPTVSVVQEGCGHNSSYIQNAYDLPRNSHIPGHYDLLPVRQSPANGPSQDKQS

SEQ ID NO: 1614 - DNA, 5043 bp, Homo sapiens
cacacaagcgcttccttgccgagaggctggagctgcggcaccgcaggcctgagccaccccttctctgctgtctccttctcttcctcagggctcccgtgtctgctcgccctccgacgctgctcaggaatttgacaagaaactgaagttttgattcagatatattttgaattgaaaccagagatgttctagagtttagattctttcatttgattaaggtatggtctgaatatgcgttgcttggcagctcgggtcaactataagactttgattattatctgcgcactcttcactttggtcacagtacttttgtggaataagtgttccagtgacaaagcaatccagtttccacggcgttcgagtagtggcttcagagtggatgggtttgaaaaaagagcagcagcatctgagagtaacaactatatgaaccacgtggccaaacaacagtctgaggaagcattccctcaggaacagcagaaagcaccccctgttgttgggggcttcaatagcaatgtgggaagtaaggtgttagggctcaaatatgaagaaattgactgtctcataaatgatgaacacacaattaaagggagacgagaggggaacgaagtctttcttccattcacttgggttgagaaatattttgatgtttatggaaaggtggttcagtatgatggctatgatcggtttgaattctctcatagctattccaaagtctatgcacagagagccccctatcaccccgatggtgtgtttatgtcttttgaaggctacaatgtggaagtccgagacagagtcaagtgcataagtggggttgaaggtgtgccattatctacacaatggggacctcaaggctatttctatccaatccagattgcacagtatggattaagtcattacagcaagaatctaactgagaaacctcctcacatagaggtatatgaaacagcagaagacagagacaaaaacaagcctaatgactggactgtgccaaagggctgctttatggcgaatgtggctgataagtctagattcaccaatgtcaaacagtttattgcaccagaaaccagtgaaggtgtatccttgcaactgggaaacacaaaagattttattatttcatttgacctcaagttcttgacaaatggaagtgtgtccgtggttctagagaccacagaaaagaatcagctcttcactatacattatgtctcaaatgctcagctaattgcttttaaagaaagagatatatactatggcattgggcccagaacttcatggagcacagttaccagggacctggtcactgacctcaggaaaggagtgggtctttcaaacacaaaagctgtcaagccaaccaaaataatgcccaagaaggtggttaggttgattgcaaaaggtaagggattcctcgacaacattaccatctctaccacagcccacatggctgcattttttgctgctagtgattggctagtaaggaaccaggatgagaaaggtggctggccaattatggtgacccgtaagttaggggaagggttcaagtctttagagccaggatggtattctgccatggcccaagggcaagccatttctacattagtcagggcctatctgttaacaaaagaccatatattcctcaattcagctttaagggcaacagccccttataagtttctatctgagcagcatggagttaaagctgtgtttatgaataaacatgactggtatgaagaatatccaaccacacctagctcttttgttttaaatggctttatgtattctttaattgggctgtatgacttaaaagaaactgcaggggaaaaactcggaaaagaagcaaggtccttgtatgagcgtggcatggaatctcttaaagccatgctgcccttgtatgacactggctcaggaaccatctatgacctccgtcacttcatgcttggcatcgctcctaacctggctcgctgggactatcataccacccacatcaatcagttgcagctactcagtaccattgatgagtccccagtcttcaaagaatttgtcaagaggtggaaaagctaccttaaaggcagcagggcaaagcacaactagagctcacaaccaaaactgcacttcagcctctgctgtacacagaaactacaggctctgtctcaggagagcataggcacattttaaaaggttatgtactaggtttttgtggattctatcaaagtgataagtgatccttaaaaccagccttctaaaataattgcattccatgggttgggtatttagaaatgtaggtggcatttagaacacaatgtttaatcaatgggctgaacaaagatgcttcactttgccttgcccatcaccctatacagtttcgcagatagtctagtcactctatgtgagaaagataatggtaagtagttgctactggccaactgtctagcacttacctgaaaacttagtatggagctcttttaaaatgtgattatttatatttatgttgaaagcggactttaaaaaaaataatgtgctgtaacacagtaaatatgtacttgtagcctggatagcagactgtgttcaactttttaaaaagatgtttcctttctaaagattaatttcttgggagcaaatgagtatttgttgcatttgttcaatttgttgtatatggtgaatatttaattatggttttcttgaaacgtgtaaattaaaaacacaatcagtgttcaggcttcagttatataatgtaagcacaactaaaatgaaacttgttgactgcacaagaaattacaaaaatgtttctgttttgaaacttgatctacaatcagtaaaagtttgataatcagtatatcccttcccaacccccattgtgacagtttctttttgtcactgtctagaattttgtattttatttcagactataccttggagttttgtatattttgagagagatatttttgggacattattttggaaacttattacaaatctaaatttggaaaggagctagtagctttaaggccaccaccatattttacttttttaggatttttccccctttaaataaaaatattagatcaaatactatatgcaagaaatcatagcaaagtttttttttcctaccaagatcattcttgatcatcagcttcccaaactagtaagtctgtgcatcattgggtgtttttttttaatttaattttaaattatcccagctattagatagaagggatgttactgcacttatgtgtaatcagatctttatttaggtatacatatcctcctataccgcacataaatagatttcagagcccccatacaatgggcagtgtctgctatagggcttcaggcattaaataaaaccgagggttgttgattttgctgtgacagtacactaaatcaatactatatcttatacagtttgaaaatatgataccctacactttcaggggaccgagtctgacaaacacaatacatttatctgtgacctatatcaagtacacatttaggagccaggtaggttacctgcttacacactatattttaattgaattcaaactatcaagcactacttagaaactggaaaacatatatatgttagcatcaaagggggcagaagcaaagaagatacagatctgcactgaagacattagactggccatagaaaagtaagcttgaactcccaattgatgtgaccacactcttcttaattttgttcacagtaaaaacacttttttgagttattaggcttacccctagcttttgacctttgcatttcatatatgttagatgtctcagcaagaatatctggtctcccctaatttttattcccagtgccgatgttcaaaataaactttctccagtctgggaaccttttttacttccccatatttgttattatttagaatggttcatacgtctgctttgtttgcatactggtcttcagattatgagactcgatgataacagtatggtactgcttctgtgacaaatatcgtgccttaacaatgtggctgtccttttccactgaagaaggaaagacgttttgatctagaaatagcgttgtgatttccttgctgttggttttacactgccttccacattgcaacagcaagttgatttcttgtgatcccagaattttctaagaggatgagttgaatctatagcagcattgtcagtacagaccagtggttctcaaactttaaaatgcctcagcatcacttgggagcttattgaaatgcagatcccagagtcagtaaatctgcctgtgaagtatgatagtctgcatttgtaatgagcattcaagtgattctgatgcaggtgagctgggggcatacagggaggaacactgccctggactatccattgcatttttgcctctaaacaactacagaattttctagggttttaaattatgtaaaatgtttacttattctgagcttagagagaatggggagggtatttttaaattttattgttttatttctttaagtttttctttgctttaagattataggtattaggtttgtttttgtttttccacttatcttgagttcactttgatgttaaatctattgctacttcagttgtaaaaccagccaaaagtttctggatgaaggtcaagtttgaccttttaggagttattgtacataaaggcttcatccacgaaccatccagcgcacagaagcaagtgcaaaaatgacacaagcacaactctccagacgtggctccttctcctttctcagtgcagactctcactgaaagctgctattttcatcctccttgtggttgcttttcttgtttctcttccattgtacatgtgggttatataccatatgttaaatatgcaataaagtgtttacaggatgcccttctgaagggtagtcctttgtaaagctgtacagactttgcagtttaagcacaatgtgcacatgttagttttatatacagcaaaacttgattttttgcagatggaaaggtattttgtttctatacaaagtaaatggattgtttgtgcttaatgtaaagccgctttataaaactgtaaaataaagtttttttcttaaaaag

SEQ ID NO: 1615 - protein, 617 aa, Homo sapiens
MRCLAARVNYKTLIIICALFTLVTVLLWNKCSSDKAIQFPRRSSSGFRVDGFEKRAAASESNNYMNHVAKQQSEEAFPQEQQKAPPVVGGFNSNVGSKVLGLKYEEIDCLINDEHTIKGRREGNEVFLPFTWVEKYFDVYGKVVQYDGYDRFEFSHSYSKVYAQRAPYHPDGVFMSFEGYNVEVRDRVKCISGVEGVPLSTQWGPQGYFYPIQIAQYGLSHYSKNLTEKPPHIEVYETAEDRDKNKPNDWTVPKGCFMANVADKSRFTNVKQFIAPETSEGVSLQLGNTKDFIISFDLKFLTNGSVSVVLETTEKNQLFTIHYVSNAQLIAFKERDIYYGIGPRTSWSTVTRDLVTDLRKGVGLSNTKAVKPTKIMPKKVVRLIAKGKGFLDNITISTTAHMAAFFAASDWLVRNQDEKGGWPIMVTRKLGEGFKSLEPGWYSAMAQGQAISTLVRAYLLTKDHIFLNSALRATAPYKFLSEQHGVKAVFMNKHDWYEEYPTTPSSFVLNGFMYSLIGLYDLKETAGEKLGKEARSLYERGMESLKAMLPLYDTGSGTIYDLRHFMLGIAPNLARWDYHTTHINQLQLLSTIDESPVFKEFVKRWKSYLKGSRAKHN

SEQ ID NO: 1616 - DNA, 4285 bp, Homo sapiens
gagtccggggtcgccgcagcccgggaggagtgtctggtctccggcctgcctgtgctgtccccgcgccctgtccactggactcccgagacccttggaacccaggacaccattggagaaactgggcattttaccaaggatttgactggaatggcatgcttcctttaaagatgaaagttgacttttagagccaattaaagccctttggggaatctggcctcataccttgtccacacagagttcctgtacaaggttcctggcctgtgggaagcggcacagcaccagctaggcagagacgccccaggccatgttagagctttgagtgaggcctggtaacagggaggcgctgtcacctactggccttgccaatccagctccaagatgctgagcctgaagctccccaggctgtttagcatagaccagataccccaggtgttccatgagcaaggcaccctgttcggctaccgccatccacagagttctgccactgcctgcatcctcagccttttccaaatgaccaatgagactctcaacatttggactcacttgctgcccttctggttctttgcatggaggtttgtgactgcactgtatatgacagacatcaagaatgacagctactcctggcccatgcttgtgtacatgtgcaccagctgcgtgtacccacttgtgtccagctgtgcgcacaccttcagctctatgtccaagaatgcccggcacatttgctacttcctggactatggtgccgtcaacctcttcagcctgggctcagccattgcctactctgcatacacgttcccggatgcgctcatgtgcaccactttccatgactactacgtggccctggctgtactgaacaccatcctcagcacaggcctctcctgctactccaggtttcttgaaatccagaagcccagactctgtaaggtgattcgtgtcctcgcctttgcttatccgtacacctgggactccctccccatcttctacaggctattcctgttcccaggggagagtgcacaaaatgaagccacctcgtaccaccagaagcacatgatcatgaccctcctggcctctttcttgtactctgcacatctgccagaacgcctagcccctggacgctttgactacatcggtcacagtcaccagctgtttcacgtgtgtgtgatcctggccacgcacatgcagatggaagccatacttctggacaagactctgaggaaggaatggctcctggccacctccaagcccttctctttctctcagatagctggagccatacttctgtgcatcatcttcagcctcagcaacataatttatttctcagctgctctgtatcggattcccaagccagaattacataaaaaagaaacatgactcagaccataagcttttcatgccagatgtcaacattaagctgcaacatcctaaccaccataagccggaggtggttacagcttatcacggcctaaaatattcataatggttggtgtcttttgaatgaattcatgtcaaaaatgttattcagctggggaaatttctctaaatgtacactgattctgtgtgtgtgattttaaaaggagaacatggttcaagcaagtccttgttaaggcaaactattgatatttcattaattttaaatttacttaaaatgtggttttaaattctatttaaacatttggattaagcatattactctggagctttgtattattctttaaaaatgaatcttgcttcatttgatgaatttcatgtcacaaagcttctctcaagagctctcgtagtggcctgtcaaccactttcggagaatgagccaggtcagtcactgggaggacctgtgaaagaaagttggtcactgagtgccttggggactggcaaaacattccagaatgaagagagctgtctggggagagcccttcttcccttctccacctagtgaagggagaacagaaggggagtcctctcttcccacaagtccattctgccttcaaagtgtaagttctcatgtcattatggatttggagtttgtcagtttttttcttaaaagtccacagcggggtgtcatgtgttctgttatgttctgttttctggttgccagtttgatctgcaaagtatttttcagtgcaggtaaaatgtgttaaaccataagagttgactgagttaatcccaattggttgtgctcatatgccacctttttaaaccaatggaaattgctatatttggggatgtcatacatttgatattgcttcagcatttcaaatatgttgcaaaatttagtatccatatgcataagaagttaatcaccttgccagtggggtggtcacatatagtgttctcaagctttactgtgaatcagaaacatccagtaagcttgtgacaaatgcagactcctagggaaaaccagggggttctgcttcactaggttaaatgtaggttttgtagaggagatctgcactggagcaagtctcccagatgattctaatacaggagggccagaggccaaacttgaagaactgctggtgttacatgttccaaaaggcattagacctatcagctttgtttcgcctgatctcaagttttagcaactcaccaactaaggcgtaacctcattttatgttccagcgttttctactctgaatagttctaaaacactgagcattttctcatttgttgcattactgattaaagttcagtatttcatggtgttttcagggatcacagaaatgcggatgcaaaacaacttttgacagaggcccatcaaacccagatctgcacttggtaatgacttaggggggcttcctcacaatgcaggatcctctttgctgactcaggaatactccatattttagactactgcctctaccattaactagcccagacatttgaatggccttgtaaacagctcactgtctaatactcgaaggacaagtaacaatttatattggatgagagtggtcaagaaatatgatttcattagttttattatctgtttacttcctctggggaaggcagactgataaaattatatgggctggtaaatttttggtacattaattgcaagctgcatgacaaaatttgtttttctggcaacaatctgacattattagtggaattccacaccaacagggcttgtgagcttccatttcatcttactgtaacttcaattttatggcaaaaaaaggtacaaagtttaaatacccctttctagtaatgccaaagacatacagtgttttacattctctcctttataggtaacaaaataatgtttagctcagtaagtactgaaataatgagtgaccaatttgaaggatttttagattatttaatctttgcttatgttgctttttcacatgcttaatgatggaaatgaaatgttaaatcaacaaaataagatccagtgtttcataacatttttataagtttggtaaactttagtcccattatatacttttggggacagtgttataaatcagaattttacgacagtttgcagaacactgatttgaaagcttcctatgcaaaatgagaaggggttcaaatatattaattatcattaagtattaaataataggcattagatgtctaatgtgagtataatttcatccaagccatctcagaaagtctaaaaggttggcagggggtcagctgaagacctcactggagtgggtcttaatttttaaaaagtgtctcactacacttaagacatgtgacacattcccattggtaacaattgctcaccatggcattgtctcaaaaaagactatggtggggagggtggcacattcctaatgggatgtacctctccccactccccttgcttgagaagcactactcaaaaatttaccagaccttacaactgtgataaaacttgaatgtgtatgatgaataaggccattcagttaactttacctccctttacccattgaaggggttccttttccattgctcagtttttagaaaataattctcatcttttttctaaagaaatgaatttgtggctggtctgaaggtagtgagttagctcaattgattgttcgcagtcagttatagatcaagctccttgttctactcttcccctcttctcactactgcacttgactagtcttaaaacaaagaaagaacgaatgaatgaatgaatctgtggctggatgcagtggctcgtgcctgtaatcccagcactttgggaggctgaagtgggaggactgcttgggcccaggaattcaggaccagtctgggcagcagggccagacactgtctctataaaaaaaaaaaaaaaaaaaaaaaaaaaaaa

SEQ ID NO: 1617 - protein, 330 aa, Homo sapiens
MLSLKLPRLFSIDQIPQVFHEQGTLFGYRHPQSSATACILSLFQMTNETLNIWTHLLPFWFFAWRFVTALYMTDIKNDSYSWPMLVYMCTSCVYPLVSSCAHTFSSMSKNARHICYFLDYGAVNLFSLGSAIAYSAYTFPDALMCTTFHDYYVALAVLNTILSTGLSCYSRFLEIQKPRLCKVIRVLAFAYPYTWDSLPIFYRLFLFPGESAQNEATSYHQKHMIMTLLASFLYSAHLPERLAPGRFDYIGHSHQLFHVCVILATHMQMEAILLDKTLRKEWLLATSKPFSFSQIAGAILLCIIFSLSNIIYFSAALYRIPKPELHKKET

SEQ ID NO: 1618 - DNA, 6741 bp, Homo sapiens
gccctgcgcccggggcgcctcggagaactgacctgaagtttcagtgtagtcagagagctcttcaagtaataaatcatggagaccagtcaggaaacttccctcttcttggtgaagatcttggaggaactggacagcaagcaaaataccgtttcttatcaggacctgtgcaaatctctctgtgcccggttcgacctgtcgcagcttgccaaactgagaagtgtgctcttctacacagcttgtctcgatcccaattttccagccacgctattcaaagacaagatgaaatgcactgtgaataaccagcaatcaaagaaaatcatggtggcagcagatattgtgacgatattcaacctgatccaaatgaatggcggggctgccaaggagaagctgcccacgggccgccagaaggtacgcaagaaggaggcatcctttgaatcatgtaggtcggacacagagatctgcaatgcagctgagtgtgagcccctgaactgtgagctgagtgagaggtctttcagccggggctaccccatcaggcagtcgtccaagtgccggaagatggactgcaaggactgcccacagtttgtccctgcctctgagcctaacttcctgttgggagttagcaaagaggtgaaaaaccgcgccgcttccctggacaggttgcaggccctggctccgtactctgtgaccagccctcagccctgtgagatgcagaggacctacttccccatgaacatcgaaaacgagtccatttcagaccaggactccctgcccatcaatcagagcatcaaggagaccttcatttccaatgaggagccatttgtggtccagtcctgtgtccagaaaaggaatatcttcaaagaggattttcacaatttgatggcagtgtcccccagtttggttggccccatcagcaaagcagagaatgagcacagggaaccccagagtcgaaaggaaccccacaagccacccttcttcaaccacagctttgaaatgccctataacagccagtacctgaatccagtgtattccccggttcctgacaaaaggcgagcaaagcacgaaagcttagatgaccttcaagcctctacatattttgggcccactcccgtgatgggaacccaagaagccaggcgctgtctagggaagcccaacaagcagactccctggccagccaaaagctggagcctaaacacagaggaagttcctgactttgaacggtcctttttcaatagaaatccctccgaggagaagctacactatccaaatgccagtagccagacccccaatttcccagccccagaaaggcgcccaacttaccttgtgccaaaggatcaacagccaattctccccattgcttatgcggcaaaacaaaatgggctcaaatctaaagagatctcatcccctgttgacctggagaagcatgaaccagtcaaaaagtttaaagacaagagcattaactgcaccagtgggcagctcagctcagacaccagtagcgtgggcacccagactgagcacgtgctggagcccaagaaatgcagagacctgtgcacctctggtcagggcaagtacagtgacaggcacaccatgaagcactcagacgatgactcagaaattgtcagcgacgacatcagtgacattttccgatttcttgatgacatgagcatcagtggctccacgggagtgatacagtcgtcctgctacaacagcacaggatccttgtctcagctccataagtcagactgcgacagttcccctgagcacaacttaaccaaaattgccaatggggtccccaacagcaagggagacaagggcaaccggcctgaaaacacccaccactcggaagaagagctgaagaccagtgtgtgcaaactggtgctcaggattggcgaaatcgaacggaagctggaatccctgtcgggtgtccgtgatgaaatctcccaggtcttgggcaaactaaataaattggaccagaaaatgcaacagcctgagaaggtgagtgtgcagatagatctgaactccttgacaagcgagggtccgtctgatgacagtgcctctccccggatgttccacgcacacagtggctcccacggacccaaactagagaacaaccctgactggtgctgctctgatgctagcgggagcaacagtgaaagcctgcgggtcaaggccttaaaaaaaagcctcttcaccaggccatcctctaggtccctaacagaggagaacagtgccacagagtccaaaattgccagcatctccaactcgcccagagactggcgcaccatcacttataccaaccgtgtgggcctcaatgaggaggagataaaagacacaggcccaggagataataaagactggcatcggaaatctaaagaggcagacaggcagtacgacattcccccacagcaccgactgcccaagcagcccaaagatggcttcctggtggagcaggtgttcagccctcacccctaccctgcctccctcaaggcccacatgaagagcaaccccctgtacacagacatgcggctgaccgagttggccgaggtgaagcggggccaaccttcttggaccattgaggagtatgcacggaatgcgggcgacaagggcaagctgacagccctggacctgcagacgcaagaatctttaaacccaaataatttagagtactggatggaagacatttatactccaggatacgattcattactaaaacgtaaagaagccgaattcagacgagccaaggtctgcaagatagctgctctgatcgctgctgcggcatgcaccgtcatcctcgttattgtcgtgcccatctgcacaatgaaatcatgagctaagaatgcaaccttacgtacagcttatgactaccaatgtcgtcgtctgtatcttagaatcttgcagcagtgaggcaacaatttgttgaaatggagatgaaatcatggaggcatttctacaaatgttgaatgaaggtggttttcagaaagtatacattctagtgagaaatctacctacctattagctttgactcaattacactctgacgcatttttagaagtgcaatatcttttcctaccaaaagaacatcatggactatcaataaatacaaattgaatattccaagccaaaaaaggaagattaattgggttctttccattttgatgatgtttcatggtggggaataagttatacagaagatatttaatacacgcctctttagaagaaactaagggaaatagcaacataagaagaaaagaggtggcttctcttttccataatgttcttagaccattgctggtgaagtaacagggtgtgtgtccctaaagggtattacttctctgtcgacttttatcaagggctactgacgtttcattcttgcccttttgtcatcaacacgacagagtgtctgcatcactgcagatcttcatggaaacattctggaccttcttccttgcacttggagtgagaaggagctggactaccaagtcaggcgtggaatgaagtatgctcagactgcatgatgggccaaggtattcaggccaggagacctcgtcctcaatccaaagtgtaggggagctgcctgctaacgatgtaaggtcagtatttgaaaatcatggccactccaaaggatctcctgttcttgctttggtgtgtggctccattccttgattttctatctcctggtggtaccagatgctctgcctctcatacatgagttgaagagtttggaacttgtccttgtgccttgaagagtagagacaatggctaaacgttgacattctatctgtaaaccatggttttcacgcaccactaatatctgccattttcaatggctttaaaaagattttgaaagcttgctcaataatgttcaataatataataataataaaggcactgaggtcttctcagttaccccaacacctactccagagttttgaatacttgtcagcagtgcaaaaaatattatctgtttaaccacttatctatatgtctatctatctatctatatgtctatctatctatctaaatacttgatttttatttattgtcttctctgttaaataacttgagagcaaggtttctttcgtgtaaaagaagctgttgtaatttcatccaaatttgatctgtttccacctgctgaatggtgctctgacaataatggaacagaaagaatccttatcagcatctgattccaatgtcttgttacaggtcaaagaaaaaaggattgacagaaactagctaccttatatatattttttgataataaggtgggatataaatagattttggtagcaagtgtaatcactccgtatgatataataaatttctaaaagatttgagagcatctcaatttttaaagcaataggagtctagcatccattctgaaaaatcgcaaataatgcttagcttgctgtgtctgattctgttgttcaccattaaggggtagacagttaattttattatgttaacaagtgagggatgaatgttttcatctgtggtgaacctttatttttagaagtcttcatgttatctatttgtattatcatgtttatgtatggattttcaatttcagtaaccgaaaacttaagccttagtatgaaaaactgaggatttataattgaaaatgaaaaaaatatgttactctctatcatcagaattatagtctttggtgctctgttttcaatggggcatattacataaggttgtttctttcaccccaaagagactactaggttaccactctgggcattgcctttccacctaacccctcaaccagtaagactctacaccatattgtagccccactattctcctctttatcacagatgaagtgccagagcatcagagataggtagctcccaacctcttgctctggatttgcagaagagggggagatgtacttacccaggataagaaaaatctagtcaaatccaccccaaatcttccatttaacaggtaggaccatcgaggctggaccaaaccactttttccactgcccttggtgaatctattcctagtggaccccatttgggcatgtgcctagctaccttgggaaggcatgactataagtcacacctcaggcttggaaatgaaaggattctatagaatattctatactttccatagctggagaggtagtcagaaattcagtcttgctctgagtccacagtagctttaaaattcaactcaacattgttgtcacgtaacggaaacatctagacctggtaataatccaggaaattgcaaaatggaggccaaaagtaaggtgggtttctctggaaaggggtcatcctcagtctgataataccaagtctgacgctgaggttatgaatcattaccatggcttggagctattggatgcttggggtcttgggatagatagaaggtgaggttcacagttggagcttttcttgccattgaccccaagctcaccccagccttccttccctgaccctgagactcaccctatctatctcccctattccctcagtttgcagaatgagcaagatagagtctggctaggagggaaacatctatccatctctctaatctttgcccatcacctcctgttgcaatgagttcccgcaggtgacatacggactggcctctctactgtactgggtgccatctcccaccatactctggcatttttatgtaaaggataatttcttgtacctgagtctaaaattacaacgttatcaaaattcacttcgtttttcctgcattttaaaagtaataaaatattatttgagattattttgaaattaaatatccttaaccaatgattaaattcataatcatttcatcttctttcataatcatttcatcttctaatctgaatttgttttgaacacagccttgcagaaaagcaaaaaatatttccccgctcaaattttgccgacattttataccagtatccccttcattacagtaaactaaatcataacttacatcatccattactagctgatcataaattgttagtattttaaggtatgcaactatgtgattgacatctgtaaggctagtttaatagacgtgctaaatatcactgttctgaatatctgtgccatagttctgatacccttattggaatcaaggcagtgctgtttctgtttacaagttatcaagataagagcagtggcatcacatttgttgttgttgtttttttttttgaaatagaaaaaaacagaagaagctctgccaacaataaaagattttgttaagtggtataaaaattgtgaatgttgaaattcaacatgcttcatattataaccaacctgcaagaatattgtggtcaattgtgtgaataccaaatcagtatatactgtatactgtactatgaaaatttgtatttaaaggcaaagatacaagtaattgttggtataattggggaaaagggtattcaatatttattaagtaacaatgagaaatgcaacaaacttccttatttatgccttatgaataaaagagtgtggaatgtaaggtgaaattttatgtgcaagatcctgaaggaatgggtattcttgaaggcagggactgtcttttctatgtttgttctgtacagctctcagcacactcttggtgcttgataaatgttatgttatataataccaataactaagcacatttttagatcttttttcaaatggcttgtgtaaaatttggttaatgtacaatggttggtttgaagctatcatgtaaaattggcctctccaaatataatcagaaataaaccgaaaaaaatat

SEQ ID NO: 1619 - protein, 916 aa, Homo sapiens
METSQETSLFLVKILEELDSKQNTVSYQDLCKSLCARFDLSQLAKLRSVLFYTACLDPNFPATLFKDKMKCTVNNQQSKKIMVAADIVTIFNLIQMNGGAAKEKLPTGRQKVRKKEASFESCRSDTEICNAAECEPLNCELSERSFSRGYPIRQSSKCRKMDCKDCPQFVPASEPNFLLGVSKEVKNRAASLDRLQALAPYSVTSPQPCEMQRTYFPMNIENESISDQDSLPINQSIKETFISNEEPFVVQSCVQKRNIFKEDFHNLMAVSPSLVGPISKAENEHREPQSRKEPHKPPFFNHSFEMPYNSQYLNPVYSPVPDKRRAKHESLDDLQASTYFGPTPVMGTQEARRCLGKPNKQTPWPAKSWSLNTEEVPDFERSFFNRNPSEEKLHYPNASSQTPNFPAPERRPTYLVPKDQQPILPIAYAAKQNGLKSKEISSPVDLEKHEPVKKFKDKSINCTSGQLSSDTSSVGTQTEHVLEPKKCRDLCTSGQGKYSDRHTMKHSDDDSEIVSDDISDIFRFLDDMSISGSTGVIQSSCYNSTGSLSQLHKSDCDSSPEHNLTKIANGVPNSKGDKGNRPENTHHSEEELKTSVCKLVLRIGEIERKLESLSGVRDEISQVLGKLNKLDQKMQQPEKVSVQIDLNSLTSEGPSDDSASPRMFHAHSGSHGPKLENNPDWCCSDASGSNSESLRVKALKKSLFTRPSSRSLTEENSATESKIASISNSPRDWRTITYTNRVGLNEEEIKDTGPGDNKDWHRKSKEADRQYDIPPQHRLPKQPKDGFLVEQVFSPHPYPASLKAHMKSNPLYTDMRLTELAEVKRGQPSWTIEEYARNAGDKGKLTALDLQTQESLNPNNLEYWMEDIYTPGYDSLLKRKEAEFRRAKVCKIAALIAAAACTVILVIVVPICTMKS

SEQ ID NO: 1620 - DNA, 1015 bp, Homo sapiens
gagaacgaaagatggcggcgcccgtaaggcggacgctgttaggggtggcggggggttggcggcggttcgagaggctctgggccggcagtctaagctctcgcagcctggctcttgcagccgcaccctcaagcaacggatccccatggcgcttgttgggcgcgttgtgcctgcagcggccacctgtagtctccaagccgttgaccccattgcaggaagagatggcgtctctactgcagcagattgagatagagagaagcctgtattcagaccacgagcttcgtgctctggatgaaaaccagcgactggcaaagaagaaagctgaccttcatgatgaagaagatgaacaggatatattgctggcgcaagatttggaagatatgtgggagcagaaatttctacagttcaaacttggagctcgcataacagaagctgatgaaaagaatgaccgaacatccctgaacaggaagctagacaggaaccttgtcctgttagtcagagagaagtttggagaccaggatgtttggatactgccccaggcagagtggcagcctggggagacccttcgaggaacagctgaacgaaccctggccacactctcagaaaacaacatggaagccaagttcctaggaaatgcaccctgtgggcactacacattcaagttcccccaggcaatgcggacagagagtaacctcggagccaaggtgttcttcttcaaagcactgctattaactggagacttttcccaggctgggaataagggccatcatgtgtgggtcactaaggatgagctgggtgactatttgaaaccaaaatacctggcccaagttaggaggtttgtttcagacctctgatgggccgagctgcctgtggacggtgctcagacaagtctgggattagagcctcaaggacattgtgtgattgcctcacatttgcaggtaatatcaagcagcaaactaaattctgagaaataaacgagtctattactaaaaaaaaaaaaaaaaaaaaaaaaaaaaaa

SEQ ID NO: 1621 - protein, 279 aa, Homo sapiens [sequence omitted]

SEQ ID NO: 1622 - DNA, 1136 bp, Homo sapiens
agtcccggaactgctagaacgaaccattcgcatatggagggggtgacccaccatctcagaacattaaaaaagggaaagaatcccctggtgaactacagtgaaagtcttattgagcatttaaatggaaataaaaatattcagtggacctaatgaagagtagatgactttcccttctgtcccctccccgacaggcactcatggtaccggcgccggcgcagctgtgactgtcgctgcagacggaaactgactggggtcaattcaagtcatgcaggctgtgagaaacgcggggtcgcggttcctgcggtcctggacttggccccagacagccggcagggtcgtggccagaacgccggccgggaccatctgcacaggcgctcgacagctccaagacgctgcggccaagcagaaagttgaacagaacgcggctcccagccacaccaagttcagcatttaccctcccattccaggagaggagagctctctgaggtgggcaggaaagaaatttgaggagatcccaattgcacacattaaagcatcccacaacaacacacagatccaggtagtctctgctagtaatgagccccttgcctttgcttcctgtggcacagagggatttcggaatgccaagaagggcacaggcatcgcagcacagacagcaggcatagccgcagcggcgagagctaaacaaaagggcgtgatccacatccgagttgtggtgaaaggcctggggccaggacgcttgtctgccatgcacggactgatcatgggcggcctggaagtgatctcaatcacagacaacaccccaatcccacacaacggctgccgccccaggaaggctcggaagctgtgatgggaaggaggcctgcacttggacctgacctcaagcctcagctccagtgggaccttgtaaaatgctccctgtcagagctctccagaatatgcttgttggagatccttcaggcagtaagggagagttttgcctccttacacagtggcctttgcttgcacctccagctggagatgggtgtgccccagaagtaagctttgcatctcttacaagaggggagctacaggggcagccgtggcctaggcccaaactctgctctgagaaaataaatatctgtaccacctgtcaa

SEQ ID NO: 1623 - protein, 194 aa, Homo sapiens
MQAVRNAGSRFLRSWTWPQTAGRVVARTPAGTICTGARQLQDAAAKQKVEQNAAPSHTKFSIYPPIPGEESSLRWAGKKFEEIPIAHIKASHNNTQIQVVSASNEPLAFASCGTEGFRNAKKGTGIAAQTAGIAAAARAKQKGVIHIRVVVKGLGPGRLSAMHGLIMGGLEVISITDNTPIPHNGCRPRKARKL

SEQ ID NO: 1624 - DNA, 1053 bp, Homo sapiens
agtcccggaactgctagaacgaaccattcgcatatggagggggtgacccaccatctcagaacattaaaaaagggaaagaatcccctggtgaactacagtgaaagtcttattgagcatttaaatggaaataaaaatattcagtggacctaatgaagagtagatgactttcccttctgtcccctccccgacaggcactcatggtaccggcgccggcgcagctgtgactgtcgctgcagacggaaactgactggggtcaattcaagtcatgcaggctgtgagaaacgcggggtcgcggttcctgcggtcctggacttggccccagacagccggcagggtcgtggccagaacgccggccgggaccatctgcacaggcgctcgacagctccaagacgctgcggccaagcagaaagttgaacagaacgcggctcccagccacaccaagttcagcacacagatccaggtagtctctgctagtaatgagccccttgcctttgcttcctgtggcacagagggatttcggaatgccaagaagggcacaggcatcgcagcacagacagcaggcatagccgcagcggcgagagctaaacaaaagggcgtgatccacatccgagttgtggtgaaaggcctggggccaggacgcttgtctgccatgcacggactgatcatgggcggcctggaagtgatctcaatcacagacaacaccccaatcccacacaacggctgccgccccaggaaggctcggaagctgtgatgggaaggaggcctgcacttggacctgacctcaagcctcagctccagtgggaccttgtaaaatgctccctgtcagagctctccagaatatgcttgttggagatccttcaggcagtaagggagagttttgcctccttacacagtggcctttgcttgcacctccagctggagatgggtgtgccccagaagtaagctttgcatctcttacaagaggggagctacaggggcagccgtggcctaggcccaaactctgctctgagaaaataaatatctgtaccaccaaaaaaaaaaaaaaaaaaaaaa

SEQ ID NO: 1625 - protein, 161 aa, Homo sapiens
MQAVRNAGSRFLRSWTWPQTAGRVVARTPAGTICTGARQLQDAAAKQKVEQNAAPSHTKFSTQIQVVSASNEPLAFASCGTEGFRNAKKGTGIAAQTAGIAAAARAKQKGVIHIRVVVKGLGPGRLSAMHGLIMGGLEVISITDNTPIPHNGCRPRKARKL

SEQ ID NO: 1626 - DNA, 978 bp, Homo sapiens
atgaatccgggactcagcacagggggatgctccgcaagactctccggcgcctgcgcggctcttccccagctccccctgcagctacgtcacctcccacggcctcctccggcgcctgcgcggctcttccccagctccccctgcagctacgtcacctcccacggcctcctccggcgcctgcgcggctcttccccagctccccctgcagctacgtcacctcccacggcctcctccggcgcctgcgcggctcttccccagctccccctgcagctacgtcacctcccacggcctcctccggcgcctgcgcggctcttccccagctccccctgcagctacgtcacctaccccggcctcctccggcgcctgcgcggctcttccccagctccccctgcagctatgtcacctcccacggcctccggcgcctgcgcggccgcggctccgccgttcaaccgcatgcgcgacagcgctgaggcccggggagcgaggatctgccgccgctcagcccggagcccgctcagaaacctcgttctgccgactcggacggcagccgccgttttggatcctgcattcatttcctcccaggctctggcttgtcccgtcgttgtggcctctgggatgtgctgcgtgccaggcgacatctctcccaccgagactcaatcctccatctccaagtccagccaaggcatccccgtcaaccctgccctcaagcagcacaacttctcccctggtctggagacagaggagaaggaggggaggaagaggcccgggagagcagagagccgtgccaacctctccagcctattcctgagggcacctgcccccatgcaacccgcgggcaggagcagttccctcgcccgccgccagggtgcgccccgctccgagcagccggacgccgtcctcccgccgcgacggggcaccagcccgccgagaaatggctgccccggggctcctgcgccctctgagaagagtttgtgggcttga

SEQ ID NO: 1627 - protein, 325 aa, Homo sapiens
MNPGLSTGGCSARLSGACAALPQLPLQLRHLPRPPPAPARLFPSSPCSYVTSHGLLRRLRGSSPAPPAATSPPTASSGACAALPQLPLQLRHLPRPPPAPARLFPSSPCSYVTYPGLLRRLRGSSPAPPAAMSPPTASGACAAAAPPFNRMRDSAEARGARICRRSARSPLRNLVLPTRTAAAVLDPAFISSQALACPVVVASGMCCVPGDISPTETQSSISKSSQGIPVNPALKQHNFSPGLETEEKEGRKRPGRAESRANLSSLFLRAPAPMQPAGRSSSLARRQGAPRSEQPDAVLPPRRGTSPPRNGCPGAPAPSEKSLWA

SEQ ID NO: 1628 - DNA, 4620 bp, Homo sapiens
ccggaggatgtgcagctgcggcggcggcgccggctacgaagaggacggggacaggcgccgtgcgaaccgagcccagccagccggaggacgcgggcagggcgggacgggagcccggactcgtctgccgccgccgtcgtcgccgtcgtgccggccccgcgtccccgcgcgcgagcgggaggagccgccgccacctcgcgcccgagccgccgctagcgcgcgccgggcatggtcccctcttaaaggcgcaggccgcggcggcgggggcgggcgtgcggaacaaagcgccggcgcggggcctgcgggcggctcgggggccgcgatgggcgcggcgggcccgcggcggcggcggcgctgcccgggccgggcctcgcggcgctagggcgggctggcctccgcgggcgggggcagcgggctgagggcgcgcggagcctgcggcggcggcggcggcggcggcggcggcccggcgggcggagcggcgcgggcatggccgcgcgcggccggcgcgcctggctcagcgtgctgctcgggctcgtcctgggcttcgtgctggcctcgcggctcgtcctgccccgggcttccgagctgaagcgagcgggcccacggcgccgcgccagccccgagggctgccggtccgggcaggcggcggcttcccaggccggcggggcgcgcggcgatgcgcgcggggcgcagctctggccgcccggctcggacccagatggcggcccgcgcgacaggaactttctcttcgtgggagtcatgaccgcccagaaatacctgcagactcgggccgtggccgcctacagaacatggtccaagacaattcctgggaaagttcagttcttctcaagtgagggttctgacacatctgtaccaattccagtagtgccactacggggtgtggacgactcctacccgccccagaagaagtccttcatgatgctcaagtacatgcacgaccactacttggacaagtatgaatggtttatgagagcagatgatgacgtgtacatcaaaggagaccgtctggagaacttcctgaggagtttgaacagcagcgagcccctctttcttgggcagacaggcctgggcaccacggaagaaatgggaaaactggccctggagcctggtgagaacttctgcatgggggggcctggcgtgatcatgagccgggaggtgcttcggagaatggtgccgcacattggcaagtgtctccgggagatgtacaccacccatgaggacgtggaggtgggaaggtgtgtccggaggtttgcaggggtgcagtgtgtctggtcttatgagatgcagcagcttttttatgagaattacgagcagaacaaaaaggggtacattagagatctccataacagtaaaattcaccaagctatcacattacaccccaacaaaaacccaccctaccagtacaggctccacagctacatgctgagccgcaagatatccgagctccgccatcgcacaatacagctgcaccgcgaaattgtcctgatgagcaaatacagcaacacagaaattcataaagaggacctccagctgggaatccctccctccttcatgaggtttcagccccgccagcgagaggagattctggaatgggagtttctgactggaaaatacttgtattcggcagttgacggccagccccctcgaagaggaatggactccgcccagagggaagccttggacgacattgtcatgcaggtcatggagatgatcaatgccaacgccaagaccagagggcgcatcattgacttcaaagagatccagtacggctaccgccgggtgaaccccatgtatggggctgagtacatcctggacctgctgcttctgtacaaaaagcacaaagggaagaaaatgacggtccctgtgaggaggcacgcgtatttacagcagactttcagcaaaatccagtttgtggagcatgaggagctggatgcacaagagttggccaagagaatcaatcaggaatctggatccttgtcctttctctcaaactccctgaagaagctcgtcccctttcagctccctgggtcgaagagtgagcacaaagaacccaaagataaaaagataaacatactgattcctttgtctgggcgtttcgacatgtttgtgagatttatgggaaactttgagaagacgtgtcttatccccaatcagaacgtcaagctcgtggttctgcttttcaattctgactccaaccctgacaaggccaaacaagttgaactgatgagagattaccgcattaagtaccctaaagccgacatgcagattttgcctgtgtctggagagttttcaagagccctggccctggaagtaggatcctcccagtttaacaatgaatctttgctcttcttctgcgacgtcgacctcgtgtttactacagaattccttcagcgatgtcgagcaaatacagttctgggccaacaaatatattttccaatcatcttcagccagtatgacccaaagattgtttatagtgggaaagttcccagtgacaaccattttgcctttactcagaaaactggcttctggagaaactatgggtttggcatcacgtgtatttataagggagatcttgtccgagtgggtggctttgatgtttccatccaaggctgggggctggaggatgtggaccttttcaacaaggttgtccaggcaggtttgaagacgtttaggagccaggaagtaggagtagtccacgtccaccatcctgtcttttgtgatcccaatcttgaccccaaacagtacaaaatgtgcttggggtccaaagcatcgacctatgggtccacacagcagctggctgagatgtggctggaaaaaaatgatccaagttacagtaaaagcagcaataataatggctcagtgaggacagcctaatgtccagctttgctggaaaagacgtttttaattatctaatttatttttcaaaaattttttgtatgatcagtttttgaagtccgtatacaaggatatattttacaagtggttttcttacataggactcctttaagattgagctttctgaacaagaaggtgatcagtgtttgcctttgaacacatcttcttgctgaacattatgtagcagacctgcttaactttgacttgaaatgtacctgatgaacaaaacttttttaaaaaaatgttttcttttgagaccctttgctccagtcctatggcagaaaacgtgaacattcctgcaaagtattattgtaacaaaacactgtaactctggtaaatgttctgttgtgattgttaacattccacagattctaccttttgtgttttgttttttttttttacaattgttttaaagccatttcatgttccagttgtaagataaggaaatgtgataatagctgtttcatcattgtcttcaggagagctttccagagttgatcatttcccctcatggtactctgctcagcatggccacgtaggttttttgtttgttttgttttgttctttttttgagacggagtctcactctgttacccaggctggaatgcagtggcgcaatcttggctcactttaacctccacttccctggttcaagcaattcccctgcctttgcctcccgagtagctgggattacaggcacacaccaccacgcccagctagtttttttgtatttttagtagagacggggtttcaccatgcaagcccagctggccacgtaggttttaaagcaaggggcgtgaagaaggcacagtgaggtatgtggctgttctcgtggtagttcattcggcctaaatagacctggcattaaatttcaagaaggatttggcattttctcttcttgacccttctctttaaagggtaaaatattaatgtttagaatgacaaagatgaattattacaataaatctgatgtacacagactgaaacacacacacatacaccctaatcaaaacgttggggaaaaatgtatttggttttgttcctttcatcctgtctgtgttatgtgggtggagatggttttcattctttcattactgttttgttttatcctttgtatctgaaatacctttaatttatttaatatctgttgttcagagctctgccatttcttgagtacctgttagttagtattatttatgtgtatcgggagtgtgtttagtctgttttatttgcagtaaaccgatctccaaagatttccttttggaaacgctttttcccctccttaatttttatattccttactgttttactaaatattaagtgttctttgacaattttggtgctcatgtgttttggggacaaaagtgaaatgaatctgtcattataccagaaagttaaattctcagatcaaatgtgccttaataaatttgttttcatttagatttcaaacagtgatagacttgccattttaatacacgtcattggagggctgcgtatttgtaaatagcctgatgctcatttggaaaaataaaccagtgaacaatatttttctattgtacttttcgaaccattttgtctcattattcctgttttagctgaagaattgtattacatttggagagtaaaaaacttaaacacgaaaaaaaaaaaaaaaaaaaaaaaaaaaaaaaaaaaaaaaaaaaaaaaaaaaaaaaaaaaaaaaaaaaa

SEQ ID NO: 1629 - protein, 802 aa, Homo sapiens
MAARGRRAWLSVLLGLVLGFVLASRLVLPRASELKRAGPRRRASPEGCRSGQAAASQAGGARGDARGAQLWPPGSDPDGGPRDRNFLFVGVMTAQKYLQTRAVAAYRTWSKTIPGKVQFFSSEGSDTSVPIPVVPLRGVDDSYPPQKKSFMMLKYMHDHYLDKYEWFMRADDDVYIKGDRLENFLRSLNSSEPLFLGQTGLGTTEEMGKLALEPGENFCMGGPGVIMSREVLRRMVPHIGKCLREMYTTHEDVEVGRCVRRFAGVQCVWSYEMQQLFYENYEQNKKGYIRDLHNSKIHQAITLHPNKNPPYQYRLHSYMLSRKISELRHRTIQLHREIVLMSKYSNTEIHKEDLQLGIPPSFMRFQPRQREEILEWEFLTGKYLYSAVDGQPPRRGMDSAQREALDDIVMQVMEMINANAKTRGRIIDFKEIQYGYRRVNPMYGAEYILDLLLLYKKHKGKKMTVPVRRHAYLQQTFSKIQFVEHEELDAQELAKRINQESGSLSFLSNSLKKLVPFQLPGSKSEHKEPKDKKINILIPLSGRFDMFVRFMGNFEKTCLIPNQNVKLVVLLFNSDSNPDKAKQVELMRDYRIKYPKADMQILPVSGEFSRALALEVGSSQFNNESLLFFCDVDLVFTTEFLQRCRANTVLGQQIYFPIIFSQYDPKIVYSGKVPSDNHFAFTQKTGFWRNYGFGITCIYKGDLVRVGGFDVSIQGWGLEDVDLFNKVVQAGLKTFRSQEVGVVHVHHPVFCDPNLDPKQYKMCLGSKASTYGSTQQLAEMWLEKNDPSYSKSSNNNGSVRTA

SEQ ID NO: 1630 - DNA, 1250 bp, Homo sapiens
acgtgtgcgtaggagcgcaccggaagcgcccggctggaggcgcggcggcagggctgggcggcggcggcggcggcggtcatggaacgccaagaggagtctctgtccgcgcggccggccctggagaccgaggggctgcgcttcctgcacaccacggtgggctccctgctggccacctatggctggtacatcgtcttcagctgcatccttctctacgtggtctttcagaagctttccgcccggctaagagccttgaggcagaggcagctggaccgagctgcggctgctgtggaacctgatgttgttgttaaacgacaagaagctttagcagctgctcgactgaaaatgcaagaagaactaaatgcgcaagttgaaaagcataaggaaaaactgaaacaacttgaagaagaaaaaaggagacagaagattgaaatgtgggacagcatgcaagaaggaaaaagttacaaaggaaatgcaaagaagccccaggaggaagacagtcctgggccttccacttcatctgtcctgaaacggaaatcggacagaaagcctttgcggggaggaggttataacccgttgtctggtgaaggaggcggagcttgctcctggagacctggacgcagaggcccgtcatctggcggatgaggctaagaatcttgttagtgtcacttttgacattagcaagatgaacccttaaccctcgattcaattgccttacgcacgcttttcacagtgactagccaaggggaggtggggttgatttctgttcctaactacacctgcatatgtcagggctccagtcagcaaaaggtatagatgttgcctctaggcatgaggtcattggtcacattctacttggagacagtgattgcattcattgatttcatggttaattgctagttggtaggtaaaggcctctagatgattagcaatcttgataaaagaggcctagtaatgttcttttgaggttagaaatccttgctgctaggacagtctctgtgacaggttgcgttgaatgatgtcttccttatcaatggtgagcccaccagtgaggattactgatgtggacagttgatggggtttgtttctgtatatttatttttatgtacagaactttgtaaaaacgaaactatttaaaaaacaagaataacatttttagcatctttattcaaggagatttatggacttcaatttgtctatcaaacattaaatagctttttattacaacctctaactaaaaaaaaaaaaaaaaa

SEQ ID NO: 1631 - protein, 189 aa, Homo sapiens
  misc_feature (188)..(188): Xaa may be selenocysteine
MERQEESLSARPALETEGLRFLHTTVGSLLATYGWYIVFSCILLYVVFQKLSARLRALRQRQLDRAAAAVEPDVVVKRQEALAAARLKMQEELNAQVEKHKEKLKQLEEEKRRQKIEMWDSMQEGKSYKGNAKKPQEEDSPGPSTSSVLKRKSDRKPLRGGGYNPLSGEGGGACSWRPGRRGPSSGGXG

SEQ ID NO: 1632 - DNA, 1292 bp, Homo sapiens
acgtgtgcgtaggagcgcaccggaagcgcccggctggaggcgcggcggcagggctgggcggcggcggcggcggcggtcatggaacgccaagaggagtctctgtccgcgcggccggccctggagaccgaggggctgcgcttcctgcacaccacggtgggctccctgctggccacctatggctggtacatcgtcttcagctgcatccttctctacgtggtctttcagaagctttccgcccggctaagagccttgaggcagaggcagctggaccgagctgcggctgctgtggaacctgatgttgttgttaaacgacaagaagctttagcagctgctcgactgaaaatgcaagaagaactaaatgcgcaagttgaaaagcataaggaaaaactgaaacaacttgaagaagaaaaaaggagacagaagattgaaatgtgggacagcatgcaagaaggaaaaagttacaaaggaaatgcaaagaagccccaggaggaagacagtcctgggccttccacttcatctgtcctgaaacggaaatcggacagaaagcctttgcggggaggaggttataacccgttgtctggtgaaggaggcggagcttgctcctggagacctggacgcagaggcccgtcatctggcggatgaggctaagaatcttgtagaatattccgtggttgcttcttgaccaagggaaatacagtctggctgtgagagacttaaaatctcttgaggagcgctctggagaatggctgaaggagaggaaacaggagccttgagcagtgtaattacaaacaaataggttggcatagtcttaagtctttgagtctagagagatttgagttttgttttgcctgtggaggcaattgggggtttcaggtcaaagagagggtcagtggaaacaagggtgggccttgtgaggtgtggggaagccctgggaccctcactccccttccagtgtgtaactggattggctcccaccagcccagaagatttacgacgtgggaaatggtatacttggattaaaatatttcatccagatttgtttacatctagagagaaccccttgtaggttataaggaaactttttaacattcttccttgaatatattttctgtagctgaaaatgtttgtgaagtggctgtcaactacacatcgcatgagtagaggggctctgggtcggggtttcatatgcagcagagcagctcccttgctgccgtccatcaagagccctcaacacaagagtttgttataaatagaaataaacgacaaaaagtagaggggtatgtttaagtaca

SEQ ID NO: 1633 - protein, 189 aa, Homo sapiens; identical to SEQ ID NO: 1631
  misc_feature (188)..(188): Xaa may be selenocysteine

SEQ ID NO: 1634 - DNA, 1068 bp, Homo sapiens
gcgcggggcacgctgggacgtctcgctggcgggaggccacgggctttccacagcgcgggggaacgggaggctgcaggatggtcaagctgacggcggagctgatcgagcaggcggcgcagtacaccaacgcggtgcgcgaccgggagctggacctccgggggtataaaattcccgtcattgaaaatctaggtgctacgttagaccagtttgatgctattgatttttctgacaatgagatcaggaaactggatggttttcctttgttgagaagactgaaaacattgttagtgaacaacaacagaatatgccgtataggtgagggacttgatcaggctctgccctgtctgacagaactcattctcaccaataatagtctcgtggaactgggtgatctggaccctctggcatctctcaaatcgctgacttacctaagtatcctaagaaatccggtaaccaataagaagcattacagattgtatgtgatttataaagttccgcaagtcagagtactggatttccagaaagtgaaactaaaagagcgtcaggaagcagagaaaatgttcaagggcaaacggggtgcacagcttgcaaaggatattgccaggagaagcaaaacttttaatccaggtgctggtttgccaactgacaaaaagaaaggtgggccatctccaggggatgtagaagcaatcaagaatgccatagcaaatgcttcaactctggctgaagtggagaggctgaaggggttgctgcagtctggtcagatccctggcagagaacgcagatcagggcccactgatgatggtgaagaagagatggaagaagacacagtcacaaacgggtcctgagcagtgaggcagatgtataataataggccctcttggaacaagtcttgcttttcgaacatggtataatagccttgtttgtgttagcaaagtggaatctatcagcattgttgaaatgcttaagactgctgctgataattttgtaatataagttttgaaatctaaatgtcaattttctacaaattataaaaataaactccactcactatgctaccaaaaaaaaaaa

SEQ ID NO: 1635 - protein, 255 aa, Homo sapiens
MVKLTAELIEQAAQYTNAVRDRELDLRGYKIPVIENLGATLDQFDAIDFSDNEIRKLDGFPLLRRLKTLLVNNNRICRIGEGLDQALPCLTELILTNNSLVELGDLDPLASLKSLTYLSILRNPVTNKKHYRLYVIYKVPQVRVLDFQKVKLKERQEAEKMFKGKRGAQLAKDIARRSKTFNPGAGLPTDKKKGGPSPGDVEAIKNAIANASTLAEVERLKGLLQSGQIPGRERRSGPTDDGEEEMEEDTVTNGS

SEQ ID NO: 1636 - DNA, 4559 bp, Homo sapiens
tcgcgggccgaggacgcctctggggcggcaccgcgtcccgagagccccagaagtcggcggggaagtttccccggtggggggcgtttcgggcctcccggacggctctcggccccggagcccggtcgcaggagcgcgggcccgggggcgggaacgcgccgcggccgcctcctcctccccggctcccgcccgcggcggtgttggcggcggcggtggcggcggcggcggcgcttccccggcgcggagcggctttaaaaggcggcactccaccccccggcgcactcgcagctcgggcgccgcgcgagcctgtcgccgctatgcctccgcgcgcgccgcctgcgcccgggccccggccgccgccccgggccgccgccgccaccgacaccgccgcgggcgcggggggcgcggggggcgcggggggcgccggcgggcccgggttccggccgctcgcgccgcgtccctggcgctggctgctgctgctggcgctgcctgccgcctgctccgcgcccccgccgcgccccgtctacaccaaccactgggcggtgcaagtgctgggcggcccggccgaggcggaccgcgtggcggcggcgcacgggtacctcaacttgggccagattggaaacctggaagattactaccatttttatcacagcaaaacctttaaaagatcaaccttgagtagcagaggccctcacaccttcctcagaatggacccccaggtgaaatggctccagcaacaggaagtgaaacgaagggtgaagagacaggtgcgaagtgacccgcaggccctttacttcaacgaccccatttggtccaacatgtggtacctgcattgtggcgacaagaacagtcgctgccggtcggaaatgaatgtccaggcagcgtggaagaggggctacacaggaaaaaacgtggtggtcaccatccttgatgatggcatagagagaaatcaccctgacctggccccaaattatgattcctacgccagctacgacgtgaacggcaatgattatgacccatctccacgatatgatgccagcaatgaaaataaacacggcactcgttgtgcgggagaagttgctgcttcagcaaacaattcctactgcatcgtgggcatagcgtacaatgccaaaataggaggcatccgcatgctggacggcgatgtcacagatgtggtcgaggcaaagtcgctgggcatcagacccaactacatcgacatttacagtgccagctgggggccggacgacgacggcaagacggtggacgggcccggccgactggctaagcaggctttcgagtatggcattaaaaagggccggcagggcctgggctccattttcgtctgggcatctgggaatggcgggagagagggggactactgctcgtgcgatggctacaccaacagcatctacaccatctccgtcagcagcgccaccgagaatggctacaagccctggtacctggaagagtgtgcctccaccctggccaccacctacagcagtggggccttttatgagcgaaaaatcgtcaccacggatctgcgtcagcgctgtaccgatggccacactgggacctcagtctctgcccccatggtggcgggcatcatcgccttggctctagaagcaaacagccagttaacctggagggacgtccagcacctgctagtgaagacatcccggccggcccacctgaaagcgagcgactggaaagtgaacggcgcgggtcataaagttagccatttctatggatttggtttggtggacgcagaagctctcgttgtggaggcaaagaagtggacagcagtgccatcgcagcacatgtgtgtggccgcctcggacaagagacccaggagcatccccttagtgcaggtgctgcggactacggccctgaccagcgcctgcgcggagcactcggaccagcgggtggtctacttggagcacgtggtggttcgcacctccatctcacacccacgccgaggagacctccagatctacctggtttctccctcgggaaccaagtctcaacttctggcaaagaggttgctggatctttccaatgaagggtttacaaactgggaattcatgactgtccactgctggggagaaaaggctgaagggcagtggaccttggaaatccaagatctgccatcccaggtccgcaacccggagaagcaagggaagttgaaagaatggagcctcatactgtatggcacagcagagcacccgtaccacaccttcagtgcccatcagtcccgctcgcggatgctggagctctcagccccagagctggagccacccaaggctgccctgtcaccctcccaggtggaagttcctgaagatgaggaagattacacagctcaatccaccccaggctctgctaatattttacagaccagtgtgtgccatccggagtgtggtgacaaaggctgtgatggccccaatgcagaccagtgcttgaactgcgtccacttcagcctggggagtgtcaagaccagcaggaagtgcgtgagtgtgtgccccttgggctactttggggacacagcagcaagacgctgtcgccggtgccacaaggggtgtgagacctgctccagcagagctgcgacgcagtgcctgtcttgccgccgcgggttctatcaccaccaggagatgaacacctgtgtgaccctctgtcctgcaggattttatgctgatgaaagtcagaaaaattgccttaaatgccacccaagctgtaaaaagtgcgtggatgaacctgagaaatgtactgtctgtaaagaaggattcagccttgcacggggcagctgcattcctgactgtgagccaggcacctactttgactcagagctgatcagatgtggggaatgccatcacacctgcggaacctgcgtggggccaggcagagaagagtgcattcactgtgcgaaaaacttccacttccacgactggaagtgtgtgccagcctgtggtgagggcttctacccagaagagatgccgggcttgccccacaaagtgtgtcgaaggtgtgacgagaactgcttgagctgtgcaggctccagcaggaactgtagcaggtgtaagacgggcttcacacagctggggacctcctgcatcaccaaccacacgtgcagcaacgctgacgagacattctgcgagatggtgaagtccaaccggctgtgcgaacggaagctcttcattcagttctgctgccgcacgtgcctcctggccgggtaagggtgcctagctgcccacagagggcaggcactcccatccatccatccgtccaccttcctccagactgtcggccagagtctgtttcaggagcggcgccctgcacctgacagctttatctccccaggagcagcatctctgagcacccaagccaggtgggtggtggctcttaaggaggtgttcctaaaatggtgatatcctctcaaatgctgcttgttggctccagtcttccgacaaactaacaggaacaaaatgaattctgggaatccacagctctggctttggagcagcttctgggaccataagtttactgaatcttcaagaccaaagcagaaaagaaaggcgcttggcatcacacatcactcttctccccgtgcttttctgcggctgtgtagtaaatctccccggcccagctggcgaaccctgggccatcctcacatgtgacaaagggccagcagtctacctgctcgttgcctgccactgagcagtctggggacggtttggtcagactataaataagataggtttgagggcataaaatgtatgaccactggggccggagtatctatttctacatagtcagctacttctgaaactgcagcagtggcttagaaagtccaattccaaagccagaccagaagattctatcccccgcagcgctctcctttgagcaagccgagctctccttgttaccgtgttctgtctgtgtcttcaggagtctcatggcctgaacgaccacctcgacctgatgcagagccttctgaggagaggcaacaggaggcattctgtggccagccaaaaggtaccccgatggccaagcaattcctctgaacaaaatgtaaagccagccatgcattgttaatcatccatcacttcccattttatggaattgcttttaaaatacatttggcctctgcccttcagaagactcgtttttaaggtggaaactcctgtgtctgtgtatattacaagcctacatgacacagttggatttattctgccaaacctgtgtaggcattttataagctacatgttctaatttttaccgatgttaattattttgacaaatatttcatatattttcattgaaatgcacagatctgcttgatcaattcccttgaatagggaagtaacatttgccttaaattttttcgacctcgtctttctccatattgtcctgctcccctgtttgacgacagtgcatttgccttgtcacctgtgagctggagagaacccagatgttgtttattgaatctacaactctgaaagagaaatcaatgaagcaagtacaatgttaaccctaaattaataaaagagttaacatcccatggcaaaaaa

SEQ ID NO: 1637 - protein, 969 aa, Homo sapiens
MPPRAPPAPGPRPPPRAAAATDTAAGAGGAGGAGGAGGPGFRPLAPRPWRWLLLLALPAACSAPPPRPVYTNHWAVQVLGGPAEADRVAAAHGYLNLGQIGNLEDYYHFYHSKTFKRSTLSSRGPHTFLRMDPQVKWLQQQEVKRRVKRQVRSDPQALYFNDPIWSNMWYLHCGDKNSRCRSEMNVQAAWKRGYTGKNVVVTILDDGIERNHPDLAPNYDSYASYDVNGNDYDPSPRYDASNENKHGTRCAGEVAASANNSYCIVGIAYNAKIGGIRMLDGDVTDVVEAKSLGIRPNYIDIYSASWGPDDDGKTVDGPGRLAKQAFEYGIKKGRQGLGSIFVWASGNGGREGDYCSCDGYTNSIYTISVSSATENGYKPWYLEECASTLATTYSSGAFYERKIVTTDLRQRCTDGHTGTSVSAPMVAGIIALALEANSQLTWRDVQHLLVKTSRPAHLKASDWKVNGAGHKVSHFYGFGLVDAEALVVEAKKWTAVPSQHMCVAASDKRPRSIPLVQVLRTTALTSACAEHSDQRVVYLEHVVVRTSISHPRRGDLQIYLVSPSGTKSQLLAKRLLDLSNEGFTNWEFMTVHCWGEKAEGQWTLEIQDLPSQVRNPEKQGKLKEWSLILYGTAEHPYHTFSAHQSRSRMLELSAPELEPPKAALSPSQVEVPEDEEDYTAQSTPGSANILQTSVCHPECGDKGCDGPNADQCLNCVHFSLGSVKTSRKCVSVCPLGYFGDTAARRCRRCHKGCETCSSRAATQCLSCRRGFYHHQEMNTCVTLCPAGFYADESQKNCLKCHPSCKKCVDEPEKCTVCKEGFSLARGSCIPDCEPGTYFDSELIRCGECHHTCGTCVGPGREECIHCAKNFHFHDWKCVPACGEGFYPEEMPGLPHKVCRRCDENCLSCAGSSRNCSRCKTGFTQLGTSCITNHTCSNADETFCEMVKSNRLCERKLFIQFCCRTCLLAG

SEQ ID NO: 1638 - DNA, 4520 bp, Homo sapiens
tcgcgggccgaggacgcctctggggcggcaccgcgtcccgagagccccagaagtcggcggggaagtttccccggtggggggcgtttcgggcctcccggacggctctcggccccggagcccggtcgcaggagcgcgggcccgggggcgggaacgcgccgcggccgcctcctcctccccggctcccgcccgcggcggtgttggcggcggcggtggcggcggcggcggcgcttccccggcgcggagcggctttaaaaggcggcactccaccccccggcgcactcgcagctcgggcgccgcgcgagcctgtcgccgctatgcctccgcgcgcgccgcctgcgcccgggccccggccgccgccccgggccgccgccgccaccgacaccgccgcgggcgcggggggcgcggggggcgcggggggcgccggcgggcccgggttccggccgctcgcgccgcgtccctggcgctggctgctgctgctggcgctgcctgccgcctgctccgcgcccccgccgcgccccgtctacaccaaccactgggcggtgcaagtgctgggcggcccggccgaggcggaccgcgtggcggcggcgcacgggtacctcaacttgggccagattggaaacctggaagattactaccatttttatcacagcaaaacctttaaaagatcaaccttgagtagcagaggccctcacaccttcctcagaatggacccccaggtgaaatggctccagcaacaggaagtgaaacgaagggtgaagagacaggtgcgaagtgacccgcaggccctttacttcaacgaccccatttggtccaacatgtggtacctgcattgtggcgacaagaacagtcgctgccggtcggaaatgaatgtccaggcagcgtggaagaggggctacacaggaaaaaacgtggtggtcaccatccttgatgatggcatagagagaaatcaccctgacctggccccaaattatgattcctacgccagctacgacgtgaacggcaatgattatgacccatctccacgatatgatgccagcaatgaaaataaacacggcactcgttgtgcgggagaagttgctgcttcagcaaacaattcctactgcatcgtgggcatagcgtacaatgccaaaataggaggcatccgcatgctggacggcgatgtcacagatgtggtcgaggcaaagtcgctgggcatcagacccaactacatcgacatttacagtgccagctgggggccggacgacgacggcaagacggtggacgggcccggccgactggctaagcaggctttcgagtatggcattaaaaagggccggcagggcctgggctccattttcgtctgggcatctgggaatggcgggagagagggggactactgctcgtgcgatggctacaccaacagcatctacaccatctccgtcagcagcgccaccgagaatggctacaagccctggtacctggaagagtgtgcctccaccctggccaccacctacagcagtggggccttttatgagcgaaaaatcgtcaccacggatctgcgtcagcgctgtaccgatggccacactgggacctcagtctctgcccccatggtggcgggcatcatcgccttggctctagaagcaaacagccagttaacctggagggacgtccagcacctgctagtgaagacatcccggccggcccacctgaaagcgagcgactggaaagtgaacggcgcgggtcataaagttagccatttctatggatttggtttggtggacgcagaagctctcgttgtggaggcaaagaagtggacagcagtgccatcgcagcacatgtgtgtggccgcctcggacaagagacccaggagcatccccttagtgcaggtgctgcggactacggccctgaccagcgcctgcgcggagcactcggaccagcgggtggtctacttggagcacgtggtggttcgcacctccatctcacacccacgccgaggagacctccagatctacctggtttctccctcgggaaccaagtctcaacttctggcaaagaggttgctggatctttccaatgaagggtttacaaactgggaattcatgactgtccactgctggggagaaaaggctgaagggcagtggaccttggaaatccaagatctgccatcccaggtccgcaacccggagaagcaagggaagttgaaagaatggagcctcatactgtatggcacagcagagcacccgtaccacaccttcagtgcccatcagtcccgctcgcggatgctggagctctcagccccagagctggagccacccaaggctgccctgtcaccctcccaggtggaagttcctgaagatgaggaagattacacaggtgtgtgccatccggagtgtggtgacaaaggctgtgatggccccaatgcagaccagtgcttgaactgcgtccacttcagcctggggagtgtcaagaccagcaggaagtgcgtgagtgtgtgccccttgggctactttggggacacagcagcaagacgctgtcgccggtgccacaaggggtgtgagacctgctccagcagagctgcgacgcagtgcctgtcttgccgccgcgggttctatcaccaccaggagatgaacacctgtgtgaccctctgtcctgcaggattttatgctgatgaaagtcagaaaaattgccttaaatgccacccaagctgtaaaaagtgcgtggatgaacctgagaaatgtactgtctgtaaagaaggattcagccttgcacggggcagctgcattcctgactgtgagccaggcacctactttgactcagagctgatcagatgtggggaatgccatcacacctgcggaacctgcgtggggccaggcagagaagagtgcattcactgtgcgaaaaacttccacttccacgactggaagtgtgtgccagcctgtggtgagggcttctacccagaagagatgccgggcttgccccacaaagtgtgtcgaaggtgtgacgagaactgcttgagctgtgcaggctccagcaggaactgtagcaggtgtaagacgggcttcacacagctggggacctcctgcatcaccaaccacacgtgcagcaacgctgacgagacattctgcgagatggtgaagtccaaccggctgtgcgaacggaagctcttcattcagttctgctgccgcacgtgcctcctggccgggtaagggtgcctagctgcccacagagggcaggcactcccatccatccatccgtccaccttcctccagactgtcggccagagtctgtttcaggagcggcgccctgcacctgacagctttatctccccaggagcagcatctctgagcacccaagccaggtgggtggtggctcttaaggaggtgttcctaaaatggtgatatcctctcaaatgctgcttgttggctccagtcttccgacaaactaacaggaacaaaatgaattctgggaatccacagctctggctttggagcagcttctgggaccataagtttactgaatcttcaagaccaaagcagaaaagaaaggcgcttggcatcacacatcactcttctccccgtgcttttctgcggctgtgtagtaaatctccccggcccagctggcgaaccctgggccatcctcacatgtgacaaagggccagcagtctacctgctcgttgcctgccactgagcagtctggggacggtttggtcagactataaataagataggtttgagggcataaaatgtatgaccactggggccggagtatctatttctacatagtcagctacttctgaaactgcagcagtggcttagaaagtccaattccaaagccagaccagaagattctatcccccgcagcgctctcctttgagcaagccgagctctccttgttaccgtgttctgtctgtgtcttcaggagtctcatggcctgaacgaccacctcgacctgatgcagagccttctgaggagaggcaacaggaggcattctgtggccagccaaaaggtaccccgatggccaagcaattcctctgaacaaaatgtaaagccagccatgcattgttaatcatccatcacttcccattttatggaattgcttttaaaatacatttggcctctgcccttcagaagactcgtttttaaggtggaaactcctgtgtctgtgtatattacaagcctacatgacacagttggatttattctgccaaacctgtgtaggcattttataagctacatgttctaatttttaccgatgttaattattttgacaaatatttcatatattttcattgaaatgcacagatctgcttgatcaattcccttgaatagggaagtaacatttgccttaaattttttcgacctcgtctttctccatattgtcctgctcccctgtttgacgacagtgcatttgccttgtcacctgtgagctggagagaacccagatgttgtttattgaatctacaactctgaaagagaaatcaatgaagcaagtacaatgttaaccctaaattaataaaagagttaacatcccatggcaaaaaa

SEQ ID NO: 1639 - protein, 956 aa, Homo sapiens
MPPRAPPAPGPRPPPRAAAATDTAAGAGGAGGAGGAGGPGFRPLAPRPWRWLLLLALPAACSAPPPRPVYTNHWAVQVLGGPAEADRVAAAHGYLNLGQIGNLEDYYHFYHSKTFKRSTLSSRGPHTFLRMDPQVKWLQQQEVKRRVKRQVRSDPQALYFNDPIWSNMWYLHCGDKNSRCRSEMNVQAAWKRGYTGKNVVVTILDDGIERNHPDLAPNYDSYASYDVNGNDYDPSPRYDASNENKHGTRCAGEVAASANNSYCIVGIAYNAKIGGIRMLDGDVTDVVEAKSLGIRPNYIDIYSASWGPDDDGKTVDGPGRLAKQAFEYGIKKGRQGLGSIFVWASGNGGREGDYCSCDGYTNSIYTISVSSATENGYKPWYLEECASTLATTYSSGAFYERKIVTTDLRQRCTDGHTGTSVSAPMVAGIIALALEANSQLTWRDVQHLLVKTSRPAHLKASDWKVNGAGHKVSHFYGFGLVDAEALVVEAKKWTAVPSQHMCVAASDKRPRSIPLVQVLRTTALTSACAEHSDQRVVYLEHVVVRTSISHPRRGDLQIYLVSPSGTKSQLLAKRLLDLSNEGFTNWEFMTVHCWGEKAEGQWTLEIQDLPSQVRNPEKQGKLKEWSLILYGTAEHPYHTFSAHQSRSRMLELSAPELEPPKAALSPSQVEVPEDEEDYTGVCHPECGDKGCDGPNADQCLNCVHFSLGSVKTSRKCVSVCPLGYFGDTAARRCRRCHKGCETCSSRAATQCLSCRRGFYHHQEMNTCVTLCPAGFYADESQKNCLKCHPSCKKCVDEPEKCTVCKEGFSLARGSCIPDCEPGTYFDSELIRCGECHHTCGTCVGPGREECIHCAKNFHFHDWKCVPACGEGFYPEEMPGLPHKVCRRCDENCLSCAGSSRNCSRCKTGFTQLGTSCITNHTCSNADETFCEMVKSNRLCERKLFIQFCCRTCLLAG

SEQ ID NO: 1640 - DNA, 3372 bp, Homo sapiens
tcgcgggccgaggacgcctctggggcggcaccgcgtcccgagagccccagaagtcggcggggaagtttccccggtggggggcgtttcgggcctcccggacggctctcggccccggagcccggtcgcaggagcgcgggcccgggggcgggaacgcgccgcggccgcctcctcctccccggctcccgcccgcggcggtgttggcggcggcggtggcggcggcggcggcgcttccccggcgcggagcggctttaaaaggcggcactccaccccccggcgcactcgcagctcgggcgccgcgcgagcctgtcgccgctatgcctccgcgcgcgccgcctgcgcccgggccccggccgccgccccgggccgccgccgccaccgacaccgccgcgggcgcggggggcgcggggggcgcggggggcgccggcgggcccgggttccggccgctcgcgccgcgtccctggcgctggctgctgctgctggcgctgcctgccgcctgctccgcgcccccgccgcgccccgtctacaccaaccactgggcggtgcaagtgctgggcggcccggccgaggcggaccgcgtggcggcggcgcacgggtacctcaacttgggccagattggaaacctggaagattactaccatttttatcacagcaaaacctttaaaagatcaaccttgagtagcagaggccctcacaccttcctcagaatggacccccaggtgaaatggctccagcaacaggaagtgaaacgaagggtgaagagacaggtgcgaagtgacccgcaggccctttacttcaacgaccccatttggtccaacatgtggtacctgcattgtggcgacaagaacagtcgctgccggtcggaaatgaatgtccaggcagcgtggaagaggggctacacaggaaaaaacgtggtggtcaccatccttgatgatggcatagagagaaatcaccctgacctggccccaaattatgattcctacgccagctacgacgtgaacggcaatgattatgacccatctccacgatatgatgccagcaatgaaaataaacacggcactcgttgtgcgggagaagttgctgcttcagcaaacaattcctactgcatcgtgggcatagcgtacaatgccaaaataggaggcatccgcatgctggacggcgatgtcacagatgtggtcgaggcaaagtcgctgggcatcagacccaactacatcgacatttacagtgccagctgggggccggacgacgacggcaagacggtggacgggcccggccgactggctaagcaggctttcgagtatggcattaaaaagggccggcagggcctgggctccattttcgtctgggcatctgggaatggcgggagagagggggactactgctcgtgcgatggctacaccaacagcatctacaccatctccgtcagcagcgccaccgagaatggctacaagccctggtacctggaagagtgtgcctccaccctggccaccacctacagcagtggggccttttatgagcgaaaaatcgtcaccacggatctgcgtcagcgctgtaccgatggccacactgggacctcagtctctgcccccatggtggcgggcatcatcgccttggctctagaagcaaacagccagttaacctggagggacgtccagcacctgctagtgaagacatcccggccggcccacctgaaagcgagcgactggaaagtgaacggcgcgggtcataaagttagccatttctatggatttggtttggtggacgcagaagctctcgttgtggaggcaaagaagtggacagcagtgccatcgcagcacatgtgtgtggccgcctcggacaagagacccaggagcatccccttagtgcaggtgctgcggactacggccctgaccagcgcctgcgcggagcactcggaccagcgggtggtctacttggagcacgtggtggttcgcacctccatctcacacccacgccgaggagacctccagatctacctggtttctccctcgggaaccaagtctcaacttctggcaaagaggttgctggatctttccaatgaagggtttacaaactgggaattcatgactgtccactgctggggagaaaaggctgaagggcagtggaccttggaaatccaagatctgccatcccaggtccgcaacccggagaagcaagggaagttgaaagaatggagcctcatactgtatggcacagcagagcacccgtaccacaccttcagtgcccatcagtcccgctcgcggatgctggagctctcagccccagagctggagccacccaaggctgccctgtcaccctcccaggtggaagttcctgaagatgaggaagattacacagctcaatccaccccaggctctgctaatattttacagaccagtgtgtgccatccggagtgtggtgacaaaggctgtgatggccccaatgcagaccagtgcttgaactgcgtccacttcagcctggggagtgtcaagaccagcaggaagtgcgtgagtgtgtgccccttgggctactttggggacacagcagcaagacgctgtcgccggtgccacaaggggtgtgagacctgctccagcagagctgcgacgcagtgcctgtcttgccgccgcgggttctatcaccaccaggagatgaacacctgtgtgaccctctgtcctgcaggattttatgctgatgaaagtcagaaaaattgccttaaatgccacccaagctgtaaaaagtgcgtggatgaacctgagaaatgtactgtctgtaaagaaggattcagccttgcacggggcagctgcattcctgactgtgagccaggcacctactttgactcagagctgatcagatgtggggaatgccatcacacctgcggaacctgcgtggggccaggcagagaagagtgcattcactgtgcgaaaaacttccacttccacgactggaagtgtgtgccagcctgtggtgagggcttctacccagaagagatgccgggcttgccccacaaagtgtgtcgaaggtacggtcctcctggcggggaacggcaggcagctgtgtccagcaaaggagtgcctggagggcagagtctggcagcatcttccccaggggccggggagggcatgttgcatcaccccactgtggacaggagcccatttacagagctgctgaggggccttcgtccctttgttcactggatgcatatttgttgggtccctgctgtgggcagacaccgtgcagcagcgggataagatgggaagcagaatagcaaggtgctcacaccccattggtggactacgcgggacgtccctgcccatgtcgcgctcagcatgcatcctttgcactgtcgataatcagagaaaccatgttttgggttaaaaa

SEQ ID NO: 1641 - protein, 975 aa, Homo sapiens
MPPRAPPAPGPRPPPRAAAATDTAAGAGGAGGAGGAGGPGFRPLAPRPWRWLLLLALPAACSAPPPRPVYTNHWAVQVLGGPAEADRVAAAHGYLNLGQIGNLEDYYHFYHSKTFKRSTLSSRGPHTFLRMDPQVKWLQQQEVKRRVKRQVRSDPQALYFNDPIWSNMWYLHCGDKNSRCRSEMNVQAAWKRGYTGKNVVVTILDDGIERNHPDLAPNYDSYASYDVNGNDYDPSPRYDASNENKHGTRCAGEVAASANNSYCIVGIAYNAKIGGIRMLDGDVTDVVEAKSLGIRPNYIDIYSASWGPDDDGKTVDGPGRLAKQAFEYGIKKGRQGLGSIFVWASGNGGREGDYCSCDGYTNSIYTISVSSATENGYKPWYLEECASTLATTYSSGAFYERKIVTTDLRQRCTDGHTGTSVSAPMVAGIIALALEANSQLTWRDVQHLLVKTSRPAHLKASDWKVNGAGHKVSHFYGFGLVDAEALVVEAKKWTAVPSQHMCVAASDKRPRSIPLVQVLRTTALTSACAEHSDQRVVYLEHVVVRTSISHPRRGDLQIYLVSPSGTKSQLLAKRLLDLSNEGFTNWEFMTVHCWGEKAEGQWTLEIQDLPSQVRNPEKQGKLKEWSLILYGTAEHPYHTFSAHQSRSRMLELSAPELEPPKAALSPSQVEVPEDEEDYTAQSTPGSANILQTSVCHPECGDKGCDGPNADQCLNCVHFSLGSVKTSRKCVSVCPLGYFGDTAARRCRRCHKGCETCSSRAATQCLSCRRGFYHHQEMNTCVTLCPAGFYADESQKNCLKCHPSCKKCVDEPEKCTVCKEGFSLARGSCIPDCEPGTYFDSELIRCGECHHTCGTCVGPGREECIHCAKNFHFHDWKCVPACGEGFYPEEMPGLPHKVCRRYGPPGGERQAAVSSKGVPGGQSLAASSPGAGEGMLHHPTVDRSPFTELLRGLRPFVHWMHICWVPAVGRHRAAAG

SEQ ID NO: 1642 - DNA, 3333 bp, Homo sapiens
tcgcgggccgaggacgcctctggggcggcaccgcgtcccgagagccccagaagtcggcggggaagtttccccggtggggggcgtttcgggcctcccggacggctctcggccccggagcccggtcgcaggagcgcgggcccgggggcgggaacgcgccgcggccgcctcctcctccccggctcccgcccgcggcggtgttggcggcggcggtggcggcggcggcggcgcttccccggcgcggagcggctttaaaaggcggcactccaccccccggcgcactcgcagctcgggcgccgcgcgagcctgtcgccgctatgcctccgcgcgcgccgcctgcgcccgggccccggccgccgccccgggccgccgccgccaccgacaccgccgcgggcgcggggggcgcggggggcgcggggggcgccggcgggcccgggttccggccgctcgcgccgcgtccctggcgctggctgctgctgctggcgctgcctgccgcctgctccgcgcccccgccgcgccccgtctacaccaaccactgggcggtgcaagtgctgggcggcccggccgaggcggaccgcgtggcggcggcgcacgggtacctcaacttgggccagattggaaacctggaagattactaccatttttatcacagcaaaacctttaaaagatcaaccttgagtagcagaggccctcacaccttcctcagaatggacccccaggtgaaatggctccagcaacaggaagtgaaacgaagggtgaagagacaggtgcgaagtgacccgcaggccctttacttcaacgaccccatttggtccaacatgtggtacctgcattgtggcgacaagaacagtcgctgccggtcggaaatgaatgtccaggcagcgtggaagaggggctacacaggaaaaaacgtggtggtcaccatccttgatgatggcatagagagaaatcaccctgacctggccccaaattatgattcctacgccagctacgacgtgaacggcaatgattatgacccatctccacgatatgatgccagcaatgaaaataaacacggcactcgttgtgcgggagaagttgctgcttcagcaaacaattcctactgcatcgtgggcatagcgtacaatgccaaaataggaggcatccgcatgctggacggcgatgtcacagatgtggtcgaggcaaagtcgctgggcatcagacccaactacatcgacatttacagtgccagctgggggccggacgacgacggcaagacggtggacgggcccggccgactggctaagcaggctttcgagtatggcattaaaaagggccggcagggcctgggctccattttcgtctgggcatctgggaatggcgggagagagggggactactgctcgtgcgatggctacaccaacagcatctacaccatctccgtcagcagcgccaccgagaatggctacaagccctggtacctggaagagtgtgcctccaccctggccaccacctacagcagtggggccttttatgagcgaaaaatcgtcaccacggatctgcgtcagcgctgtaccgatggccacactgggacctcagtctctgcccccatggtggcgggcatcatcgccttggctctagaagcaaacagccagttaacctggagggacgtccagcacctgctagtgaagacatcccggccggcccacctgaaagcgagcgactggaaagtgaacggcgcgggtcataaagttagccatttctatggatttggtttggtggacgcagaagctctcgttgtggaggcaaagaagtggacagcagtgccatcgcagcacatgtgtgtggccgcctcggacaagagacccaggagcatccccttagtgcaggtgctgcggactacggccctgaccagcgcctgcgcggagcactcggaccagcgggtggtctacttggagcacgtggtggttcgcacctccatctcacacccacgccgaggagacctccagatctacctggtttctccctcgggaaccaagtctcaacttctggcaaagaggttgctggatctttccaatgaagggtttacaaactgggaattcatgactgtccactgctggggagaaaaggctgaagggcagtggaccttggaaatccaagatctgccatcccaggtccgcaacccggagaagcaagggaagttgaaagaatggagcctcatactgtatggcacagcagagcacccgtaccacaccttcagtgcccatcagtcccgctcgcggatgctggagctctcagccccagagctggagccacccaaggctgccctgtcaccctcccaggtggaagttcctgaagatgaggaagattacacaggtgtgtgccatccggagtgtggtgacaaaggctgtgatggccccaatgcagaccagtgcttgaactgcgtccacttcagcctggggagtgtcaagaccagcaggaagtgcgtgagtgtgtgccccttgggctactttggggacacagcagcaagacgctgtcgccggtgccacaaggggtgtgagacctgctccagcagagctgcgacgcagtgcctgtcttgccgccgcgggttctatcaccaccaggagatgaacacctgtgtgaccctctgtcctgcaggattttatgctgatgaaagtcagaaaaattgccttaaatgccacccaagctgtaaaaagtgcgtggatgaacctgagaaatgtactgtctgtaaagaaggattcagccttgcacggggcagctgcattcctgactgtgagccaggcacctactttgactcagagctgatcagatgtggggaatgccatcacacctgcggaacctgcgtggggccaggcagagaagagtgcattcactgtgcgaaaaacttccacttccacgactggaagtgtgtgccagcctgtggtgagggcttctacccagaagagatgccgggcttgccccacaaagtgtgtcgaaggtacggtcctcctggcggggaacggcaggcagctgtgtccagcaaaggagtgcctggagggcagagtctggcagcatcttccccaggggccggggagggcatgttgcatcaccccactgtggacaggagcccatttacagagctgctgaggggccttcgtccctttgttcactggatgcatatttgttgggtccctgctgtgggcagacaccgtgcagcagcgggataagatgggaagcagaatagcaaggtgctcacaccccattggtggactacgcgggacgtccctgcccatgtcgcgctcagcatgcatcctttgcactgtcgataatcagagaaaccatgttttgggttaaaaa

SEQ ID NO: 1643 - protein, 962 aa, Homo sapiens
MPPRAPPAPGPRPPPRAAAATDTAAGAGGAGGAGGAGGPGFRPLAPRPWRWLLLLALPAACSAPPPRPVYTNHWAVQVLGGPAEADRVAAAHGYLNLGQIGNLEDYYHFYHSKTFKRSTLSSRGPHTFLRMDPQVKWLQQQEVKRRVKRQVRSDPQALYFNDPIWSNMWYLHCGDKNSRCRSEMNVQAAWKRGYTGKNVVVTILDDGIERNHPDLAPNYDSYASYDVNGNDYDPSPRYDASNENKHGTRCAGEVAASANNSYCIVGIAYNAKIGGIRMLDGDVTDVVEAKSLGIRPNYIDIYSASWGPDDDGKTVDGPGRLAKQAFEYGIKKGRQGLGSIFVWASGNGGREGDYCSCDGYTNSIYTISVSSATENGYKPWYLEECASTLATTYSSGAFYERKIVTTDLRQRCTDGHTGTSVSAPMVAGIIALALEANSQLTWRDVQHLLVKTSRPAHLKASDWKVNGAGHKVSHFYGFGLVDAEALVVEAKKWTAVPSQHMCVAASDKRPRSIPLVQVLRTTALTSACAEHSDQRVVYLEHVVVRTSISHPRRGDLQIYLVSPSGTKSQLLAKRLLDLSNEGFTNWEFMTVHCWGEKAEGQWTLEIQDLPSQVRNPEKQGKLKEWSLILYGTAEHPYHTFSAHQSRSRMLELSAPELEPPKAALSPSQVEVPEDEEDYTGVCHPECGDKGCDGPNADQCLNCVHFSLGSVKTSRKCVSVCPLGYFGDTAARRCRRCHKGCETCSSRAATQCLSCRRGFYHHQEMNTCVTLCPAGFYADESQKNCLKCHPSCKKCVDEPEKCTVCKEGFSLARGSCIPDCEPGTYFDSELIRCGECHHTCGTCVGPGREECIHCAKNFHFHDWKCVPACGEGFYPEEMPGLPHKVCRRYGPPGGERQAAVSSKGVPGGQSLAASSPGAGEGMLHHPTVDRSPFTELLRGLRPFVHWMHICWVPAVGRHRAAAG

SEQ ID NO: 1644 - DNA, 2302 bp, Homo sapiens
tcgcgggccgaggacgcctctggggcggcaccgcgtcccgagagccccagaagtcggcggggaagtttccccggtggggggcgtttcgggcctcccggacggctctcggccccggagcccggtcgcaggagcgcgggcccgggggcgggaacgcgccgcggccgcctcctcctccccggctcccgcccgcggcggtgttggcggcggcggtggcggcggcggcggcgcttccccggcgcggagcggctttaaaaggcggcactccaccccccggcgcactcgcagctcgggcgccgcgcgagcctgtcgccgctatgcctccgcgcgcgccgcctgcgcccgggccccggccgccgccccgggccgccgccgccaccgacaccgccgcgggcgcggggggcgcggggggcgcggggggcgccggcgggcccgggttccggccgctcgcgccgcgtccctggcgctggctgctgctgctggcgctgcctgccgcctgctccgcgcccccgccgcgccccgtctacaccaaccactgggcggtgcaagtgctgggcggcccggccgaggcggaccgcgtggcggcggcgcacgggtacctcaacttgggccagattggaaacctggaagattactaccatttttatcacagcaaaacctttaaaagatcaaccttgagtagcagaggccctcacaccttcctcagaatggacccccaggtgaaatggctccagcaacaggaagtgaaacgaagggtgaagagacaggtgcgaagtgacccgcaggccctttacttcaacgaccccatttggtccaacatgtggtacctgcattgtggcgacaagaacagtcgctgccggtcggaaatgaatgtccaggcagcgtggaagaggggctacacaggaaaaaacgtggtggtcaccatccttgatgatggcatagagagaaatcaccctgacctggccccaaattatgattcctacgccagctacgacgtgaacggcaatgattatgacccatctccacgatatgatgccagcaatgaaaataaacacggcactcgttgtgcgggagaagttgctgcttcagcaaacaattcctactgcatcgtgggcatagcgtacaatgccaaaataggaggcatccgcatgctggacggcgatgtcacagatgtggtcgaggcaaagtcgctgggcatcagacccaactacatcgacatttacagtgccagctgggggccggacgacgacggcaagacggtggacgggcccggccgactggctaagcaggctttcgagtatggcattaaaaagggccggcagggcctgggctccattttcgtctgggcatctgggaatggcgggagagagggggactactgctcgtgcgatggctacaccaacagcatctacaccatctccgtcagcagcgccaccgagaatggctacaagccctggtacctggaagagtgtgcctccaccctggccaccacctacagcagtggggccttttatgagcgaaaaatcgtcaccacggatctgcgtcagcgctgtaccgatggccacactgggacctcagtctctgcccccatggtggcgggcatcatcgccttggctctagaagcaaacagccagttaacctggagggacgtccagcacctgctagtgaagacatcccggccggcccacctgaaagcgagcgactggaaagtgaacggcgcgggtcataaaggtgcggcagtggcgttctggtggaccattgggtggccctggaatgtgtaggaaggggtgtcatgaattccttaaaaggactctccaaatagcattagttgttattattaattgtgtgtcacaagaatttaaaacgcatgtgcagctatttaagaaaagtatcccggaagctcacagtgacattacggaagaaccctcaggtcacaagagtctggggtctcctatactctataactttggccacaccgagacaccacctataccaatatttactcatagttctctttaagccaggagcaatgacgtgtgcctatagtcgcagctactagggaagttgaggcaggaggattgcttgagcccaggaatttgagtctagcctggacaacacagcaggactccatctcttaaaaaaaaaattacttcccccactacttttttttgacataaaaaaatgtattttaaaaggaaactgtactacatctagttaatcataggtttgatatgtagttacgtattttttctaatgtgcattaaaacaaatccataattattaaaataaatgttgtttgtgtgcc

SEQ ID NO: 1645 - protein, 487 aa, Homo sapiens
MPPRAPPAPGPRPPPRAAAATDTAAGAGGAGGAGGAGGPGFRPLAPRPWRWLLLLALPAACSAPPPRPVYTNHWAVQVLGGPAEADRVAAAHGYLNLGQIGNLEDYYHFYHSKTFKRSTLSSRGPHTFLRMDPQVKWLQQQEVKRRVKRQVRSDPQALYFNDPIWSNMWYLHCGDKNSRCRSEMNVQAAWKRGYTGKNVVVTILDDGIERNHPDLAPNYDSYASYDVNGNDYDPSPRYDASNENKHGTRCAGEVAASANNSYCIVGIAYNAKIGGIRMLDGDVTDVVEAKSLGIRPNYIDIYSASWGPDDDGKTVDGPGRLAKQAFEYGIKKGRQGLGSIFVWASGNGGREGDYCSCDGYTNSIYTISVSSATENGYKPWYLEECASTLATTYSSGAFYERKIVTTDLRQRCTDGHTGTSVSAPMVAGIIALALEANSQLTWRDVQHLLVKTSRPAHLKASDWKVNGAGHKGAAVAFWWTIGWPWNV

SEQ ID NO: 1646 - DNA, 3208 bp, Homo sapiens
tcgcgggccgaggacgcctctggggcggcaccgcgtcccgagagccccagaagtcggcggggaagtttccccggtggggggcgtttcgggcctcccggacggctctcggccccggagcccggtcgcaggagcgcgggcccgggggcgggaacgcgccgcggccgcctcctcctccccggctcccgcccgcggcggtgttggcggcggcggtggcggcggcggcggcgcttccccggcgcggagcggctttaaaaggcggcactccaccccccggcgcactcgcagctcgggcgccgcgcgagcctgtcgccgctatgcctccgcgcgcgccgcctgcgcccgggccccggccgccgccccgggccgccgccgccaccgacaccgccgcgggcgcggggggcgcggggggcgcggggggcgccggcgggcccgggttccggccgctcgcgccgcgtccctggcgctggctgctgctgctggcgctgcctgccgcctgctccgcgcccccgccgcgccccgtctacaccaaccactgggcggtgcaagtgctgggcggcccggccgaggcggaccgcgtggcggcggcgcacgggtacctcaacttgggccagattggaaacctggaagattactaccatttttatcacagcaaaacctttaaaagatcaaccttgagtagcagaggccctcacaccttcctcagaatggacccccaggtgaaatggctccagcaacaggaagtgaaacgaagggtgaagagacaggtgcgaagtgacccgcaggccctttacttcaacgaccccatttggtccaacatgtggtacctgcattgtggcgacaagaacagtcgctgccggtcggaaatgaatgtccaggcagcgtggaagaggggctacacaggaaaaaacgtggtggtcaccatccttgatgatggcatagagagaaatcaccctgacctggccccaaattatgattcctacgccagctacgacgtgaacggcaatgattatgacccatctccacgatatgatgccagcaatgaaaataaacacggcactcgttgtgcgggagaagttgctgcttcagcaaacaattcctactgcatcgtgggcatagcgtacaatgccaaaataggaggcatccgcatgctggacggcgatgtcacagatgtggtcgaggcaaagtcgctgggcatcagacccaactacatcgacatttacagtgccagctgggggccggacgacgacggcaagacggtggacgggcccggccgactggctaagcaggctttcgagtatggcattaaaaagggccggcagggcctgggctccattttcgtctgggcatctgggaatggcgggagagagggggactactgctcgtgcgatggctacaccaacagcatctacaccatctccgtcagcagcgccaccgagaatggctacaagccctggtacctggaagagtgtgcctccaccctggccaccacctacagcagtggggccttttatgagcgaaaaatcgtcaccacggatctgcgtcagcgctgtaccgatggccacactgggacctcagtctctgcccccatggtggcgggcatcatcgccttggctctagaagcaaacagccagttaacctggagggacgtccagcacctgctagtgaagacatcccggccggcccacctgaaagcgagcgactggaaagtgaacggcgcgggtcataaagttagccatttctatggatttggtttggtggacgcagaagctctcgttgtggaggcaaagaagtggacagcagtgccatcgcagcacatgtgtgtggccgcctcggacaagagacccaggagcatccccttagtgcaggtgctgcggactacggccctgaccagcgcctgcgcggagcactcggaccagcgggtggtctacttggagcacgtggtggttcgcacctccatctcacacccacgccgaggagacctccagatctacctggtttctccctcgggaaccaagtctcaacttctggcaaagaggttgctggatctttccaatgaagggtttacaaactgggaattcatgactgtccactgctggggagaaaaggctgaagggcagtggaccttggaaatccaagatctgccatcccaggtccgcaacccggagaagcaagggaacctggactaaaacacgtgttccggtggcagattgaacaagagctttggtaatctctgtgaaatactgcagagggacagatgaccaaagccaccacatttagaactttggctgcctttggaagtccagagctggatctctcagctcccgcccccagaggctcagcactttggacatggctcacaaacagttgttgattgactgcatgaatgcgtgtgcgtgcaagcatgaaccttgtttaaatcaagagcttacataattttaaccagttctgtcttcagctgtacatactcagtaaaatgtttaatgaaggggaagagattagtctcttctgtgtgaccatgttttccctttattcatcctaaaaagttccatgaattcttgatttcctttcagtggccctttcaacaatgtcttttttcccaagagcataactgttctcattttattgctagccatcttgatctgtgttttattgacatctcttttgagctaatcttcatttctaagataagagttgagattttgcaatctgtgttcgatggctcaatctatcctgtgcttgatgctagaaaggaagacagatttaaagcacatgccttctgtgccggctttcaagtttgtcactaaactctcatttctggaaagtgcaattatagagtatcactcccacttccttggaaacagagctgaagaacttggcacactctccaaacagtcaccatacacactgttgtcaaaaagttccatttttaaccccatttgcattaatattgcagtcaatctctttacctccttttctctttcacggggccgtgacagtgacgcctttccccaaaactctcctcgtttgagaaaaaaagaagtatgtatccccacttatctcggggagaaatgcaaccaactgctgctgtgcacatttatgaatcacagtattgtttagtcggttctgtatctccagtagaaagcataacaaaaagatgacctttgtctcacctcatagctaatttttgcaaataaaatactaaacattg

SEQ ID NO: 1647 - protein, 623 aa, Homo sapiens
MPPRAPPAPGPRPPPRAAAATDTAAGAGGAGGAGGAGGPGFRPLAPRPWRWLLLLALPAACSAPPPRPVYTNHWAVQVLGGPAEADRVAAAHGYLNLGQIGNLEDYYHFYHSKTFKRSTLSSRGPHTFLRMDPQVKWLQQQEVKRRVKRQVRSDPQALYFNDPIWSNMWYLHCGDKNSRCRSEMNVQAAWKRGYTGKNVVVTILDDGIERNHPDLAPNYDSYASYDVNGNDYDPSPRYDASNENKHGTRCAGEVAASANNSYCIVGIAYNAKIGGIRMLDGDVTDVVEAKSLGIRPNYIDIYSASWGPDDDGKTVDGPGRLAKQAFEYGIKKGRQGLGSIFVWASGNGGREGDYCSCDGYTNSIYTISVSSATENGYKPWYLEECASTLATTYSSGAFYERKIVTTDLRQRCTDGHTGTSVSAPMVAGIIALALEANSQLTWRDVQHLLVKTSRPAHLKASDWKVNGAGHKVSHFYGFGLVDAEALVVEAKKWTAVPSQHMCVAASDKRPRSIPLVQVLRTTALTSACAEHSDQRVVYLEHVVVRTSISHPRRGDLQIYLVSPSGTKSQLLAKRLLDLSNEGFTNWEFMTVHCWGEKAEGQWTLEIQDLPSQVRNPEKQGNLD

SEQ ID NO: 1648 - DNA, 3254 bp, Homo sapiens
tcgcgggccgaggacgcctctggggcggcaccgcgtcccgagagccccagaagtcggcggggaagtttccccggtggggggcgtttcgggcctcccggacggctctcggccccggagcccggtcgcaggagcgcgggcccgggggcgggaacgcgccgcggccgcctcctcctccccggctcccgcccgcggcggtgttggcggcggcggtggcggcggcggcggcgcttccccggcgcggagcggctttaaaaggcggcactccaccccccggcgcactcgcagctcgggcgccgcgcgagcctgtcgccgctatgcctccgcgcgcgccgcctgcgcccgggccccggccgccgccccgggccgccgccgccaccgacaccgccgcgggcgcggggggcgcggggggcgcggggggcgccggcgggcccgggttccggccgctcgcgccgcgtccctggcgctggctgctgctgctggcgctgcctgccgcctgctccgcgcccccgccgcgccccgtctacaccaaccactgggcggtgcaagtgctgggcggcccggccgaggcggaccgcgtggcggcggcgcacgggtacctcaacttgggccagattggaaacctggaagattactaccatttttatcacagcaaaacctttaaaagatcaaccttgagtagcagaggccctcacaccttcctcagaatggacccccaggtgaaatggctccagcaacaggaagtgaaacgaagggtgaagagacaggtgcgaagtgacccgcaggccctttacttcaacgaccccatttggtccaacatgtggtacctgcattgtggcgacaagaacagtcgctgccggtcggaaatgaatgtccaggcagcgtggaagaggggctacacaggaaaaaacgtggtggtcaccatccttgatgatggcatagagagaaatcaccctgacctggccccaaattatgattcctacgccagctacgacgtgaacggcaatgattatgacccatctccacgatatgatgccagcaatgaaaataaacacggcactcgttgtgcgggagaagttgctgcttcagcaaacaattcctactgcatcgtgggcatagcgtacaatgccaaaataggaggcatccgcatgctggacggcgatgtcacagatgtggtcgaggcaaagtcgctgggcatcagacccaactacatcgacatttacagtgccagctgggggccggacgacgacggcaagacggtggacgggcccggccgactggctaagcaggctttcgagtatggcattaaaaagggccggcagggcctgggctccattttcgtctgggcatctgggaatggcgggagagagggggactactgctcgtgcgatggctacaccaacagcatctacaccatctccgtcagcagcgccaccgagaatggctacaagccctggtacctggaagagtgtgcctccaccctggccaccacctacagcagtggggccttttatgagcgaaaaatcgtcaccacggatctgcgtcagcgctgtaccgatggccacactgggacctcagtctctgcccccatggtggcgggcatcatcgccttggctctagaagcaaacagccagttaacctggagggacgtccagcacctgctagtgaagacatcccggccggcccacctgaaagcgagcgactggaaagtgaacggcgcgggtcataaagttagccatttctatggatttggtttggtggacgcagaagctctcgttgtggaggcaaagaagtggacagcagtgccatcgcagcacatgtgtgtggccgcctcggacaagagacccaggagcatccccttagtgcaggtgctgcggactacggccctgaccagcgcctgcgcggagcactcggaccagcgggtggtctacttggagcacgtggtggttcgcacctccatctcacacccacgccgaggagacctccagatctacctggtttctccctcgggaaccaagtctcaacttctggcaaagaggttgctggatctttccaatgaagggtttacaaactgggaattcatgactgtccactgctggggagaaaaggctgaagggcagtggaccttggaaatccaagatctgccatcccaggtccgcaacccggagaagcaaggtgatcttgagactcctgttgcaaatcaactgaccacagaagagagggaacctggactaaaacacgtgttccggtggcagattgaacaagagctttggtaatctctgtgaaatactgcagagggacagatgaccaaagccaccacatttagaactttggctgcctttggaagtccagagctggatctctcagctcccgcccccagaggctcagcactttggacatggctcacaaacagttgttgattgactgcatgaatgcgtgtgcgtgcaagcatgaaccttgtttaaatcaagagcttacataattttaaccagttctgtcttcagctgtacatactcagtaaaatgtttaatgaaggggaagagattagtctcttctgtgtgaccatgttttccctttattcatcctaaaaagttccatgaattcttgatttcctttcagtggccctttcaacaatgtcttttttcccaagagcataactgttctcattttattgctagccatcttgatctgtgttttattgacatctcttttgagctaatcttcatttctaagataagagttgagattttgcaatctgtgttcgatggctcaatctatcctgtgcttgatgctagaaaggaagacagatttaaagcacatgccttctgtgccggctttcaagtttgtcactaaactctcatttctggaaagtgcaattatagagtatcactcccacttccttggaaacagagctgaagaacttggcacactctccaaacagtcaccatacacactgttgtcaaaaagttccatttttaaccccatttgcattaatattgcagtcaatctctttacctccttttctctttcacggggccgtgacagtgacgcctttccccaaaactctcctcgtttgagaaaaaaagaagtatgtatccccacttatctcggggagaaatgcaaccaactgctgctgtgcacatttatgaatcacagtattgtttagtcggttctgtatctccagtagaaagcataacaaaaagatgacctttgtctcacctcatagctaatttttgcaaataaaatactaaacattg

SEQ ID NO: 1649 - protein, 652 aa, Homo sapiens
MPPRAPPAPGPRPPPRAAAATDTAAGAGGAGGAGGAGGPGFRPLAPRPWRWLLLLALPAACSAPPPRPVYTNHWAVQVLGGPAEADRVAAAHGYLNLGQIGNLEDYYHFYHSKTFKRSTLSSRGPHTFLRMDPQVKWLQQQEVKRRVKRQVRSDPQALYFNDPIWSNMWYLHCGDKNSRCRSEMNVQAAWKRGYTGKNVVVTILDDGIERNHPDLAPNYDSYASYDVNGNDYDPSPRYDASNENKHGTRCAGEVAASANNSYCIVGIAYNAKIGGIRMLDGDVTDVVEAKSLGIRPNYIDIYSASWGPDDDGKTVDGPGRLAKQAFEYGIKKGRQGLGSIFVWASGNGGREGDYCSCDGYTNSIYTISVSSATENGYKPWYLEECASTLATTYSSGAFYERKIVTTDLRQRCTDGHTGTSVSAPMVAGIIALALEANSQLTWRDVQHLLVKTSRPAHLKASDWKVNGAGHKVSHFYGFGLVDAEALVVEAKKWTAVPSQHMCVAASDKRPRSIPLVQVLRTTALTSACAEHSDQRVVYLEHVVVRTSISHPRRGDLQIYLVSPSGTKSQLLAKRLLDLSNEGFTNWEFMTVHCWGEKAEGQWTLEIQDLPSQVRNPEKQGDLETPVANQLTTEEREPGLKHVFRWQIEQELW

SEQ ID NO: 1650 - DNA, 2358 bp, Homo sapiens
tcgcgggccgaggacgcctctggggcggcaccgcgtcccgagagccccagaagtcggcggggaagtttccccggtggggggcgtttcgggcctcccggacggctctcggccccggagcccggtcgcaggagcgcgggcccgggggcgggaacgcgccgcggccgcctcctcctccccggctcccgcccgcggcggtgttggcggcggcggtggcggcggcggcggcgcttccccggcgcggagcggctttaaaaggcggcactccaccccccggcgcactcgcagctcgggcgccgcgcgagcctgtcgccgctatgcctccgcgcgcgccgcctgcgcccgggccccggccgccgccccgggccgccgccgccaccgacaccgccgcgggcgcggggggcgcggggggcgcggggggcgccggcgggcccgggttccggccgctcgcgccgcgtccctggcgctggctgctgctgctggcgctgcctgccgcctgctccgcgcccccgccgcgccccgtctacaccaaccactgggcggtgcaagtgctgggcggcccggccgaggcggaccgcgtggcggcggcgcacgggtacctcaacttgggccagattggaaacctggaagattactaccatttttatcacagcaaaacctttaaaagatcaaccttgagtagcagaggccctcacaccttcctcagaatggacccccaggtgaaatggctccagcaacaggaagtgaaacgaagggtgaagagacaggtgcgaagtgacccgcaggccctttacttcaacgaccccatttggtccaacatgtggtacctgcattgtggcgacaagaacagtcgctgccggtcggaaatgaatgtccaggcagcgtggaagaggggctacacaggaaaaaacgtggtggtcaccatccttgatgatggcatagagagaaatcaccctgacctggccccaaattatgattcctacgccagctacgacgtgaacggcaatgattatgacccatctccacgatatgatgccagcaatgaaaataaacacggcactcgttgtgcgggagaagttgctgcttcagcaaacaattcctactgcatcgtgggcatagcgtacaatgccaaaataggaggcatccgcatgctggacggcgatgtcacagatgtggtcgaggcaaagtcgctgggcatcagacccaactacatcgacatttacagtgccagctgggggccggacgacgacggcaagacggtggacgggcccggccgactggctaagcaggctttcgagtatggcattaaaaagggccggcagggcctgggctccattttcgtctgggcatctgggaatggcgggagagagggggactactgctcgtgcgatggctacaccaacagcatctacaccatctccgtcagcagcgccaccgagaatggctacaagccctggtacctggaagagtgtgcctccaccctggccaccacctacagcagtggggccttttatgagcgaaaaatcgtcaccacggatctgcgtcagcgctgtaccgatggccacactgggacctcagtctctgcccccatggtggcgggcatcatcgccttggctctagaagcaaacagccagttaacctggagggacgtccagcacctgctagtgaagacatcccggccggcccacctgaaagcgagcgactggaaagtgaacggcgcgggtcataaagttagccatttctatggatttggtttggtggacgcagaagctctcgttgtggaggcaaagaagtggacagcagtgccatcgcagcacatgtgtgtggccgcctcggacaagagacccaggagcatccccttagtgcaggtgctgcggactacggccctgaccagcgcctgcgcggagcactcggaccagcgggtggtctacttggagcacgtggtggttcgcacctccatctcacacccacgccgaggagacctccagatctacctggtttctccctcgggaaccaagtctcaacttctggcaaagaggttgctggatctttccaatgaagggtttacaaactgggaattcatgactgtccactgctggggagaaaaggctgaagggcagtggaccttggaaatccaagatctgccatcccaggtccgcaacccggagaagcaaggtgatcttgagactcctgttgcaaatcaactgaccacagaagagaggttcgtttccacactctcgattctgttccattggtctgtatatctatcttggagtcagtaccatattgttttgatcactgtagctttgtagtaagttttgaaataagaaagtgcgagtcctccaaaaaaaaaaaaaaaaa

SEQ ID NO: 1651 - protein, 664 aa, Homo sapiens
MPPRAPPAPGPRPPPRAAAATDTAAGAGGAGGAGGAGGPGFRPLAPRPWRWLLLLALPAACSAPPPRPVYTNHWAVQVLGGPAEADRVAAAHGYLNLGQIGNLEDYYHFYHSKTFKRSTLSSRGPHTFLRMDPQVKWLQQQEVKRRVKRQVRSDPQALYFNDPIWSNMWYLHCGDKNSRCRSEMNVQAAWKRGYTGKNVVVTILDDGIERNHPDLAPNYDSYASYDVNGNDYDPSPRYDASNENKHGTRCAGEVAASANNSYCIVGIAYNAKIGGIRMLDGDVTDVVEAKSLGIRPNYIDIYSASWGPDDDGKTVDGPGRLAKQAFEYGIKKGRQGLGSIFVWASGNGGREGDYCSCDGYTNSIYTISVSSATENGYKPWYLEECASTLATTYSSGAFYERKIVTTDLRQRCTDGHTGTSVSAPMVAGIIALALEANSQLTWRDVQHLLVKTSRPAHLKASDWKVNGAGHKVSHFYGFGLVDAEALVVEAKKWTAVPSQHMCVAASDKRPRSIPLVQVLRTTALTSACAEHSDQRVVYLEHVVVRTSISHPRRGDLQIYLVSPSGTKSQLLAKRLLDLSNEGFTNWEFMTVHCWGEKAEGQWTLEIQDLPSQVRNPEKQGDLETPVANQLTTEERFVSTLSILFHWSVYLSWSQYHIVLITVAL

SEQ ID NO: 1652 - DNA, 1462 bp, Homo sapiens
agggtgcggcgaggcggaatggcggcggctgcggactcgttctcaggcggccccgcgggggtgcggcttccgaggtcgccgccactcaaggtgctggcggagcagctgcggcgcgacgcggagggcggcccgggcgcgtggcggctgtcacgggcggcggcgggccgcgggccgctggacctggcggccgtgtggatgcagggcagggtagtgatggcggaccgcggcgaggctcggctgagggacccgagcggggacttctcggtccgcggcctggagcgggtgccgcgcgggcggccctgtctagtcccaggaaagtatgtgatggtgatgggagtggttcaggcctgcagccctgagccctgcctgcaggctgtgaagatgacagacctttctgataatcccatccatgaaagtatgtgggaactggaggtagaagatttacacaggaatattccttagagtatgttggaactgtcgttaaaaacaaccaaaatcccgaaactatttagaagcttataatgatgtggatttcatggacacttttcaatgcgtatttttcaaatgcttctcagagagccttgctttggttgaccaaggagtccggatgtaggaatgtttaaatcctcggatacttcagtgacacagcctctgctgccccttgctttgcctgtgtttgctgatgaaaagcagatgcttgtgtttcattttccttcctggtttgtgtgtgttaattctctctctctctctcagacacagaagtctcatgttgcattttccaaattttatgagtgatgatactttttccattactgctgcgtccctgttttacaatgcaaaatttaagtacggtcattgcccatggtgattaaagtgtggttatgggcaggaagacagactgtgtaaaaaaggaatgacatcctggctcctcatcttcttcatcagcaactaccataaccagtttgcgagtcaaatggcatttcctaacggcaggcatggcggcccctgaaagacaacagctccctttctgcttcggacaccactcaaacatttagacgcagctctatcccttttcctagctagagaaggtgatgccttcttccattactcagagatgttgagacgttttcagaatttcttgttgaaatgaaaaacatcaagataaaggacgcctttcaggcattagctaaacttccacttcataactttcggcgagacgtggtgagcctcctggtgtagagttcttttgtctttgtatggaatgactttttgctgtgatggttttgaatgttgggtttctgctgtctgcttagtacccatgcctgaattttttgagattgtaaatatcaaaggagttagattgtgttctgacatggttgtagactttcacctggattattgatattctacctctaataaatttttaataggcaaaaaaaaaaaaaaaaaaaaaaaaaaaaaa

SEQ ID NO: 1653 - protein, 147 aa, Homo sapiens
MAAAADSFSGGPAGVRLPRSPPLKVLAEQLRRDAEGGPGAWRLSRAAAGRGPLDLAAVWMQGRVVMADRGEARLRDPSGDFSVRGLERVPRGRPCLVPGKYVMVMGVVQACSPEPCLQAVKMTDLSDNPIHESMWELEVEDLHRNIP

SEQ ID NO: 1654 - DNA, 1344 bp, Homo sapiens
ccacactgaaggatgcctacctggaggtgacactgcggcccctggaggaggtgtggcgggagcgagcagaggaggccatgcggcggctgcaggcctgggtgcccgggatgccaggcaaagggggtccaaggcccatcagggcggccctgggggccatgaaaggagccctggagctggtgagtgagcaaggatggggcgtagttggcaggtgaggatgactgagccagctctcactgtcccctccctctccaggccgcccaacagatgctgtcttgggctgaggccacgttctcacgggcactgaagaggctctgcaaaccactgctggacctgtacagcctgtcggccaggaaccgctcagtggtggtgatgctgccactgttgcctgcgggggacgagcccctggacgtggcccgggtgaccagctacctcatggaggagaagctgctgcggccgctccgagagctgtctggggccaacgtgctggctgagtactactggctcagacgccgcctgctggcgggcccctgggaataccatgccctggtggctggggcccagcacgtggtgaccttcgacggccgggtatgggacctcagcacccagtgcggcagcatcctcctggcccaggactttgctcacaacacattctcgctgacgctgagtcggacaggctcggggctcacagccctgttcgtggaacttaaccacaagaccctcatcctctaccccagtctgcaggcctacaggctgtacaactcctccctgccgggggacagttgtccggacctcaagctgcatcctgccacgacaaggaaggacgtctccaggattgagctggccagcgaggacggggtgtctgtctcctgtgacgtgcccaccggcctctgcagcctgactctgggcctctggcagcacggcatatccgctggccttctgggcaccaatgacaatgaagcaggcaatgagctgatgttgccggatggctctatggcccgcagcctggaggagctcagcctggcctggcaggtgggtggtgactgcagggccactgagaagcctcagcaggagcaggcctgcccgggacagctccccgcctgctgggccttcttcgagggcccccactccagcttgagggactgcttccgggtggtagaccctacaccattcctcagcctgtgtgtgcaggtcccctgtggcacccaggagctccagcctgcctgcaacctggcggccgcctacatccacctgtgtgcccgtggattcgtacccctggcccctcctccacagtgtgccaaagccccactaaatgggcatagaagtcagtggcaacaacaggagtag

SEQ ID NO: 1655 - protein, 359 aa, Homo sapiens
MLSWAEATFSRALKRLCKPLLDLYSLSARNRSVVVMLPLLPAGDEPLDVARVTSYLMEEKLLRPLRELSGANVLAEYYWLRRRLLAGPWEYHALVAGAQHVVTFDGRVWDLSTQCGSILLAQDFAHNTFSLTLSRTGSGLTALFVELNHKTLILYPSLQAYRLYNSSLPGDSCPDLKLHPATTRKDVSRIELASEDGVSVSCDVPTGLCSLTLGLWQHGISAGLLGTNDNEAGNELMLPDGSMARSLEELSLAWQVGGDCRATEKPQQEQACPGQLPACWAFFEGPHSSLRDCFRVVDPTPFLSLCVQVPCGTQELQPACNLAAAYIHLCARGFVPLAPPPQCAKAPLNGHRSQWQQQE

SEQ ID NO: 1656 - DNA, 3552 bp, Homo sapiens
gaggaggtgtttgcccaggtgcggcgcacccaggcaggcgagctctccacccaggtgggttcttttgtgtggagtcacatcctgcagctgctggagacgcacgaccccctgaaacgggccctccgggacaccctccccgaggacatcctcagccaggagttccacccagaaatgtggaaacactcgtcctattctgatgtcaccttccgatcagcttgggctccggctggaaaatgctgaggaaattgctcacaggctgtttggcaggaagtcattctggggtcaggaagacgggagagagcctgagccagaggaacccccagggccagaaccagggcctgcaccacagccagccagccccgagtgtccaggagacagagacagaaggatgagatacctacagcagaaggtgacccggaggcgtggggcccggcaggctctgcgatgcgagctgagcgtgaagttgctggggcaggagctgagctttgtgaactgcggggccacggggagtcacgtgaaccactggccccttaacttggccgagctcgccatcaagctcatgaaggggcaggaggtgcagatgaaccggaggctgagcctggccgcacaggaactggtctttcccaccgtgtctggccttcctgcccggctgaccctaaatgcctcggctgccatcagcatccgggtccgaggaaccactgacttccagcagcgctcggatttctctgtgaatggttatgtcaagcccagtgccctgctccagatctcagctcagatgggcacagcgggcatcctggggcaggccgggctgaggtgggtgaccagcgtccgcagcgccgccagcctggatggcgggatccaggtgcagaagggccgggtccttaaggtgcatctgaacacgcctgaggaggccgtggagctgctcagcttcagctctcagctgtacctcatcaccagggatggcgtgaggagcctcagacatgtccctggcccttctgaggtccagtcctgtactggtgaggaagtgtcctacacctggggctggcgactgtgcactggagtgacctggccggtgcctggccagccctacctgctctcattgcctgtgttcgcggccgtgacgctgcagaaacgggacccggggctccgacagtacctgctggaagctgcctataccctgcagccccagaagggcagctggttcccccaagaagccacagcccacgtcttcatgggcacgcccgggtcagaagtgctgagggacgtcggggtggacatgagctacagcttgccccagaacaagttccggctcaagcttctccatcccaagaagaaaatcgagctggacggaaagatggaggctcttgggagtgcccacacgggtcacttggagctggtgctggatgacagggacgtctactacatcaagcttggcagctgggcgccgtggctcgcgcctgtggtcccggcacttggggaggccaaggaggatggatcacttgaggccgggagttcgggaccggcctggccaacatgggctggagtgacctgcagccagccatgggtggcgaggccgagcggttccaggcgcagctggaggtgaaactggtgacggggggcagccccgtcgtcttcaccgggaacctcacacggcaggtgggcagcaagctggccttctccgcatcgctgagccatctgctgagtgaccaggccaacgtgacagcactgctggagaggaaggaggagaatggacggagggtggccgccctgggtgccgagctgtttgtgccagggctggtggggcttcgtgcccttggcctgctgcagcaacagggccagctctggaccaactccctgaggatccagtacagcctcctgggtcaggcaaagcaggcggcacacgagtgcagcaccagccagaagctgcgggcagacagtggctcagacggtgcctacaggctggagctgcgccacgagctccactgcacacagatcctagccttcagccacaaggtccagctctggcatgaggaggactcgggccacctgcactcacagctggaggtgagctacgggaagcagtgggacaagaacagcaacaagaggcatctccgtgtcagccagaccttcaagaatgactcggggcccgccctgagcaatcacttcatggagtttgtgctgcaggtgcctgagaggcaggtggattgccgcgtgcagctttaccacttgagcctccgcctgccctatgtggagagcagcagtcacctgaaggtgcagtacaatgggcggccgctgtttgtggcaggcgggcagtggaaggacacatctcgggccaccctgtggaagtgggaaggagtcttgaacctggatagtccatggctgatggtctctgcagctcacaggctatactggccacaccgagctgtgttccaggctgtcctggagctaacgctgggcaaggcctggaccctaaaggacctggtggtcagcgtgggctgcaggagtcagggccccaacagggaaggcaagatccaggtttacaccgcagctaccacctacctccgggtttccacagtgacagtcttggcacagagcctcttccacagctggagcgaactcgagtcagcctggaacacagcagtgcagggcgagatccatgctgagaacagccgggaccgtaagatcctgaactgctggttgaaaggcccccagcaggagctgaacctaacagcggcctacaggcacctggagtggccccggaagacccaggtgtcgctcacggctgtgtggattggtgcccagggccagcctcggggcctgcagttggaaggagagctggaggagctgaggcaagacaggacattgtaccggaaacggggggccttgctccttaggcacccgttgcacctgcccatcccgcagagcctcctcctgcaggagaccttcacggctgataggcgacaccagcgctattccctggagactagggttgtcctgaatggccgagaggaaaccctgcagaccatggtcctgggctgccaggccggacacccctacgtctgtgcaggtctgatgcatccatacgatggcaaagtcatccccaggaacacagaggggtgcctggttacttggaatcagcacacgagtctcgctctgttgtctgggctggagtctggagtgcagtgacttgatctcggctcgccgcagcctccacgtcccaggctgggcgagatggctcacgcctgtaatactagcactttgggaggctgaggcgggcggatcatttgaggtcgggagttcgggacgggcctgaccggcatggtgaaacccccatctctactaaatacaaaaaaaattaaccgggcatggtggcgggctcctgtgatcccagttgctcgggaggctgaggcaggagagtcgcttgagcctgggaggtggaggttgcggtgggccgaggtcacgccactgcactccggcccgggcgacagagcgaggctgtctctaaaataaaataaaatataaaatagaataaaataagctgtttaatgacat

SEQ ID NO: 1657 - protein, 550 aa, Homo sapiens
MGWSDLQPAMGGEAERFQAQLEVKLVTGGSPVVFTGNLTRQVGSKLAFSASLSHLLSDQANVTALLERKEENGRRVAALGAELFVPGLVGLRALGLLQQQGQLWTNSLRIQYSLLGQAKQAAHECSTSQKLRADSGSDGAYRLELRHELHCTQILAFSHKVQLWHEEDSGHLHSQLEVSYGKQWDKNSNKRHLRVSQTFKNDSGPALSNHFMEFVLQVPERQVDCRVQLYHLSLRLPYVESSSHLKVQYNGRPLFVAGGQWKDTSRATLWKWEGVLNLDSPWLMVSAAHRLYWPHRAVFQAVLELTLGKAWTLKDLVVSVGCRSQGPNREGKIQVYTAATTYLRVSTVTVLAQSLFHSWSELESAWNTAVQGEIHAENSRDRKILNCWLKGPQQELNLTAAYRHLEWPRKTQVSLTAVWIGAQGQPRGLQLEGELEELRQDRTLYRKRGALLLRHPLHLPIPQSLLLQETFTADRRHQRYSLETRVVLNGREETLQTMVLGCQAGHPYVCAGLMHPYDGKVIPRNTEGCLVTWNQHTSLALLSGLESGVQ

SEQ ID NO: 1658 - DNA, 3853 bp, Homo sapiens
atgtgcggcccgcggcggctcgcagctcccggcagcagcctcggcagcttcggccgcgcctcgagaggcggccgcagaggctccagcggcggccgagcggccgagcccgggctgggagacaccatgcgccgcgtccttcggctgctcctcggttgcttcctcaccgagctgtgcgcccgcgtgtgccgggcgcaggagcgagcgggacacgggcagctggcgcaactgggcggcgtgttgctgctggcggggggcaaccgctccggggccgcctccggagaggccagcgagggcgctgaggcatcggacgcgcccccgacccgggcgcccacgccggacttctgccggggctacttcgatgtcatgggccagtgggacccgccgttcaactgcagctcgggcgacttcatcttctgctgcgggacttgtggcttccggttctgctgcacgtttaagaagcggcgactgaaccaaagcacctgcaccaactacgacacgccgctctggctcaacaccggcaagccccccgcccgcaaggacgaccccttgcacgaccccaccaaggacaagaccaacctgatcgtctacatcatctgcggggtggtggccgtcatggtgctcgtgggcatcttcaccaagctggggctggagaaagcgcaccggccccaaagggagcacatgtccaggctctatgacaatctgctgtttatggaggcacagatttctttccaagaggacgaacctgcccctggagagtggagtgtcggacttcaaacctggacagtctgagtgcacggatccttggccgctaggctgcactgcgtttgagtgcaaacctgcaggaattccagacttctcagatcacagagaagtacgcgatgccctgcaaacaacagctcatgcatcggggccagttcaagaagctaccgtaagatgaagtctaggaatgctttctatatcggccccggcaggcccagacgtcttggtggaggcgttggtgagaaatgaccttggggacagaagcacatatgtgaagctctctacacttgaagccagtagggaacacatgtcattattttgtccaccttcaaacagaattggaaatccaagtggcaaatggcagataagggtcctgtgtgtttttaaaacatgcttcagaagaactggcaccccttggaaagaaatagcaacaaataatgataaatgcacctcctcctcttgccttttgccttccagtttctctcctgcctctcatctttctatgcatttgtggttatcctaaggctttgaccagcttcccaggctggagaagtccatgtgtgcatgcatctactgttggccacagaaaagtcttaatttatttttctttgcagggtatgttgacttctctttgggcactgagtccttgcattttaaaaatcaacttcattgaagtataatttacacaataaaatgcacacattgtaagtgtgtagtttgatgagcttggacaaatgtctatacctgtgtaatcattactctagaaagctcactcatgcccattgcccttgcatttttgaaaaataattgatgcttcttgtgcaagaagaagtgctcaggaactctattcaagtgtttaaaagtcaacacatagattggacattgggatacctggaggctttgaagcaagataccgggactctgagttctgtttggaaatattggtgtcatatatttgtcattgtaattggaaagaaaagagatgcaccattttcttcttgttctttggataagctaagctcattcccatcttggagctgttgcactggcccttgtgtggctggtccctcctcatcaccagggtcccagctccaatgtcatcttctctgagaagccgtccctgaccaggcttagttgcttcccaccccagcctgacacactccagcccatcacccagtcagtgttatttgcttcatttttacattatggtctaaaattaacttgctagtttactggtttactagtttattatctgtctccttccattatccctctccttccctccttcccttccccttccttccttccttccttccttccttcgagacacagtcgtactctgtcaccccggctggagtgcagtggtgtgatcttgcctcactacaacccctgcctcctgggttttagcgattcttctgcctcagcctcccgagtagctgggactacaggcacccaccatgatgccaggctaatttttgtatttttattggagacagggtttcaccatgttggccaggctggtctcgaactcttgacctcaagtgatccacctgtctcggcctcccaaagtgctgggattacaggcatgagccactgcacctggcccttttattattcatagtaagacacacagggaccacaattgtctcttctactcagtagttggattctgagtgcctagttcagtatttggcaagtaagagttctgcatttgatatcctggtttacctggcacaacaaagtatctccaaattcattcattcattctttcattcattcgataggtatttactgaacatctaacttatgcccaacactgtgctgagagatatgagataaccatgaatagtacaaaagcaatccctgcccttgaagagcaaacagccaaatatcaggagacaggtaacacacaaggaaatgtacaagaaagttgagccagcacttttataagtactggttctagtactagctttcataagaaagtactggttctagtactagctttcagtactctcttgtgaaattttcaatattcagtcatttcaacctcaaaaatggcaacataattatgtttcaacataattgttgttttaaacaaacaattttgtttcaacataattctcctgaactgggtggaaggctatcaagaaaaagcttagcttcttcttcaggtaactgcaagagacagggttctctagagaaacagaacaaatatacaaagagattcattataaggaattggaagtccaaaatctccagagcctctgtacttgtacaagtctgaaggccgacaggcaggagaattctctctttttggggcaaaggtcagtgttttgttctatccaggctttcagatgattggttgaggctcactcacattagaagggcaatctgtcttactgccattagaatgcaacctgttttacttagcttactgatttcaatgttaatctatttcaagagcaccctcacagaaacacccagaataatgtttgatgaaatatctgggcaccctgtgacccagtcaagttgacacatgacactaaccatcacagtacgcttagggtcttgtcactcggagtgtggcctgtgaaccagcagcatttttatcttctgggagcttgggcacgatctcaggccccacctcctgcttattgattcagaatctgcattttaacaagatccccaggtgatctggatgcaccgtaacatctgagaagcactcaaactatgtgccgcaaacaaacgccaaattcttaggcatttgtgtggcttggagcacatagttggttctttctactgtctaattcattacattttttcagcacattcctgtctataaaatgtttttttgtatgcaccccaatatatgcacatttataagcatatgcatgaacccacgaacaatgattaggtacattatgaagcatacgtaaggacagaaatttcaaaccaagcttgagggtgaaataaatattatttgaaaacctgttgctaattgtgatgacttcatactatcattagttactatctcaatgcataatgtacagtgacgggtgaagtttatcattaataaaaaaaatctggattttaa

SEQ ID NO: 1659 - protein, 262 aa, Homo sapiens
MCGPRRLAAPGSSLGSFGRASRGGRRGSSGGRAAEPGLGDTMRRVLRLLLGCFLTELCARVCRAQERAGHGQLAQLGGVLLLAGGNRSGAASGEASEGAEASDAPPTRAPTPDFCRGYFDVMGQWDPPFNCSSGDFIFCCGTCGFRFCCTFKKRRLNQSTCTNYDTPLWLNTGKPPARKDDPLHDPTKDKTNLIVYIICGVVAVMVLVGIFTKLGLEKAHRPQREHMSRLYDNLLFMEAQISFQEDEPAPGEWSVGLQTWTV

SEQ ID NO: 1660 - DNA, 3411 bp, Homo sapiens
gggcgagtgacagccccggctccgcgcgccgcggccgccagagccggcgcaggggaagcgcccgcggccccgggtgcagcagcggccgccgcctcccgcgcctccccggcccgcagcccgcggtcccgcggccccggggccggcacctctcgggctccggctccccgcgcgcaagatggctgacccggctgcggggccgccgccgagcgagggcgaggagagcaccgtgcgcttcgcccgcaaaggcgccctccggcagaagaacgtgcatgaggtcaagaaccacaaattcaccgcccgcttcttcaagcagcccaccttctgcagccactgcaccgacttcatctggggcttcgggaagcagggattccagtgccaagtttgctgctttgtggtgcacaagcggtgccatgaatttgtcacattctcctgccctggcgctgacaagggtccagcctccgatgacccccgcagcaaacacaagtttaagatccacacgtactccagccccacgttttgtgaccactgtgggtcactgctgtatggactcatccaccaggggatgaaatgtgacacctgcatgatgaatgtgcacaagcgctgcgtgatgaatgttcccagcctgtgtggcacggaccacacggagcgccgcggccgcatctacatccaggcccacatcgacagggacgtcctcattgtcctcgtaagagatgctaaaaaccttgtacctatggaccccaatggcctgtcagatccctacgtaaaactgaaactgattcccgatcccaaaagtgagagcaaacagaagaccaaaaccatcaaatgctccctcaaccctgagtggaatgagacatttagatttcagctgaaagaatcggacaaagacagaagactgtcagtagagatttgggattgggatttgaccagcaggaatgacttcatgggatctttgtcctttgggatttctgaacttcagaaagccagtgttgatggctggtttaagttactgagccaggaggaaggcgagtacttcaatgtgcctgtgccaccagaaggaagtgaggccaatgaagaactgcggcagaaatttgagagggccaagatcagtcagggaaccaaggtcccggaagaaaagacgaccaacactgtctccaaatttgacaacaatggcaacagagaccggatgaaactgaccgattttaacttcctaatggtgctggggaaaggcagctttggcaaggtcatgctttcagaacgaaaaggcacagatgagctctatgctgtgaagatcctgaagaaggacgttgtgatccaagatgatgacgtggagtgcactatggtggagaagcgggtgttggccctgcctgggaagccgcccttcctgacccagctccactcctgcttccagaccatggaccgcctgtactttgtgatggagtacgtgaatgggggcgacctcatgtatcacatccagcaagtcggccggttcaaggagccccatgctgtattttacgctgcagaaattgccatcggtctgttcttcttacagagtaagggcatcatttaccgtgacctaaaacttgacaacgtgatgctcgattctgagggacacatcaagattgccgattttggcatgtgtaaggaaaacatctgggatggggtgacaaccaagacattctgtggcactccagactacatcgcccccgagataattgcttatcagccctatgggaagtccgtggattggtgggcatttggagtcctgctgtatgaaatgttggctgggcaggcaccctttgaaggggaggatgaagatgaactcttccaatccatcatggaacacaacgtagcctatcccaagtctatgtccaaggaagctgtggccatctgcaaagggctgatgaccaaacacccaggcaaacgtctgggttgtggacctgaaggcgaacgtgatatcaaagagcatgcatttttccggtatattgattgggagaaacttgaacgcaaagagatccagcccccttataagccaaaagcttgtgggcgaaatgctgaaaacttcgaccgatttttcacccgccatccaccagtcctaacacctcccgaccaggaagtcatcaggaatattgaccaatcagaattcgaaggattttcctttgttaactctgaatttttaaaacccgaagtcaagagctaagtagatgtgtagatctccgtccttcatttctgtcattcaagctcaacggctattgtggtgacatttttatgtttttcattgccaagttgcatccatgtttgattttctgatgagactagagtgacagtgtttcagaacccaaatgtcctcaggtagtttggagcatctctatgagatgggattatgcagatggcctatggaaaatgcagctgcataattaacacattatcaaagtcctcttacaatttattttccgcagcatgtcagctaagtagacccaatggggagagaaaatgcctgctttctttccctctttttctgcactgccatattcacccccaaccatccaatctgtggataattggatgttagcggtactcttccacttccgggcctggagcttggcttgtatccaagtgtatggttgctttgcctaagaggaatccctctatttcacctgttctggaggcaccagaccttgaaaagaacatgctcaaaataaaatgttatctgttatttttgtaaactcaaagttaagatgatcaaagttctaaaattccaagaatgtgcttttagacggtctcaatctaaaagcacttcaaggggtcaaagggcaaccagcttgggtgctacctcagtgttgtagtttctgatactttatgtctttgctcaccctcatccccaaactacttgaaaagggcatttggcaccactctctgaaacaacacagtcactctagcaaggcccccaaagggccctggttttacattacatttcaaactttatttgctttggggttttgtttctgttgttgttcaaatgcaaaaaaaagaaaaaaaaagaaaaaaaaaggtgactcacattgttacacatgctttaaaatatgtattcaaatgttattaaccacaatgacgacctgctttgatttaaccaagaagacggctgcggagcctagcagactcaggcctgtgggaatgggatttgttacaaatctaggtttgttactggcttcagaaagctaattaagtgctctgaaaaagacaccgtttcttgaaacaaagatggttgtattcctcactttgatgttgttttgcaagatgtttgtggaaatgttcatttgtatctggatctctgttatgtgccatttttcttctagcatcgagatacaataaaaaaaaaaaaaaagaaaaaaaaaaaaaaaaaaaaaaaaaaaa

SEQ ID NO: 1661 - protein, 673 aa, Homo sapiens
MADPAAGPPPSEGEESTVRFARKGALRQKNVHEVKNHKFTARFFKQPTFCSHCTDFIWGFGKQGFQCQVCCFVVHKRCHEFVTFSCPGADKGPASDDPRSKHKFKIHTYSSPTFCDHCGSLLYGLIHQGMKCDTCMMNVHKRCVMNVPSLCGTDHTERRGRIYIQAHIDRDVLIVLVRDAKNLVPMDPNGLSDPYVKLKLIPDPKSESKQKTKTIKCSLNPEWNETFRFQLKESDKDRRLSVEIWDWDLTSRNDFMGSLSFGISELQKASVDGWFKLLSQEEGEYFNVPVPPEGSEANEELRQKFERAKISQGTKVPEEKTTNTVSKFDNNGNRDRMKLTDFNFLMVLGKGSFGKVMLSERKGTDELYAVKILKKDVVIQDDDVECTMVEKRVLALPGKPPFLTQLHSCFQTMDRLYFVMEYVNGGDLMYHIQQVGRFKEPHAVFYAAEIAIGLFFLQSKGIIYRDLKLDNVMLDSEGHIKIADFGMCKENIWDGVTTKTFCGTPDYIAPEIIAYQPYGKSVDWWAFGVLLYEMLAGQAPFEGEDEDELFQSIMEHNVAYPKSMSKEAVAICKGLMTKHPGKRLGCGPEGERDIKEHAFFRYIDWEKLERKEIQPPYKPKACGRNAENFDRFFTRHPPVLTPPDQEVIRNIDQSEFEGFSFVNSEFLKPEVKS

SEQ ID NO: 1662 - DNA, 2319 bp, Homo sapiens
gggcgagtgacagccccggctccgcgcgccgcggccgccagagccggcgcaggggaagcgcccgcggccccgggtgcagcagcggccgccgcctcccgcgcctccccggcccgcagcccgcggtcccgcggccccggggccggcacctctcgggctccggctccccgcgcgcaagatggctgacccggctgcggggccgccgccgagcgagggcgaggagagcaccgtgcgcttcgcccgcaaaggcgccctccggcagaagaacgtgcatgaggtcaagaaccacaaattcaccgcccgcttcttcaagcagcccaccttctgcagccactgcaccgacttcatctggggcttcgggaagcagggattccagtgccaagtttgctgctttgtggtgcacaagcggtgccatgaatttgtcacattctcctgccctggcgctgacaagggtccagcctccgatgacccccgcagcaaacacaagtttaagatccacacgtactccagccccacgttttgtgaccactgtgggtcactgctgtatggactcatccaccaggggatgaaatgtgacacctgcatgatgaatgtgcacaagcgctgcgtgatgaatgttcccagcctgtgtggcacggaccacacggagcgccgcggccgcatctacatccaggcccacatcgacagggacgtcctcattgtcctcgtaagagatgctaaaaaccttgtacctatggaccccaatggcctgtcagatccctacgtaaaactgaaactgattcccgatcccaaaagtgagagcaaacagaagaccaaaaccatcaaatgctccctcaaccctgagtggaatgagacatttagatttcagctgaaagaatcggacaaagacagaagactgtcagtagagatttgggattgggatttgaccagcaggaatgacttcatgggatctttgtcctttgggatttctgaacttcagaaagccagtgttgatggctggtttaagttactgagccaggaggaaggcgagtacttcaatgtgcctgtgccaccagaaggaagtgaggccaatgaagaactgcggcagaaatttgagagggccaagatcagtcagggaaccaaggtcccggaagaaaagacgaccaacactgtctccaaatttgacaacaatggcaacagagaccggatgaaactgaccgattttaacttcctaatggtgctggggaaaggcagctttggcaaggtcatgctttcagaacgaaaaggcacagatgagctctatgctgtgaagatcctgaagaaggacgttgtgatccaagatgatgacgtggagtgcactatggtggagaagcgggtgttggccctgcctgggaagccgcccttcctgacccagctccactcctgcttccagaccatggaccgcctgtactttgtgatggagtacgtgaatgggggcgacctcatgtatcacatccagcaagtcggccggttcaaggagccccatgctgtattttacgctgcagaaattgccatcggtctgttcttcttacagagtaagggcatcatttaccgtgacctaaaacttgacaacgtgatgctcgattctgagggacacatcaagattgccgattttggcatgtgtaaggaaaacatctgggatggggtgacaaccaagacattctgtggcactccagactacatcgcccccgagataattgcttatcagccctatgggaagtccgtggattggtgggcatttggagtcctgctgtatgaaatgttggctgggcaggcaccctttgaaggggaggatgaagatgaactcttccaatccatcatggaacacaacgtagcctatcccaagtctatgtccaaggaagctgtggccatctgcaaagggctgatgaccaaacacccaggcaaacgtctgggttgtggacctgaaggcgaacgtgatatcaaagagcatgcatttttccggtatattgattgggagaaacttgaacgcaaagagatccagcccccttataagccaaaagctagagacaagagagacacctccaacttcgacaaagagttcaccagacagcctgtggaactgacccccactgataaactcttcatcatgaacttggaccaaaatgaatttgctggcttctcttatactaacccagagtttgtcattaatgtgtaggtgaatgcaaactccatcgttgagcctggggtgtaagacttcaagccaagcgtatgtatcaattctagtcttccaggattcacggtgcacatgctggcattcaacatgtggaaagcttgtcttagagg

SEQ ID NO: 1663 - protein, 671 aa, Homo sapiens
MADPAAGPPPSEGEESTVRFARKGALRQKNVHEVKNHKFTARFFKQPTFCSHCTDFIWGFGKQGFQCQVCCFVVHKRCHEFVTFSCPGADKGPASDDPRSKHKFKIHTYSSPTFCDHCGSLLYGLIHQGMKCDTCMMNVHKRCVMNVPSLCGTDHTERRGRIYIQAHIDRDVLIVLVRDAKNLVPMDPNGLSDPYVKLKLIPDPKSESKQKTKTIKCSLNPEWNETFRFQLKESDKDRRLSVEIWDWDLTSRNDFMGSLSFGISELQKASVDGWFKLLSQEEGEYFNVPVPPEGSEANEELRQKFERAKISQGTKVPEEKTTNTVSKFDNNGNRDRMKLTDFNFLMVLGKGSFGKVMLSERKGTDELYAVKILKKDVVIQDDDVECTMVEKRVLALPGKPPFLTQLHSCFQTMDRLYFVMEYVNGGDLMYHIQQVGRFKEPHAVFYAAEIAIGLFFLQSKGIIYRDLKLDNVMLDSEGHIKIADFGMCKENIWDGVTTKTFCGTPDYIAPEIIAYQPYGKSVDWWAFGVLLYEMLAGQAPFEGEDEDELFQSIMEHNVAYPKSMSKEAVAICKGLMTKHPGKRLGCGPEGERDIKEHAFFRYIDWEKLERKEIQPPYKPKARDKRDTSNFDKEFTRQPVELTPTDKLFIMNLDQNEFAGFSYTNPEFVINV

SEQ ID NO: 1664 - DNA, 896 bp, Homo sapiens
atggcctccgtgaatgacttaaaatgcggtatttttcatgaagaagaattgccgacaagggcaaactacagtactttgaaagattacaggggctgcaccctgggcctgcgcctgggccgcgggcggggggcgacggaccgcggggcgctcatctggctctgctacgacgcgctggtgcacttcgcgctggagagagtgggcccttttgtctacttgtctttagtaggaaacgttgcaaattccgatggcttgattgcttctttatggaaagaatatggcaaagctgatgcaagatgggtttattttgatccaaccattgtgtctgtggaaattctggccgtcgccctagatgtgtctctggcattgttcctcatttatgccatagtcaaggaaaaatattaccggcatttcctgcagatcaccctgtgcgtgtgcgagatgtatggctgctggatgaccttcctcccagagtggctcaccagaagccccaacctcaacaccagcaactggctggctgtactgttggctttacctgttttttttttaacggtgtgtgggttctgatcccaggactgctactgtggcagtcatgggtagaactcaagaaaatgcatccgaaagaaaccagttcagtgaaaaagtttcagtgaactgtcaaaaccataaacaccattatctaacttcatgagccagaatgaatcaaatctttttgtttggccaaaatgtaatacattccagtctacactttgtttttgtattgttgctcctgaacaacctgtttcaaattggttttaaggcgaccagttttcgttgtgttgttgttcagttaaatggtgatatagggaaaagagaacaaatttaaatttgtaataataaaatgtttaattataaaaaaa

SEQ ID NO: 1665 - DNA, 6850 bp, Homo sapiens
gctctgccaggagcagtcgcctcctccttggcaaatagtcctcggcagggtccgagttcttggataattcgagagaaaaggcacgataagttgcagtacgaggacacggaaacgaccaggagaggaggacagggagcgaagtttcctcaatagtgtgtgaagttagttaaaaactccctccttcctcaggatccctccgcctgcggtagcggtggtgaggccgagggagccgccattttggatgttcggttcctgctgccactgctgccgccgcccccggagctgctggtttcattcgaggtttcgggccgaggatgccagcccccatcagattgcgggagctgatccggaccatccggacagcccgaacccaagctgaagaacgagaaatgatccagaaagaatgtgctgcaatccggtcatcttttagagaagaagacaatacataccgatgtcggaatgtggcaaaattactgtatatgcacatgctgggctaccctgctcactttggacagttggagtgcctcaagcttattgcctctcaaaaatttacagacaaacgcattggctatttaggggcaatgctgctgttagatgaaagacaagatgtccatcttctcatgaccaactgtatcaagaatgatcttaatcatagcacgcaattcgtacaggggttagcactttgtaccctcggctgcatgggctcctcagagatgtgcagagatcttgcaggagaggtagagaagctcctgaaaacctccaactcttacttaagaaaaaaggcagcactgtgtgctgttcatgtcatcaggaaagttcctgaacttatggagatgtttttaccagcaacaaaaaatttattgaatgagaagaaccatggtgtcctccacacatctgtagtcctcctcacagaaatgtgtgagcgaagcccagacatgcttgcgcatttcagaaagaatgaaaagcttgtgccccaattagttcgtattttaaagaacctcatcatgtccggatattcaccagaacatgatgtttctggtatcagtgacccctttttgcaggtacgaattttgcggttattaagaattttaggacgaaatgatgatgattcaagtgaagctatgaatgatatattagcacaggttgccactaatactgagactagtaaaaatgtaggaaatgctattctttatgaaacggttttgactatcatggatattaagtcagagagtggattgcgagtcctagccataaatatcctgggtcgtttcttattgaacaatgacaagaatattagatatgtggctctgacatctttgttgaagactgtacagacagatcataatgcagtacagaggcacagaagcacaattgtggactgtcttaaagatttggatgtctcaataaaacggcgtgcaatggaattgagttttgccctggtaaatgggaataatatccgaggcatgatgaaagaattactttattttctggattcgtgtgagccagaatttaaagcagactgtgcatctggaatctttcttgctgcagaaaagtatgcaccttccaaacgatggcatatagacacaattatgcgtgttttgacaacggcaggaagttatgttcgtgatgatgcagtccccaatttaatccagttaataactaatagtgtggagatgcatgcctatactgtccagcgcctgtacaaagcaattcttggtgattattctcaacaacctttggtacaagtggctgcatggtgtataggtgaatatggtgatcttcttgtatctggccagtgtgaagaggaagagcctattcaggtaacagaggatgaagtgttggatattttagaaagtgtcctaatctctaatatgtccacctctgtgacacgaggttatgccctcactgccattatgaagctttccactcgattcacttgtactgtaaaccgaattaagaaagtggtttccatctacggaagcagcattgatgtggaactccagcagagggcagtagaatataatgcacttttcaagaaatatgaccacatgaggtctgccctacttgagagaatgcctgtcatggaaaaagtgaccacaaatggccctactgagattgtgcagacaaatggagagacagaaccagctccactagagaccaaaccgccaccctctgggccacagcccaccagccaggccaatgatttattggatttgttgggaggaaatgacataacacctgttattccaactgcgcctacaagcaaaccatcttctgctggtggagaacttcttgatttgctgggagacatcaaccttacaggtgctccagctgctgctcctgcccctgcctcagtcccacagatatcccagccccccttcttgttggatgggctttcatcacagcctctcttcaatgatattgctgcaggcatcccctccatcacagcatacagtaagaatggcttgaagatagaattcacctttgaacggtcaaataccaaccccagtgtaacagtgataacgatacaggcctccaacagcacagagctagatatgacggactttgttttccaagctgcagtaccaaagacattccagctgcagctcttgtctcctagcagcagcattgtcccagcatttaacacggggaccatcacacaagtcattaaagttctgaaccctcagaagcaacagctgcgaatgcggatcaagcttacatataatcacaagggctcagcaatgcaagatctagcagaggtgaacaactttccccctcagtcctggcaatgagggtttggcaccattctcattctttatcccactcaatcaaaggaactctgggaaggaggttgtgattgctggcaagtcccccccaactgtaccacgggcatgaggagctgaagagaactgctgaggaggattttcctaaagttactgctgaccttgaagcattgttaaagactaatgtcctctcctccactgttgaggctggctgcttctggaggctactttgcactcttcctcttctcctttttccgcacttctccacccctcccacatttacagccagaatcaacattccctgggcccctgaggaaataagcagctggtctggaggagaggactgcaatccatggcgaaaaaacactcactttgtctctgcagcaaagagttgccccttctttctactgttgtttctctgtggactgggcaaggtggggtatttattcctcactagctgggttaccatcttcaggcacttttaacatctggcattcggaatggaaatgtaataatggacattagggagccctgcctttttctactggttcccccaatgtttgaaagaggcattaggctcctggtagccttttctgtgcattgctgtatacacacagacacacacatgtatgtttgttaccaagaactggtcagaccttgcgagtttatttgtaaacactggacagatggagttaaaaagagcttttgttgagatttggcatgaaggatatggtgctctatttgtaatagaaacttccaaggctcttccagctcccctttctcgccattctttagctgtagtcatgaatagtctccatgattttcaaaattgattccctttaaagtgcaaaatggtcaccttctaaaagatatattcatagttattaatgaccctattcccaccacaaattttaaagtgctcctaagcccataacttgcctgtttgaactatggtaatgggtggaagaggagttcaccagtttcaaagatcagactctgtatcaaaagtacctttgcccttaggaagagtgagtattggagtcatcttatctattactccaaacctccctttttatttcttgagcctggcttggaccttggcattccgtttgaattccttctaactggaacatttgtgttgtatctgtaacactggcactgaaataaagaccacacggttaaagaaatctttccatattgtactttatggtgttggagtgaagccttgtagcttccatacccctatgtcagaggaggtcttacggacaccatagggtaggaatagcctttcctcagtctgagaaattggtctcttttaaaagacgaatctcatgaatattcacatcaaagacttgagctttttaaactagtgagagtgccaagtgctttttagaaaggacccatatgttatcaaactttgaaattgagttgctggaatgaagtagaggtgactctctctgtggtacacattgaatgtactatgtatgttcaagtattcaggcgccatgtcttatatactgaagaaagaaaaagtgaggcccaccttgctcttacaatgtttgcaattgttactgtattgaatacagtataatgactactatggcttcaatcttaaacctggaaacaaatatccctttttttccccttcatttcaccaagcctttacttaaaatcttcagtgtcttgtcaaatctagctctgtatcagatgctggaatattcctaacatttgacaaactggagttgaactaaaggctccacgggaaagtttctggtcttactagtgtgtatgagcaagatctgctaaaacttactccactgggtaaatggttgactgagtcaagaacaggataatatctcctgcatagttttcagtaatgtaagtgtggactagtgcatatttcagacaactgctctgcctgtgcaatgaaaaatagcctttaagggtttctttgcagactgatttcattggatggatacttaatgctgtgaaacatgataggattaacataatgttggtggatttcttgaatagaatttgtcttaacattcctctttgtgtagaggctttattttctctcttatatttgtagctaaccagctcaggtttttttatttgaactgggttgaatctctgaagaaatctgttcaagaccatgctataagacactgtcagctaatggagctgggaagggtctactctgctgacagagcatttccttgggtgatcatagtttcgaggtagagtttatgatcattcatagctttgtctagaaggagtaaaatatcatggccttaacacaaagggtgctgcgtagaatatgaattgattttggaatcagaacacaagcaccatactgaaggactagcagccaaataactgcctaggatactgatggttgtgaagactgtttcaaatgattggatctttgaaagcttcagcgtgccttagtttctaggatcagaattagttttcctctcacttggccttgcagctaaatggagaaatgtttcaatttctttgaatacttgcacatttcaataattcctttcccgagtataaccactcaagggggagcaaatttggatggatttacgacttcacaggcattgtgaggaaagagcattttccaaggctgttttgataaccctggggtgataagcagtgagccctcacacacttactttgacaatttcacatgcacttgtacttcattatttccctcttcaagagtcgtttctattctagtttctgccccatcccggggaatcctaaaggagaattaattcatctaagtaatctcaaaaaactgtaggaagggtgctctccctgagaagcttctcccacagtgctttggtgctgttaccttgaggtggtttggacagtcacggaagttttaggctgtgcatagtgatcatctgttaattttaaggtctttatcatttaaagaaacattcctcagtgtaacatttgggaggggattctttcctcttgctagtttaaaggtgtgatttgtactccttgtttgtcccattcatatatgaaaatagacttttaaaactgtccaacactaatggtttatataacatgcttcccattttttttatgtcgtagaaattggaagttagggagtactgctttcaaggttcaacttcattatcttctgcattggaaaatatttgggccatgagaactaggggaaaggagtttgaatgtgtctatttttttctagtgaatgtattttaaccacagtgtcctaaactgagaaaactagagaggaaaaagtgggtgttcatgaactttgtagttgggagagtggttttacatgtctgtgtattcatgactttgggagtgggtaggatcattggagagagaattgcacagaaagtcctgaagtttaaaacacttttgaccagctttggctcgggagagtggggctgcttgtagaactggaagtgaataactttttcaagcaatatcagtgagtgggtcccatcgacagggttccaggacctggaacactttaacagaaggaaatgccgaagcagcttgcacagttgctttacagacttccaagaggctgattctggcttcaagatggagccttggagttggtttttttttttttttttttcttccctcaaagaacctgcggttgcgctttgtgtgttttgtttttgttttccatttgggggccccatgggaaagagcttctgaactctttcctttatgaactcccactgtgttcctataaaggcccttttctttcttagtgttgtaagttacattttcattatgccccatcacatcttctttactgtaaaaatattaaaaagctgtttccaagtgggacagctaatgaagctctaattattgcagacatatttttgagatgtaaaaaaaaaaatttaaagttaaatgataagtcttagaggcgagtgaggaataaaatggatgtaaacatttacatgggatgcattagaattctgctgtgtgtactgtcttttggttgaaacaaattatgaacagtgactaataataaaaagtcaatacccaatgatttaaaa

SEQ ID NO: 1666 - protein, 825 aa, Homo sapiens
MPAPIRLRELIRTIRTARTQAEEREMIQKECAAIRSSFREEDNTYRCRNVAKLLYMHMLGYPAHFGQLECLKLIASQKFTDKRIGYLGAMLLLDERQDVHLLMTNCIKNDLNHSTQFVQGLALCTLGCMGSSEMCRDLAGEVEKLLKTSNSYLRKKAALCAVHVIRKVPELMEMFLPATKNLLNEKNHGVLHTSVVLLTEMCERSPDMLAHFRKNEKLVPQLVRILKNLIMSGYSPEHDVSGISDPFLQVRILRLLRILGRNDDDSSEAMNDILAQVATNTETSKNVGNAILYETVLTIMDIKSESGLRVLAINILGRFLLNNDKNIRYVALTSLLKTVQTDHNAVQRHRSTIVDCLKDLDVSIKRRAMELSFALVNGNNIRGMMKELLYFLDSCEPEFKADCASGIFLAAEKYAPSKRWHIDTIMRVLTTAGSYVRDDAVPNLIQLITNSVEMHAYTVQRLYKAILGDYSQQPLVQVAAWCIGEYGDLLVSGQCEEEEPIQVTEDEVLDILESVLISNMSTSVTRGYALTAIMKLSTRFTCTVNRIKKVVSIYGSSIDVELQQRAVEYNALFKKYDHMRSALLERMPVMEKVTTNGPTEIVQTNGETEPAPLETKPPPSGPQPTSQANDLLDLLGGNDITPVIPTAPTSKPSSAGGELLDLLGDINLTGAPAAAPAPASVPQISQPPFLLDGLSSQPLFNDIAAGIPSITAYSKNGLKIEFTFERSNTNPSVTVITIQASNSTELDMTDFVFQAAVPKTFQLQLLSPSSSIVPAFNTGTITQVIKVLNPQKQQLRMRIKLTYNHKGSAMQDLAEVNNFPPQSWQ

SEQ ID NO: 1667 - DNA, 6841 bp, Homo sapiens
gctctgccaggagcagtcgcctcctccttggcaaatagtcctcggcagggtccgagttcttggataattcgagagaaaaggcacgataagttgcagtacgaggacacggaaacgaccaggagaggaggacagggagcgaagtttcctcaatagtgtgtgaagttagttaaaaactccctccttcctcaggatccctccgcctgcggtagcggtggtgaggccgagggagccgccattttggatgttcggttcctgctgccactgctgccgccgcccccggagctgctggtttcattcgaggtttcgggccgaggatgccagcccccatcagattgcgggagctgatccggaccatccggacagcccgaacccaagctgaagaacgagaaatgatccagaaagaatgtgctgcaatccggtcatcttttagagaagaagacaatacataccgatgtcggaatgtggcaaaattactgtatatgcacatgctgggctaccctgctcactttggacagttggagtgcctcaagcttattgcctctcaaaaatttacagacaaacgcattggctatttaggggcaatgctgctgttagatgaaagacaagatgtccatcttctcatgaccaactgtatcaagaatgatcttaatcatagcacgcaattcgtacaggggttagcactttgtaccctcggctgcatgggctcctcagagatgtgcagagatcttgcaggagaggtagagaagctcctgaaaacctccaactcttacttaagaaaaaaggcagcactgtgtgctgttcatgtcatcaggaaagttcctgaacttatggagatgtttttaccagcaacaaaaaatttattgaatgagaagaaccatggtgtcctccacacatctgtagtcctcctcacagaaatgtgtgagcgaagcccagacatgcttgcgcatttcagaaagcttgtgccccaattagttcgtattttaaagaacctcatcatgtccggatattcaccagaacatgatgtttctggtatcagtgacccctttttgcaggtacgaattttgcggttattaagaattttaggacgaaatgatgatgattcaagtgaagctatgaatgatatattagcacaggttgccactaatactgagactagtaaaaatgtaggaaatgctattctttatgaaacggttttgactatcatggatattaagtcagagagtggattgcgagtcctagccataaatatcctgggtcgtttcttattgaacaatgacaagaatattagatatgtggctctgacatctttgttgaagactgtacagacagatcataatgcagtacagaggcacagaagcacaattgtggactgtcttaaagatttggatgtctcaataaaacggcgtgcaatggaattgagttttgccctggtaaatgggaataatatccgaggcatgatgaaagaattactttattttctggattcgtgtgagccagaatttaaagcagactgtgcatctggaatctttcttgctgcagaaaagtatgcaccttccaaacgatggcatatagacacaattatgcgtgttttgacaacggcaggaagttatgttcgtgatgatgcagtccccaatttaatccagttaataactaatagtgtggagatgcatgcctatactgtccagcgcctgtacaaagcaattcttggtgattattctcaacaacctttggtacaagtggctgcatggtgtataggtgaatatggtgatcttcttgtatctggccagtgtgaagaggaagagcctattcaggtaacagaggatgaagtgttggatattttagaaagtgtcctaatctctaatatgtccacctctgtgacacgaggttatgccctcactgccattatgaagctttccactcgattcacttgtactgtaaaccgaattaagaaagtggtttccatctacggaagcagcattgatgtggaactccagcagagggcagtagaatataatgcacttttcaagaaatatgaccacatgaggtctgccctacttgagagaatgcctgtcatggaaaaagtgaccacaaatggccctactgagattgtgcagacaaatggagagacagaaccagctccactagagaccaaaccgccaccctctgggccacagcccaccagccaggccaatgatttattggatttgttgggaggaaatgacataacacctgttattccaactgcgcctacaagcaaaccatcttctgctggtggagaacttcttgatttgctgggagacatcaaccttacaggtgctccagctgctgctcctgcccctgcctcagtcccacagatatcccagccccccttcttgttggatgggctttcatcacagcctctcttcaatgatattgctgcaggcatcccctccatcacagcatacagtaagaatggcttgaagatagaattcacctttgaacggtcaaataccaaccccagtgtaacagtgataacgatacaggcctccaacagcacagagctagatatgacggactttgttttccaagctgcagtaccaaagacattccagctgcagctcttgtctcctagcagcagcattgtcccagcatttaacacggggaccatcacacaagtcattaaagttctgaaccctcagaagcaacagctgcgaatgcggatcaagcttacatataatcacaagggctcagcaatgcaagatctagcagaggtgaacaactttccccctcagtcctggcaatgagggtttggcaccattctcattctttatcccactcaatcaaaggaactctgggaaggaggttgtgattgctggcaagtcccccccaactgtaccacgggcatgaggagctgaagagaactgctgaggaggattttcctaaagttactgctgaccttgaagcattgttaaagactaatgtcctctcctccactgttgaggctggctgcttctggaggctactttgcactcttcctcttctcctttttccgcacttctccacccctcccacatttacagccagaatcaacattccctgggcccctgaggaaataagcagctggtctggaggagaggactgcaatccatggcgaaaaaacactcactttgtctctgcagcaaagagttgccccttctttctactgttgtttctctgtggactgggcaaggtggggtatttattcctcactagctgggttaccatcttcaggcacttttaacatctggcattcggaatggaaatgtaataatggacattagggagccctgcctttttctactggttcccccaatgtttgaaagaggcattaggctcctggtagccttttctgtgcattgctgtatacacacagacacacacatgtatgtttgttaccaagaactggtcagaccttgcgagtttatttgtaaacactggacagatggagttaaaaagagcttttgttgagatttggcatgaaggatatggtgctctatttgtaatagaaacttccaaggctcttccagctcccctttctcgccattctttagctgtagtcatgaatagtctccatgattttcaaaattgattccctttaaagtgcaaaatggtcaccttctaaaagatatattcatagttattaatgaccctattcccaccacaaattttaaagtgctcctaagcccataacttgcctgtttgaactatggtaatgggtggaagaggagttcaccagtttcaaagatcagactctgtatcaaaagtacctttgcccttaggaagagtgagtattggagtcatcttatctattactccaaacctccctttttatttcttgagcctggcttggaccttggcattccgtttgaattccttctaactggaacatttgtgttgtatctgtaacactggcactgaaataaagaccacacggttaaagaaatctttccatattgtactttatggtgttggagtgaagccttgtagcttccatacccctatgtcagaggaggtcttacggacaccatagggtaggaatagcctttcctcagtctgagaaattggtctcttttaaaagacgaatctcatgaatattcacatcaaagacttgagctttttaaactagtgagagtgccaagtgctttttagaaaggacccatatgttatcaaactttgaaattgagttgctggaatgaagtagaggtgactctctctgtggtacacattgaatgtactatgtatgttcaagtattcaggcgccatgtcttatatactgaagaaagaaaaagtgaggcccaccttgctcttacaatgtttgcaattgttactgtattgaatacagtataatgactactatggcttcaatcttaaacctggaaacaaatatccctttttttccccttcatttcaccaagcctttacttaaaatcttcagtgtcttgtcaaatctagctctgtatcagatgctggaatattcctaacatttgacaaactggagttgaactaaaggctccacgggaaagtttctggtcttactagtgtgtatgagcaagatctgctaaaacttactccactgggtaaatggttgactgagtcaagaacaggataatatctcctgcatagttttcagtaatgtaagtgtggactagtgcatatttcagacaactgctctgcctgtgcaatgaaaaatagcctttaagggtttctttgcagactgatttcattggatggatacttaatgctgtgaaacatgataggattaacataatgttggtggatttcttgaatagaatttgtcttaacattcctctttgtgtagaggctttattttctctcttatatttgtagctaaccagctcaggtttttttatttgaactgggttgaatctctgaagaaatctgttcaagaccatgctataagacactgtcagctaatggagctgggaagggtctactctgctgacagagcatttccttgggtgatcatagtttcgaggtagagtttatgatcattcatagctttgtctagaaggagtaaaatatcatggccttaacacaaagggtgctgcgtagaatatgaattgattttggaatcagaacacaagcaccatactgaaggactagcagccaaataactgcctaggatactgatggttgtgaagactgtttcaaatgattggatctttgaaagcttcagcgtgccttagtttctaggatcagaattagttttcctctcacttggccttgcagctaaatggagaaatgtttcaatttctttgaatacttgcacatttcaataattcctttcccgagtataaccactcaagggggagcaaatttggatggatttacgacttcacaggcattgtgaggaaagagcattttccaaggctgttttgataaccctggggtgataagcagtgagccctcacacacttactttgacaatttcacatgcacttgtacttcattatttccctcttcaagagtcgtttctattctagtttctgccccatcccggggaatcctaaaggagaattaattcatctaagtaatctcaaaaaactgtaggaagggtgctctccctgagaagcttctcccacagtgctttggtgctgttaccttgaggtggtttggacagtcacggaagttttaggctgtgcatagtgatcatctgttaattttaaggtctttatcatttaaagaaacattcctcagtgtaacatttgggaggggattctttcctcttgctagtttaaaggtgtgatttgtactccttgtttgtcccattcatatatgaaaatagacttttaaaactgtccaacactaatggtttatataacatgcttcccattttttttatgtcgtagaaattggaagttagggagtactgctttcaaggttcaacttcattatcttctgcattggaaaatatttgggccatgagaactaggggaaaggagtttgaatgtgtctatttttttctagtgaatgtattttaaccacagtgtcctaaactgagaaaactagagaggaaaaagtgggtgttcatgaactttgtagttgggagagtggttttacatgtctgtgtattcatgactttgggagtgggtaggatcattggagagagaattgcacagaaagtcctgaagtttaaaacacttttgaccagctttggctcgggagagtggggctgcttgtagaactggaagtgaataactttttcaagcaatatcagtgagtgggtcccatcgacagggttccaggacctggaacactttaacagaaggaaatgccgaagcagcttgcacagttgctttacagacttccaagaggctgattctggcttcaagatggagccttggagttggtttttttttttttttttttcttccctcaaagaacctgcggttgcgctttgtgtgttttgtttttgttttccatttgggggccccatgggaaagagcttctgaactctttcctttatgaactcccactgtgttcctataaaggcccttttctttcttagtgttgtaagttacattttcattatgccccatcacatcttctttactgtaaaaatattaaaaagctgtttccaagtgggacagctaatgaagctctaattattgcagacatatttttgagatgtaaaaaaaaaaatttaaagttaaatgataagtcttagaggcgagtgaggaataaaatggatgtaaacatttacatgggatgcattagaattctgctgtgtgtactgtcttttggttgaaacaaattatgaacagtgactaataataaaaagtcaatacccaatgatttaaaa

SEQ ID NO: 1668 - protein, 822 aa, Homo sapiens
MPAPIRLRELIRTIRTARTQAEEREMIQKECAAIRSSFREEDNTYRCRNVAKLLYMHMLGYPAHFGQLECLKLIASQKFTDKRIGYLGAMLLLDERQDVHLLMTNCIKNDLNHSTQFVQGLALCTLGCMGSSEMCRDLAGEVEKLLKTSNSYLRKKAALCAVHVIRKVPELMEMFLPATKNLLNEKNHGVLHTSVVLLTEMCERSPDMLAHFRKLVPQLVRILKNLIMSGYSPEHDVSGISDPFLQVRILRLLRILGRNDDDSSEAMNDILAQVATNTETSKNVGNAILYETVLTIMDIKSESGLRVLAINILGRFLLNNDKNIRYVALTSLLKTVQTDHNAVQRHRSTIVDCLKDLDVSIKRRAMELSFALVNGNNIRGMMKELLYFLDSCEPEFKADCASGIFLAAEKYAPSKRWHIDTIMRVLTTAGSYVRDDAVPNLIQLITNSVEMHAYTVQRLYKAILGDYSQQPLVQVAAWCIGEYGDLLVSGQCEEEEPIQVTEDEVLDILESVLISNMSTSVTRGYALTAIMKLSTRFTCTVNRIKKVVSIYGSSIDVELQQRAVEYNALFKKYDHMRSALLERMPVMEKVTTNGPTEIVQTNGETEPAPLETKPPPSGPQPTSQANDLLDLLGGNDITPVIPTAPTSKPSSAGGELLDLLGDINLTGAPAAAPAPASVPQISQPPFLLDGLSSQPLFNDIAAGIPSITAYSKNGLKIEFTFERSNTNPSVTVITIQASNSTELDMTDFVFQAAVPKTFQLQLLSPSSSIVPAFNTGTITQVIKVLNPQKQQLRMRIKLTYNHKGSAMQDLAEVNNFPPQSWQ

SEQ ID NO: 1669 - DNA, 1198 bp, Homo sapiens
atgtgtccatccagtgagtggatcctgggaagcgctgtgaaatgggctggctcccgagccagccgggaggacacttactacagctgctcagaagcaccactggaaactcagatgtgggcgccccagccagaagcagagaggggtacagggaagctacagagaagccccttctgatgccccagggagcaagtcgactccttccaggctccaggaacaccacaaagcaatatgaaacctgttcatgaaaggagtcaggaatgccttccaccaaagaaacgagacctccccgtgaccagcgaggatatggggagaactaccagctgctccactaaccacacaccctccagtgatgcttctgaatggtcccgaggggttgtggtggctgggcagagccaggcaggagccagagtcagcctggggggtgatggagctgaggccatcaccggtctgacagtggaccagtatggcatgctgtataaggtggctgtgccgcctgccaccttttcaccaactggactcccatctgtggtgaatatgagtcccttgcccccaacgtttaatgtagcgtcttcactaattcaacatccaggcatccactatcctccactccactatgctcagctcccatccacctcgctgcagttcattgggtctccttatagccttccctatgctgtgccacctaatttcctaccgagtcccctcctatctccttctgccaaccttgccacctctcaccttccacactttgtgccatatgcctcacttctggctgaaggagccactcctcccccacaggctccctccccggcccactcatttaacaaagctccctctgccacctccccatctgggcaattgccacatcattcaagtactcagccgctggaccttgctccaggtcggatgcccatttattatcagatgtccaggctacctgctgggtatactttgcatgaaacccctccagcaggtgccagcccagttcttacccctcaggagagccagtctgctctggaagcagctgctgcaaatggaggacagagaccacgagagcgaaatttagtaagacgggaaagtgaagcccttgactcccccaacagcaagggtgaaggccagggactggtgccagtggtagaatgtgtggtggatggacagttgttttcaggttctcagactccacgggtagaggtagcag

SEQ ID NO: 1670 - protein, 57 aa, Homo sapiens
MCPSSEWILGSAVKWAGSRASREDTYYSCSEAPLETQMWAPQPEAERGTGKLQRSPF

SEQ ID NO: 1671 - DNA, 7518 bp, Homo sapiens
atggggagaactaccagctgctccactaaccacacaccctccagtgatgcttctgaatggtcccgaggggttgtggtggctgggcagagccaggcaggagccagagtcagcctggggggtgatggagctgaggccatcaccggtctgacagtggaccagtatggcatgctgtataaggtggctgtgccgcctgccaccttttcaccaactggactcccatctgtggtgaatatgagtcccttgcccccaacgtttaatgtagcgtcttcactaattcaacatccaggcatccactatcctccactccactatgctcagctcccatccacctcgctgcagttcattgggtctccttatagccttccctatgctgtgccacctaatttcctaccgagtcccctcctatctccttctgccaaccttgccacctctcaccttccacactttgtgccatatgcctcacttctggctgaaggagccactcctcccccacaggctccctccccggcccactcatttaacaaagctccctctgccacctccccatctgggcaattgccacatcattcaagtactcagccgctggaccttgctccaggtcggatgcccatttattatcagatgtccaggctacctgctgggtatactttgcatgaaacccctccagcaggtgccagcccagttcttacccctcaggagagccagtctgctctggaagcagctgctgcaaatggaggacagagaccacgagagcgaaatttagtaagacgggaaagtgaagcccttgactcccccaacagcaagggtgaaggccagggactggtgccagtggtagaatgtgtggtggatggacagttgttttcaggttctcagactccacgggtagaggtagcagcaccagcacaccgggggaccccggacactgaccttgaggtccagcgggtggttggcgctttagcttctcaggactatcgtgtggtggcagctcagaggaaggaggaacccagccccctcaacctatcccatcatacccccgaccatcagggtgaggggcgagggtcagccaggaaccctgcagagctggcagagaaaagtcaggcccgtgggttctaccctcagtcccatcaggaaccagtaaaacatagacctttacccaaagcaatggttgtagccaatggcaacctggtgcccactggaactgactcaggcctgctgcctgtgggctcggagatcctggtagcatcaagtctggacgtgcaggccagagccaccttcccagacaaggagccaacgccgccccccattacctcctctcacttgccttcccatttcatgaaaggcgccatcatccagctggctacgggagagctgaagcgggtggaggacctccagacccaggattttgtgcgcagtgccgaagtgagcggggggctgaagattgactctagcacggtcgtggacattcaggagagccaatggcctggatttgtcatgctgcattttgtggttggtgagcagcagagcaaagtgagcatcgaagtgccccccgagcaccccttctttgtatatggccagggttggtcctcttgcagccctgggcggacgacacaactcttctctctgccctgccatcggctacaggtgggagatgtctgcatctctatcagtttacagagcttgaacagtaactcagtttctcaggccagctgtgctcccccaagccagctgggtcccccccgagaaaggcctgagaggacggtcttgggatccagagagctatgtgacagtgaggggaagagccagccggcaggagagggctcccgtgtggtagagccttcccagcctgagtccggtgctcaggcctgctggccagccccgagcttccaaagatacagcatgcaaggggaggaggcacgggctgcgctgctccgtccctctttcattccacaggaggtaaagctgtccattgaagggcgttccaatgcgggaaaatgaacctcttccccagaccaggactggggctttaccccagagcctcgcctcgccgccgtgagcaggcagaggatttgcacacgccgagcagggaatggctttcttggcagtgagatttgggggaaaggggaggcatgaagtcagcctcccaaggcaggatctgttgttcattaccccatggcatcctttcaggacaaccccagagggtgttgtgatggggagcagcaggcctggggcaaggaaggaagggggtgcacacaggagaagaaacattccaaaatcagggcctccctgttctttcctccccatccctagctcctgcaagagaaagtccaggctttgggagcagatggcagagggagggagtaaagaaagagccaaaaatgatgatccacagcttatagtagcagttaaactgtcagaagttttttttcttttttgtggtagaagggcaggaggccccaaggttggaaataagagggttcccacccagaacccttcttgtgagagatgcgcactttaaagggtgattttgttccagatgtctatggctgggtgtgtgggggaggagcactctcatctgcaggactctgcttgatcctctgcttcatagcccttccccatctctcctcaccattctgcctacaaggcttctagcagcacgggggcccggagggagagccccttcagggttcagagtgaagtactaccttgccagggactcagtcaggggactttgggagaaagacttgatagccaggctgactgggttctaggcaggccctctggaaaggtagctcacctaacaaagctcctccatctcagcatgccagacccactttgaaatctcacagaatcttgctggtaatggtgactttagaactagtagaccctttttcccaggcactgaccccccacctttgtctgtgttgtgcccaagtgcctgcgccacccccaccctcctgctgcgctgaccgctgcatggtgtcgtgacctgggcctcatttgtagctgcactgcctttccttgtctgcaaagttggttttgtccactctgaccaagacctctagtttttggtgggtagggggtctctctggtttccccttcagctataatctctatttttaaaatctcaaaatcatgtcccctccacttccactgccaaacagcttggtgaagaaacaagaagggaactatgccctgggccagggcgaatgcgtggctgggcagtgcccatcatggcattttcacatgtcccatatgcccctcctgtcttattccactgcttctcccagcattctggtgcctccaagccatcccctcccaccaccagctctaagattctaggatagtcttgataacatttcagtacctgaatagatgtcattttgtgttggtatattcctctgcaaaaagtattttcaatcttggttgcattggcaccccccctaccccccaccaatgtcttaatcccacattttcttcacaacttttagcatcagctcagaccgtggggttccactgggtattgggaattaggctcccccactagctttcaggtgggtaagtttttttgtttgttttttgggggtctttagactcttgaaggcaactcagggtattgtccacgcagctctctggttagacttctcccaggctatgatcctggcatgtcctttataaggtatacttggattggccgagacctggcctggcatcaggagtccaaacctctgaggtctgatctctgctctgtcaaggactttcggcaagtctcgtgacctctggctctttcacttcctccccacctgccaaatggggataaataatcttacctacctcctggggggaggggaagttctgagaatggagtcattcttagtgttcaggtgctaaaggttgttctcctgggggaacagagtgactgaaactggcttgtttgctacaagccctaccctccactctttcattccttgaaagcagtttgcctggtcagtcagcttttgggggtccatcaaaggaggttgctgacctgaccgtgagtgcttcagtatctggtttgtgtcagaaccagacgccaactttgtactgcatttgggatcatatctttccccttctctgtcccccattctctgaatgctgctttctctggcttgtttcctacagtgggggcctgtggggttgagtcttgaggaatcccctcaaatgagaaggccttgggagaaggcctcatctctggctgtttcatgagcaactcattcctagagttcattgtttgcatgggtttctcacaagcgtccttcctcataggaaggctcatcaactgaatttagtgacatgtacacagtagatgctcaagcagtgtctgcaaggacacaagctgagctttctccttatggggcaaacctatgtctaaccagatacagaccaattagtttagatcaaatcaccttccacttgggctacttgtgactttccaacctggtaacttccactgaattctggaaagagaaattcttgaggaccctggcaagttgggccctgacctttctgttgctgtctcttgctggtgaagcaataccagcagttcctgtaataccacaatatcgttccatgcatatataacatattaatacttgattttgctgagctgcaaaggtatctgtcataaaatatggtccccaggaaaagaatctctgtgctctaaatctcggtcagagctgtggcctcccccttgcctttaacctctagtttagtcttttcctccaggcatgaaaaatatgactaacctgtggtgtgtccattcttccttataggaatttcctgagtttgcaggagacatgagagcagtttttagcgagtattttagtgggaagttgccaactttttaagaatgagcagttgacaagggccagagcctgtcccttgtcagcagtaggacatttccagctcttaggaatagaaaggaggactgctgactgtctggcgctgtataaaaatgtgtataccaatttgggaataggggaacccagtcatggatggataataagccaagtcttgaatcattcctatcaagattagtatacatgaggaagaggtggcatggggggaaggggctctgggagttcagagctgagtacttgtacctgagggagggcccccagccaatctgggctggtccttctatattcttggtcccagttggtcataacaccaagggctttgccctgcgctgctttgccactgctgctgtccgctcactgtcctgcctgctgtcctctacagctccctatccttccatgtctttggccatgtagattaagtgtaggcgtccggttcattcttacctgtgttaggccatgttattttatagcgaagtcatgttcgatagggatggtatgaaatgctgctggtgggctggtaaatccaaagggataaggcttcagtgctgttgggagccctctggctccaaatgtctgactatcttgagggagaaacaagcaggtttctactagtggtgtcttctgttgtattaacttctttcctttgtggtatcttgtatcctgttttaaaaactaaatgaagggaaccacattagggcccatgccagcatcccagtgaagttcgtccagctccagttaggtggattctggagttcggagagggtttaaagtttggctgaaatagcacctcaagtggggtttagttttatttttacctgcgggcatcatgggcgatttagggggaagcacaggatggtggtgtggtttaaacctgcagcaagcaggcatgttgaagagttgagtgatcacgctggagatgaagggttggacatggattgactgggaaaaggcctgggtccattggagtaaagataacctagtcgattgaattggccatgggaagttaggtcacagtcttataaacaaagtaaataggacagagactaagttttagggagacatcttggcctcctaggctaagtttactaaaccacactgaagctatagtaccttccagatgggcaaaagtgtacactacagttgaggagctgaaccttattaggttggatgtcgatcaggaacctgtttgccctttgctgggaagccttcactctccagctttcctggggtagggaaggtctcccacattatgcaataataaaataagcatctgggtctttgcagctgtcagttgctctttcaactctaggatccatctttggaccagaagcctggtctgtgcctaggatgacactggccccagagatgctagagtcgactgcactctctccttagctgcagaccatgcacagtgcctggggcggaaggaggagaggtgttgcggtttgccctgctgcctccccagcaggaacaatagtcataaatgcacttttcacactaaaggtttctttattagttctccagttaaacctagatccctccctggtagattgcgaactcaaagttttgtgatcccaaagccattccactgcaaatgcccagcagtgaagatggcctcaaattgggttcttgcctgcagtgtgtgtggcagcagcccatgtgcctttacctgttgtcaaacttgcaagcatttatttgtctttatgactgtcatggggactgaggttcttcagagaaagagtgtgagctgatgacacagtggttttacacccaccccctgggcagggagtttgcacgtagttgtgagctgtgagtggttagtgcattgctggtattgctgaaggcagggttgatccctcacttgactgatacttgcattcaagagaatctagattgtgttgggggagggactgactgtactcatggctaacttaaagtattaaaataaggctgtcccctacaaccttcttagtcacacaggatccctgtagccaaaacagtatatgatccagctgcagagagcagactgctctcagcttgcacagcaccttaggcgagggaagaatatacggatagggaatggggtggagaaaggatgggaatgttgtcatccaggtggctttagggtcctaaggagtggagaaggatggcactggggaggtctggatggatctgtgtaggagttccctgtagataaattactgatcccccatctactatccccagtatgtaatggctgaattaatatgtaatcaactgcattgtatctaaagccttagaactagtcaggtgctccctccacccaataccatttcttaccctctaatcctacctgatctttaacaaagcattaataattctaaggataatctctattttgttgtgcttttttgtaactgttttaaataaatcaatttgtactgtatatttgtacttttgtgagatcctttttgctgttttaccattttaagtctctgtacttggctacacacagattgtatttttattgttaatgctcttcttatggatacctgcatttaacttgtggactatgtaaacacaatatctatcaatatctatatatctatatatctatctatataaactactagcttttcctttt

SEQ ID NO: 1672 - protein, 664 aa, Homo sapiens
MGRTTSCSTNHTPSSDASEWSRGVVVAGQSQAGARVSLGGDGAEAITGLTVDQYGMLYKVAVPPATFSPTGLPSVVNMSPLPPTFNVASSLIQHPGIHYPPLHYAQLPSTSLQFIGSPYSLPYAVPPNFLPSPLLSPSANLATSHLPHFVPYASLLAEGATPPPQAPSPAHSFNKAPSATSPSGQLPHHSSTQPLDLAPGRMPIYYQMSRLPAGYTLHETPPAGASPVLTPQESQSALEAAAANGGQRPRERNLVRRESEALDSPNSKGEGQGLVPVVECVVDGQLFSGSQTPRVEVAAPAHRGTPDTDLEVQRVVGALASQDYRVVAAQRKEEPSPLNLSHHTPDHQGEGRGSARNPAELAEKSQARGFYPQSHQEPVKHRPLPKAMVVANGNLVPTGTDSGLLPVGSEILVASSLDVQARATFPDKEPTPPPITSSHLPSHFMKGAIIQLATGELKRVEDLQTQDFVRSAEVSGGLKIDSSTVVDIQESQWPGFVMLHFVVGEQQSKVSIEVPPEHPFFVYGQGWSSCSPGRTTQLFSLPCHRLQVGDVCISISLQSLNSNSVSQASCAPPSQLGPPRERPERTVLGSRELCDSEGKSQPAGEGSRVVEPSQPESGAQACWPAPSFQRYSMQGEEARAALLRPSFIPQEVKLSIEGRSNAGK

SEQ ID NO: 1673 - DNA, 1841 bp, Homo sapiens
ctaaatttagatttcggagattgtgttgtctaagggtttgtctgagccgcctcggaagacctccggctcttgtcaggctcttgtctggtaattcctgggaatttacctgggctcatgcttgaagaagcagagggaccatctcggctgattagacacgccccagacccaaccccaggggtcaggtgaacagccaggcggctaagtgaccagctttcttgtcctctcctttttggcagatacagatcacttggattcagtcgagtttgctttgctccgtgggaactgcaccagagctggaggttagcatcttgcaaggaggtagtaacatatccagtcgtgaaactgggaaagaccagagctcttgcatcagggaaacatgtcccgtcggaaacagacaaatccaaataaagttcactgtgacagtgagggtgatgaagaggagacgacacaagatgaagtctcttcccacacatcagaggaagatggaggggtggtcaaagtggagaaagagttagaaaatacagaacagcctgttggtgggaacgaagtggtagagcacgaggtcacagggaatttgaattctgaccccttgcttgaactctgccagtgtcccctctgccagctagactgcgggagccgggagcagttgattgctcacgtgtaccagcacactgcagcagtggtgagcgccaagagctacatgtgtcctgtctgtggccgggcccttagctccccggggtcattgggtcgccacctcttaatccactcggaggaccagcgatctaactgtgctgtgtgtggagcccggttcaccagccatgccacttttaacagtgagaaacttcctgaagtactaaatatggaatccctacccacagtccacaatgagggtccctccagtgctgaggggaaggatattgcctttagtcctccagtgtaccctgctggaattctgcttgtgtgcaacaactgtgctgcctaccgtaaactgctggaagcccagactcccagtgtacgcaagtgggctctacgtcgacagaatgagcctttggaagtacggctgcagcggctggaacgagagcgcacggccaagaagagccggcgggacaatgagacccccgaggagcgggaggtgaggcgcatgagggaccgtgaagccaagcgcttgcagcgcatgcaggagacagacgagcagcgggcacgccggctgcagcgggatcgggaggccatgaggctgaagcgggccaatgaaaccccggaaaagcggcaggcccggctcatccgagagcgagaggccaagcggctcaagaggaggctggagaaaatggacatgatgttgcgagctcagtttggccaggacccttctgccatggcagccttagcagctgaaatgaacttcttccagctgcctgtaagtggggtggagttggacagccagcttcttggcaagatggcctttgaagagcagaacagcagctctctgcactgaaccacaccctcctgcctgccctccttcccacctacctacccacccacccacacccacagccacgaggaccagtgctgctgccacccacgaggccctgtccttgctgccagaggcaggcctgggtttattgcaggtggacctgagcagcccttgcatatgggaacaggatgatggggtcaggagggacctggctcaaggcagctctggacaagggagcaggcagtccagagaactggcctccccagcccactgccacaggctgtgcttctaggactgtggggcccctgtgtggcccatgaagttgtgaagtcaaataaattaattttatctttaaaaaaaaaaaaaaaaaaaa

SEQ ID NO: 1674 - protein, 370 aa, Homo sapiens
MSRRKQTNPNKVHCDSEGDEEETTQDEVSSHTSEEDGGVVKVEKELENTEQPVGGNEVVEHEVTGNLNSDPLLELCQCPLCQLDCGSREQLIAHVYQHTAAVVSAKSYMCPVCGRALSSPGSLGRHLLIHSEDQRSNCAVCGARFTSHATFNSEKLPEVLNMESLPTVHNEGPSSAEGKDIAFSPPVYPAGILLVCNNCAAYRKLLEAQTPSVRKWALRRQNEPLEVRLQRLERERTAKKSRRDNETPEEREVRRMRDREAKRLQRMQETDEQRARRLQRDREAMRLKRANETPEKRQARLIREREAKRLKRRLEKMDMMLRAQFGQDPSAMAALAAEMNFFQLPVSGVELDSQLLGKMAFEEQNSSSLH

SEQ ID NO: 1675 - DNA, 2377 bp, Homo sapiens
gaaccctgaagtcggtgtctgctgcgttcacggcaggattcggttaggaggaacagcacagcatgctgggctctggatttaaagctgagcgcttaagagtgaatttgagattagtcataaatcgccttaaactattggagaaaaagaaaacggaactggcccagaaagcaaggaaggagattgctgactatctggctgctgggaaagatgaacgagctcggatccgtgtggagcacattatccgggaagactacctcgtggaggccatggagatcctggagctgtactgtgacctgctgctggctcggtttggccttatccagtctatgaaggaactagattctggtctggctgaatctgtgtctacattgatctgggctgctcctcgactccagtcagaagtggctgagttgaaaatagttgctgatcagctctgtgccaagtatagcaaggaatatggcaagctatgtaggaccaaccagattggaactgtgaatgacaggctaatgcacaagctgagtgtggaagccccacccaaaatcctggtggagagatacctgattgaaattgcaaagaattacaacgtaccctatgaacctgactctgtggtcatggcagaagctcctcctggggtagagacagatcttattgatgttggattcacagatgatgtgaagaaaggaggccctggaagaggagggagtggtggcttcacagcaccagttggtggacctgatggaacggtgccaatgcccatgcccatgcccatgcctatgccatctgcaaatacgcctttctcatatccactgccaaagggaccatcagatttcaatggactgccaatggggacttatcaggcctttcccaatattcatccacctcagataccagcaactcccccatcgtatgaatctatgacattaatgctgataagaatatctcttctgcacagattgttggtcctggacccaagccagaagcctctgcaaagcttccttccagacctgcagataactatgacaactttgtcctaccagagttgccatctgtgccagacacactaccaactgcatctgctggtgccagcacctcagcatctgaagacattgactttgatgatctttcccggaggtttgaagagctgaaaaagaaaacataggtctcttaaaccaggcaactttcacgttttgggagttgagactgagcaatttctccttgtaacaaagaatctccatgaaattctgtttcatctgttaaccgtcactcagcacaacactccctctgggctctcttcctgctcctccagattctgctgctttccagttctctgttgatcctgagactaacaattggagactgaggccagagcaactggctcctggcagctgtgcttgtccgtttcctgtcagagtgatcccaggtttcctcctggcccgtcccatggtccctccacaggagtgtgagaggatgggggaagcactgtgggaagaccaccaaagatggctggacagtgggagagagcacgttgtgaagcatcccagcctcgtgttgaggttccagacttagaaacagacccctctgtacagggggattgtggtgagtgagaatcaaggccaccttgtgtgttttctcactctcgaatgcaagtgggagagggaaaatgactcgggacgccattgtaacggttcctggaagctgggccctctcattggcatatacagtactcctcgctgcagggcactgtcccaccgggatccagttgcaaagtttgtcttgacagttgaaggcctcgcttagttgtactggattctcagggagccctctgtggccttttgctttgcgtgctgtttcccttgtaccagagggcggcaccgtggaaattctgttttccctgtagcatattgtgttggattgcattactggcagagaaaggacaaggtgccattcaagtcctagggtgggcttccagctgccttaatagaagtactcaagtcttttgggtagtgagctggaaagcctacaggaaaagaggggtacctgttttcatttgaaaactttgattcatggaacctttaaaactaatctcagaaaaatttttggtgcccatgcagctgtagttgttcactgctttcctggatggatgggactcttatgtcataacttctgttactcctttggcccatagctaaggtcatccttccccacaggggtggctttgggattggatgatacagcttttgcttctgtgtagtatacctgtacatacttgtttcaggcagcctttctttaatgttttcagttggtttgtattctgtagctcagtagctgctaataaagttaaagatcctgaaaaaaaaaaaaaaaaaaaaaaaaaaaa

SEQ ID NO: 1676 - protein, 360 aa, Homo sapiens
MLGSGFKAERLRVNLRLVINRLKLLEKKKTELAQKARKEIADYLAAGKDERARIRVEHIIREDYLVEAMEILELYCDLLLARFGLIQSMKELDSGLAESVSTLIWAAPRLQSEVAELKIVADQLCAKYSKEYGKLCRTNQIGTVNDRLMHKLSVEAPPKILVERYLIEIAKNYNVPYEPDSVVMAEAPPGVETDLIDVGFTDDVKKGGPGRGGSGGFTAPVGGPDGTVPMPMPMPMPMPSANTPFSYPLPKGPSDFNGLPMGTYQAFPNIHPPQIPATPPSYESMTLMLIRISLLHRLLVLDPSQKPLQSFLPDLQITMTTLSYQSCHLCQTHYQLHLLVPAPQHLKTLTLMIFPGGLKS

SEQ ID NO: 1677 - DNA, 5742 bp, Homo sapiens
atgttcttcaaaggaggaagctggctttggttatacatcagaacaagtattattctaggaagtgagctaaacagcccagcaccacatgggcaaaataattgttaccagcttaacagatttcaatgcagctttgaggaagcacagcattactgtcatgtgcagagaggattcctagctcatatttggaacaaggaagttcaagatctcatccgggactatctggaagaaggaaagaagtggtggattgggcaaaatgtaatgccattgaaaaagcatcaagacaacaaatacccagcagacgttgcagccaacgggcccccaaagcccctcagctgcacctacctgtccagaaacttcattcggatctcatccaaaggggacaagtgcttactgaaatactatttcatttgccagactggtgactttttggacggagatgcccattatgaaagaaatggaaataattcccatttgtaccagagacacaagaagacaaaaagaggagttgcaatagcaagagacaaaatgcccccaggacctggtcatcttccaaccacatgtcactatcctcttcctgctcatctttccaagaccctgtgtcatcccatcagccagtttccttcagtactatcaagtatcacatcacaggtaacatcagccgcatctgaacccagcagccagcctctccctgtgataacacagctcaccatgcccgtgtctgtcacgcatgctgggcaatctctggcagaaacaacttcaagcccaaaggaagaaggtcatccgaataccttcacctcttatctacaagtgtcattgcagaaggcatctggtcaggtcatagatgagatagcagggaacttcagcagagcagttcatggtttgcaagctcttaacaaactacaggaagcttgtgagttcctccagaaactaacagccttaaccccaagattttctaagccagctcaggttaatctcatcaattcccttatttacctgagtgaggagttactcaggatcccatttcagaacaacaacagtctgggcttcaaagttcctccaactgtctgcccctttcattccctcaacaatgtcaccaaagctggagaaggaagttggctggaatccaagcgtcatactgagccggtagaagacatcctggaaatgtccttggtggagtttgggaatatcggggaagcatttctagagcagaaccagtctcccgagtcttcagtgactttgacctctgccaatgctactctgctgctgagcagacaaaacatatcaactttaccgctgagctcttacactctgggtcacccagcccctgtgaggctaggctttccgtcggctttagctttgaaggagctcttgaataaacatccaggagttaatgtccaaataacaggactagctttcaatcccttcaaggatttggacaacagaaacattgttggaagcattggaagtgtgttactaagcgctaatcgtaaattgctccaagtccatgatttaatggaggacattgagatcatgctctggagaaatgttagcttggaaacccatcccaccagcctcaacatgagcacacatcagcttacaatcacagtgaacgtcacttccttggagaaatccttgatagtgagcatagatcctgacagtccccttttaatgacactctacctggggttccagtatcagcctaactgcactcacttccacctgaacatcacccttccaaaggataaggtgtggcaaaaagatgaggagtacacgtgggtgctgaatccagagcatctgcagcacgggattggcacctactatataacagctgtgctgagtgagaggcaggagggtgctcagcagacacccagcttggtctcggtcatcaccgccgtcactcagtgttactactgggagatccacaaccagacatggagcagcgccggatgccaagttgggccacagagcacaattctgaggacacagtgtctctgtaaccacctgaccttctttgccagcgacttctttgtcgtgcccaggaccgtgaatgttgaagacacgatcaaactgttccttcgcgtgaccaacaatcctgttggggtgtcactgctggccagccttttaggattttatgtgatcacagttgtgtgggctcggaaaaaggatcaagcagatatgcagaaggtgaaggtcactgtcctggctgataatgaccccagcgctcaatttcactaccttattcaggtctacaccggatatcgaagaagcgctgctacaacagctaaggttgtcatcaccctctatggatcagagggacggagtgagccccatcacctctgtgacccccagaagacagtctttgaacgagggggcctggatgtcttccttctcaccacttggacctctctagggaacctgcacagccttcggctctggcatgacaattctggcgtcagtccctcctggtatgtcagccaggtaattgtctgtgacatggcagttaagaggaagtggcatttcctgtgcaattgctggctggctgtggacctcggagactgtgagcttgaccgggtcttcatcccagtttcaaagagagagctcttttcctttagacatctgttttcctccatgattgtggaaaagttcacccaggattatctgtggctttcaattgcaactcggcatccctggaaccagtttacaagggtccaacggctgtcttgctgcatgacactgctactctgcaacatggtcatcaatgttatgttctggaagataaacagcaccactgccaagagagatgagcaaatgcgtccatttgctgtggcctggtctgaactgctggtcagcatccatactgctgtcatcctcttcccaatcaatcttgtcatagggcggctcttcccgttgattgagccacaggagactctgcccctctttcctcccatccaggcctcctgcctctcagatgcttctgttgagcctctctctgccacaatggtagttgaggaattaaaggaaactgtgagattcctgctcaggagaaatacatacctactctccaagtgtgagcagccgccatggagttcttgggacattactaagctggtgaaacttttatccagcctcgtatcatctcacttggagggtcaaggctgtcatcagcagggagagcgccactgggcacgtgttgttcctgaaaaccaccatcatttctgctgttacctgcatagagttctgcagaggctgaaatctcacttaggcacgctgggtctcacccagggtcaccagtcctgtgacttcctagatgcagccagccaacttcaaaaactccaggaactcttggaaacacatattcttcccacggagcaagagccatccagggaagtcaccagttttgccatcctgagctcagaagaaggaaaaaagcccatctcaaatggcctgtccaaatggttgacttcagtctgctggctcctcttaggtttcactagcctggcttcagccttttttacagcactttatagcttggaattgagcaaagaccaagccaccagctggatgatttcaattattttatcagtgcttcagaacatcttcatcagccagccagtaaaggtggtcttcttcacattcttatactcactgatgatgagcaggatgccacggcttaacaaagagaatgaacaacaaagaggatcttggcactcttggcaaaatgttcttcgtcagtaccaggttcaagagataagaacaaccccgtctatgtagccccagctataaatagtccaactaagcacccagaaagaaccttgaaaaagaagaaactcttcaagctgactggagatattttggtacaaatcctcttccttaccctgttgatgactgcaatctactctgcaaagaactccaatagattttacctccaccaagctatctggaagacattttcgcaccagttctcggaaatcaaacttcttcaggatttctacccctgggccaatcatatccttcttcctagcctgtatggggattacagaggtaagaatgcagtcctggagcccagtcattgcaaatgtggggtacaattaattttccaaataccccgtaccaagacctatgagaaagtggacgaaggtcagctggcgttttgtgataacggccatacctgtgggcgtcccaagagcctattccctggacttcatctaaggaggttcagttacatctgttcacccaggcccatggtgctgattcccactgatgagcttcacgaaaggctgacaagcaagaatgagaatggattcagttacatcatgagaggtgctttcttcacctctttgagactggaaagcttcacttcccttcagatgtcaaagaagggctgtgtctggtctatcatctcacaagtcatctattatctactggtctgttactatgccttcatacagggttgtcagctgaaacagcagaagtggaggttcttcactgggaaaagaaacattctggacacaagtataatcctcattagcttcatcctcctggggcttgacatgaagagtatttctctacataagaaaaacatggcacgataccgcgatgaccaggacagattcatcagcttctatgaggcagtaaaagtgaactctgctgcgactcaccttgtgggcttcccggttctcctggcaactgttcagttatggaacctgctgcgtcatagccccaggctgcgggtcatcagcaggacactgagccgagcctgggacgaggtggtgggctttctgctgatcatcctaatcctgctgacaggctatgccattgcctttaacctgctgtttggatgcagcatctctgactaccggacatttttcagctcagcagtgactgttgttggtctcctgatgggaatttctcaccaagaggaggttttcgctttagacccagtcctgggcacctttctgatcctcaccagtgtcatcttgatggtacttgtggtaattaatcttttcgtttcggccattctcatggcctttggaaaagaaagaaagtcgcttaagaaagaagctgcactaatagatacactgctacagaagctctcaaatttgttaggaatcagttggccccaaaaaacctcatctgagcaagcagccacgacagcagtgggcagtgacactgaagttttagatgaactaccttaatcctgttatctcctacttggcttagtatttattagcgtattactacttatctttgcatggcatagctttaaaattataatatactttgtttttaattctgtaagttaggaatcaaaatccccttggtcccaagttcttatggatcttggcactgtcaagataggattaacaatgcaagaatactacgagacaaactagctctgctgccaagcagcaagtaacagaactcaccacccatggcccaggatggctgcgggaaatgaagcagtcagaagtgagctcactgcaacttactaaaaataaacatccaaggatgaggcatggcagatgcggagccctgccactgaggaagaccaaggaaattcacagatgctatctgggctatctaaatacagagatcaaaatgagctctgtactgctccaggaatcctgaaactaagggctggtttacatggatcacttggttaaaatattctccactaaaatccagatttatacttcatcatctgaccaaacagtagagaaagcaggacacaggatctttaac

SEQ ID NO: 1678 - protein, 1731 aa, Homo sapiens
  misc_feature (1257)..(1257): Xaa may be selenocysteine
  misc_feature (1261)..(1261): Xaa may be selenocysteine
  misc_feature (1272)..(1272): Xaa may be selenocysteine
  misc_feature (1280)..(1280): Xaa may be selenocysteine
  misc_feature (1294)..(1295): Xaa may be selenocysteine
  misc_feature (1364)..(1364): Xaa may be selenocysteine
  misc_feature (1403)..(1403): Xaa may be selenocysteine
  misc_feature (1417)..(1417): Xaa may be selenocysteine
  misc_feature (1427)..(1427): Xaa may be selenocysteine
  misc_feature (1439)..(1439): Xaa may be selenocysteine
  misc_feature (1447)..(1447): Xaa may be selenocysteine
  misc_feature (1487)..(1487): Xaa may be selenocysteine
  misc_feature (1506)..(1506): Xaa may be selenocysteine
  misc_feature (1518)..(1518): Xaa may be selenocysteine
  misc_feature (1545)..(1545): Xaa may be selenocysteine
  misc_feature (1547)..(1547): Xaa may be selenocysteine
  misc_feature (1583)..(1583): Xaa may be selenocysteine
  misc_feature (1595)..(1595): Xaa may be selenocysteine
  misc_feature (1598)..(1598): Xaa may be selenocysteine
  misc_feature (1601)..(1601): Xaa may be selenocysteine
  misc_feature (1627)..(1627): Xaa may be selenocysteine
  misc_feature (1633)..(1633): Xaa may be selenocysteine
  misc_feature (1645)..(1645): Xaa may be selenocysteine
  misc_feature (1653)..(1653): Xaa may be selenocysteine
  misc_feature (1660)..(1660): Xaa may be selenocysteine
  misc_feature (1665)..(1665): Xaa may be selenocysteine
  misc_feature (1690)..(1691): Xaa may be selenocysteine
  misc_feature (1702)..(1702): Xaa may be selenocysteine
  misc_feature (1727)..(1727): Xaa may be selenocysteine
MFFKGGSWLWLYIRTSIILGSELNSPAPHGQNNCYQLNRFQCSFEEAQHYCHVQRGFLAHIWNKEVQDLIRDYLEEGKKWWIGQNVMPLKKHQDNKYPADVAANGPPKPLSCTYLSRNFIRISSKGDKCLLKYYFICQTGDFLDGDAHYERNGNNSHLYQRHKKTKRGVAIARDKMPPGPGHLPTTCHYPLPAHLSKTLCHPISQFPSVLSSITSQVTSAASEPSSQPLPVITQLTMPVSVTHAGQSLAETTSSPKEEGHPNTFTSYLQVSLQKASGQVIDEIAGNFSRAVHGLQALNKLQEACEFLQKLTALTPRFSKPAQVNLINSLIYLSEELLRIPFQNNNSLGFKVPPTVCPFHSLNNVTKAGEGSWLESKRHTEPVEDILEMSLVEFGNIGEAFLEQNQSPESSVTLTSANATLLLSRQNISTLPLSSYTLGHPAPVRLGFPSALALKELLNKHPGVNVQITGLAFNPFKDLDNRNIVGSIGSVLLSANRKLLQVHDLMEDIEIMLWRNVSLETHPTSLNMSTHQLTITVNVTSLEKSLIVSIDPDSPLLMTLYLGFQYQPNCTHFHLNITLPKDKVWQKDEEYTWVLNPEHLQHGIGTYYITAVLSERQEGAQQTPSLVSVITAVTQCYYWEIHNQTWSSAGCQVGPQSTILRTQCLCNHLTFFASDFFVVPRTVNVEDTIKLFLRVTNNPVGVSLLASLLGFYVITVVWARKKDQADMQKVKVTVLADNDPSAQFHYLIQVYTGYRRSAATTAKVVITLYGSEGRSEPHHLCDPQKTVFERGGLDVFLLTTWTSLGNLHSLRLWHDNSGVSPSWYVSQVIVCDMAVKRKWHFLCNCWLAVDLGDCELDRVFIPVSKRELFSFRHLFSSMIVEKFTQDYLWLSIATRHPWNQFTRVQRLSCCMTLLLCNMVINVMFWKINSTTAKRDEQMRPFAVAWSELLVSIHTAVILFPINLVIGRLFPLIEPQETLPLFPPIQASCLSDASVEPLSATMVVEELKETVRFLLRRNTYLLSKCEQPPWSSWDITKLVKLLSSLVSSHLEGQGCHQQGERHWARVVPENHHHFCCYLHRVLQRLKSHLGTLGLTQGHQSCDFLDAASQLQKLQELLETHILPTEQEPSREVTSFAILSSEEGKKPISNGLSKWLTSVCWLLLGFTSLASAFFTALYSLELSKDQATSWMISIILSVLQNIFISQPVKVVFFTFLYSLMMSRMPRLNKENEQQRGSWHSWQNVLRQYQVQEIRTTPSMXPQLXIVQLSTQKEPXKRRNSSSXLEIFWYKSSSLPCXXLQSTLQRTPIDFTSTKLSGRHFRTSSRKSNFFRISTPGPIISFFLACMGITEVRMQSWSPVIANVGYNXFSKYPVPRPMRKWTKVSWRFVITAIPVGVPRAYSLDFIXGGSVTSVHPGPWCXFPLMSFTKGXQARMRMDSVTSXEVLSSPLXDWKASLPFRCQRRAVSGLSSHKSSIIYWSVTMPSYRVVSXNSRSGGSSLGKETFWTQVXSSLASSSWGLTXRVFLYIRKTWHDTAMTRTDSSASMRQXKXTLLRLTLWASRFSWQLFSYGTCCVIAPGCGSSAGHXAEPGTRWWAFCXSSXSCXQAMPLPLTCCLDAASLTTGHFSAQQXLLLVSXWEFLTKRRFSLXTQSWAPFXSSPVSSXWYLWXLIFSFRPFSWPLEKKESRLRKKLHXXIHCYRSSQICXESVGPKKPHLSKQPRQQWAVTLKFXMNYL

SEQ ID NO: 1679 - DNA, 1801 bp, Homo sapiens
atgccgctgcacggtgtttgtccgtactaccgcagcctcgaatccaagagtccgcgagcatcaaaacactgtgtttcacaccagaaatattttcagtccagaggctgcggctgtggaggtaccacctgtggagaaactgcaaagatgctgtctgtgtgtgtctccgcggccgtagcccgtgacctcactcggtgggcaggactggtctccagaaatgctttgggttcatctttcattgctgcaaggaacctccatgcctctaacactcatcttcagaagactgggactgctgagatgtcctctattcttaaagagcatgttcttggagctgatacctctgctgaccttgaagaaactgggcatgtcttaagtattggtgatggtattgtccatgtacatgggctgaggaatgttccaagcagaagaaatggtagagttttcttcaggcttaaaggatatgtccttgaacttcgaaactgacaatgttggcattgtagtgtttgaaaataataaagtaaggaaggaggtatagtgaagaggacaggaaccattgtggacgttccagtcggtgaggagctgttgggtcgtgtagttgatgcccttggtaatgctattgatggaaagggtccaatgggttccaagacccataagtgagtcggtctgaaagcccccagaatcattcctcgaacttcagtgtgggaaccaatgccgactggcattaaggctgtggatagcttggtgccaattggtcgtggtcagcatgagctcattattggtgaccgaaggactgggaaaacctcaattgctattgacacaatcattaaccagaaacatttcaatgatagatctgaagaaaagaagaagctgtactgtatctatgttgctattggtcgaaagagatccactgttgctcagttggtgaagagacttacagatgcagatgccgtgaagtacaccactgtggtgtcagctatggcctcagatgctgccctacttcagtacctggctccttactctgactgttccatgggagagtattttagagacgatggcaaatatactttgatcatctatgacgacttatccaaacaggctgtcgcttactgtcagatgtctctgttgctccaccgacccccctggtcgtaaggcctgtcctggtgatgtgttttacctatactcccggttgctggagagagcagccaaaatgaatgatgcttttggtggtggctccttgactgctttgctagtcatagaaacacaggccgatgatgtgtctgcttacattccaacaaatgtcatttccatcactgacagacagatcttggaaacagaattgttctacaaagatatccgctctgccattaacattgggtctgtctgtgtcttgtgttggatctgctgcccaaaccaggactatgaagcaggcggcaggtaccatgaagctggaattggctcaggatcgtgaggttgctgcttttgcccagtttggttctgacctcaatgctcccactcaacaactattgagtcgcggtgtgcgtctaactgagttgctgaagcaaggacagtatcctcccatggttactgaacaacaagtggctgttatctgtgcgggtgtaagggggtatcttgataaactggagcccagcaagattacaaagtttgagaatgctttcttgtctcatgttgtcagccagcgctaagccctgttgggcactatcagggctgatggaaagatctcagaagactcagatgcaaagctgatggagttgtaacaaatttcttggctggatttgaagcttaa

SEQ ID NO: 1680 - DNA, 1778 bp, Homo sapiens
gggcttaatgacggaaggagcatggcgtggagacacctgaaaaagcgggcccaggatgctgtgatcatcctggggggaggaggacttctcttcgcctcctacctgatggccacgggagatgagcgtttctatgctgaacacctgatgccgactctgcaggggctgctggacccggagtcagcccacagactggctgttcgcttcacctccctggggctccttccacgggccagatttcaagactctgacatgctggaagtgagagttctgggccataaattccgaaatccagtaggaattgctgcaggatttgacaagcatggggaagccgtggacggactttataagatgggctttggttttgttgagataggaagtgtgactccaaaacctcaggaaggaaaccctagacccagagtcttccgcctccctgaggaccaagctgtcattaacaggtatggatttaacagtcacgggctttcagtggtggaacacaggttacgggccagacagcagaagcaggccaagctcacagaagttgggcatcgatgggctgattgttacgaacaccaccgtgagtcgccctgcgggcctccagggtgccctgcgctctgaaacaggagggctgagtgggaagcccctccgggatttatcaactcaaaccattcgggagatgtatgcactcacccaaggccgagttcccataattggggttggtggtgtgagcagcgggcaggacgcgctggagaagatccgggcaggggcctccctggtgcagctgtacacggccctcaccttctgggggccacccgttgtgggcaaagtcaagcgggaactggaggcccttctgaaagagcagggctttggcggagtcacagatgccattggagcagatcatcggaggtgaggacagcgtctgacgggaagcctgatctggaaccttcccaaggactcaggcaagcctttgtggctggatcatgagaggagggactccatcttgagccatgtcccccagccatggcatggctgcactgtaaacgccaatcggggggtcaccaggatcaaccgcaggctttcttcagtcccttggtcagaccataaactgcatttttgattctttgtggattcaaaccctaggatccatcagtcttgcaaggacattgaatattaggaggaaaaagtcatggaaaaaataaagccatttagaacctgggtttcaacgctagccctttctggtttgccataggccctgccaagatactgcaggtccatccaggcctctgctatctgcatctgcagtgggcttcccaggaacttgactgtctttcatttgatctttatttttgtttatttaatattttaaactttattttaaaaatatttcaaacataagggcggggtgtggtggctcatgcctgtaatcccagcactttgggaggccgaggcgggcggatcacctgaggccaggagttggagaccagccaggccaccatggtgaaaccctgtctctaccaaaaatacaaaaaattagccagatattgtggcaggcacttttaatcccagctactcgggaggctgaggcaggagaattgcttgaacctgggaggcggaggttgcagtgagccaagattgcaccagtgcactccagcttgggcgacagatcaagactctgtcacacacaaaacaaacaaacaaattttcccgtttctctctgtccctttctctataacatggataaaatattcacgtcttatgtatttattaaaaaaaaaaaaaaa

SEQ ID NO: 1681 - protein, 197 aa, Homo sapiens
MAWRHLKKRAQDAVIILGGGGLLFASYLMATGDERFYAEHLMPTLQGLLDPESAHRLAVRFTSLGLLPRARFQDSDMLEVRVLGHKFRNPVGIAAGFDKHGEAVDGLYKMGFGFVEIGSVTPKPQEGNPRPRVFRLPEDQAVINRYGFNSHGLSVVEHRLRARQQKQAKLTEVGHRWADCYEHHRESPCGPPGCPAL

SEQ ID NO: 1682 - DNA, 2080 bp, Homo sapiens
gggcttaatgacggaaggagcatggcgtggagacacctgaaaaagcgggcccaggatgctgtgatcatcctggggggaggaggacttctcttcgcctcctacctgatggccacgggagatgagcgtttctatgctgaacacctgatgccgactctgcaggggctgctggacccggagtcagcccacagactggctgttcgcttcacctccctggggctccttccacgggccagatttcaagactctgacatgctggaagtgagagttctgggccataaattccgaaatccagtaggaattgctgcaggatttgacaagcatggggaagccgtggacggactttataagatgggctttggttttgttgagataggaagtgtgactccaaaacctcaggaaggaaaccctagacccagagtcttccgcctccctgaggaccaagctgtcattaacaggtatggatttaacagtcacgggctttcagtggtggaacacaggttacgggccagacagcagaagcaggccaagctcacagaagatggactgcctctgggggtcaacttggggaagaacaagacctcagtggacgccgcggaggactacgcagaaggggtgcgcgtactgggccccctggccgactacctggtggtgaatgtgtccagccccaacactgccgggctgcggagccttcagggaaaggccgagctgcgccgcctgctgaccaaggtgctgcaggagagggatggcttgcggagagtgcacaggccggcagtcctggtgaagatcgctcctgacctcaccagccaggataaggaggacattgccagtgtggtcaaagagttgggcatcgatgggctgattgttacgaacaccaccgtgagtcgccctgcgggcctccagggtgccctgcgctctgaaacaggagggctgagtgggaagcccctccgggatttatcaactcaaaccattcgggagatgtatgcactcacccaaggccgagttcccataattggggttggtggtgtgagcagcgggcaggacgcgctggagaagatccgggcaggggcctccctggtgcagctgtacacggccctcaccttctgggggccacccgttgtgggcaaagtcaagcgggaactggaggcccttctgaaagagcagggctttggcggagtcacagatgccattggagcagatcatcggaggtgaggacagcgtctgacgggaagcctgatctggaaccttcccaaggactcaggcaagcctttgtggctggatcatgagaggagggactccatcttgagccatgtcccccagccatggcatggctgcactgtaaacgccaatcggggggtcaccaggatcaaccgcaggctttcttcagtcccttggtcagaccataaactgcatttttgattctttgtggattcaaaccctaggatccatcagtcttgcaaggacattgaatattaggaggaaaaagtcatggaaaaaataaagccatttagaacctgggtttcaacgctagccctttctggtttgccataggccctgccaagatactgcaggtccatccaggcctctgctatctgcatctgcagtgggcttcccaggaacttgactgtctttcatttgatctttatttttgtttatttaatattttaaactttattttaaaaatatttcaaacataagggcggggtgtggtggctcatgcctgtaatcccagcactttgggaggccgaggcgggcggatcacctgaggccaggagttggagaccagccaggccaccatggtgaaaccctgtctctaccaaaaatacaaaaaattagccagatattgtggcaggcacttttaatcccagctactcgggaggctgaggcaggagaattgcttgaacctgggaggcggaggttgcagtgagccaagattgcaccagtgcactccagcttgggcgacagatcaagactctgtcacacacaaaacaaacaaacaaattttcccgtttctctctgtccctttctctataacatggataaaatattcacgtcttatgtatttattaaaaaaaaaaaaaaa

SEQ ID NO: 1683 - protein, 395 aa, Homo sapiens
MAWRHLKKRAQDAVIILGGGGLLFASYLMATGDERFYAEHLMPTLQGLLDPESAHRLAVRFTSLGLLPRARFQDSDMLEVRVLGHKFRNPVGIAAGFDKHGEAVDGLYKMGFGFVEIGSVTPKPQEGNPRPRVFRLPEDQAVINRYGFNSHGLSVVEHRLRARQQKQAKLTEDGLPLGVNLGKNKTSVDAAEDYAEGVRVLGPLADYLVVNVSSPNTAGLRSLQGKAELRRLLTKVLQERDGLRRVHRPAVLVKIAPDLTSQDKEDIASVVKELGIDGLIVTNTTVSRPAGLQGALRSETGGLSGKPLRDLSTQTIREMYALTQGRVPIIGVGGVSSGQDALEKIRAGASLVQLYTALTFWGPPVVGKVKRELEALLKEQGFGGVTDAIGADHRR

SEQ ID NO: 1684 - DNA, 1433 bp, Homo sapiens
agatgccccacagcactgctcttccagaggcaagaccaaccaagatgagtgccctgggagctgtcattgccctcctgctctggggacagctttttgcagtggactcaggcaatgatgtcacggatatcgcagatgacggctgcccgaagccccccgagattgcacatggctatgtggagcactcggttcgctaccagtgtaagaactactacaaactgcgcacagaaggagatggagtatacaccttaaatgataagaagcagtggataaataaggctgttggagataaacttcctgaatgtgaagcagatgacggctgcccgaagccccccgagattgcacatggctatgtggagcactcggttcgctaccagtgtaagaactactacaaactgcgcacagaaggagatggagtgtacaccttaaacaatgagaagcagtggataaataaggctgttggagataaacttcctgaatgtgaagcagtatgtgggaagcccaagaatccggcaaacccagtgcagcggatcctgggtggacacctggatgccaaaggcagctttccctggcaggctaagatggtttcccaccataatctcaccacaggtgccacgctgatcaatgaacaatggctgctgaccacggctaaaaatctcttcctgaaccattcagaaaatgcaacagcgaaagacattgcccctactttaacactctatgtggggaaaaagcagcttgtagagattgagaaggttgttctacaccctaactactcccaggtagatattgggctcatcaaactcaaacagaaggtgtctgttaatgagagagtgatgcccatctgcctaccttcaaaggattatgcagaagtagggcgtgtgggttatgtttctggctgggggcgaaatgccaattttaaatttactgaccatctgaagtatgtcatgctgcctgtggctgaccaagaccaatgcataaggcattatgaaggcagcacagtccccgaaaagaagacaccgaagagccctgtaggggtgcagcccatactgaatgaacacaccttctgtgctggcatgtctaagtaccaagaagacacctgctatggcgatgcgggcagtgcctttgccgttcacgacctggaggaggacacctggtatgcgactgggatcttaagctttgataagagctgtgctgtggctgagtatggtgtgtatgtgaaggtgacttccatccaggactgggttcagaagaccatagctgagaactaatgcaaggctggccggaagcccttgcctgaaagcaagatttcagcctggaagagggcaaagtggacgggagtggacaggagtggatgcgataagatgtggtttgaagctgatgggtgccagccctgcattgctgagtcaatcaataaagagctttcttttgacccattt

SEQ ID NO: 1685 - protein, 406 aa, Homo sapiens
MSALGAVIALLLWGQLFAVDSGNDVTDIADDGCPKPPEIAHGYVEHSVRYQCKNYYKLRTEGDGVYTLNDKKQWINKAVGDKLPECEADDGCPKPPEIAHGYVEHSVRYQCKNYYKLRTEGDGVYTLNNEKQWINKAVGDKLPECEAVCGKPKNPANPVQRILGGHLDAKGSFPWQAKMVSHHNLTTGATLINEQWLLTTAKNLFLNHSENATAKDIAPTLTLYVGKKQLVEIEKVVLHPNYSQVDIGLIKLKQKVSVNERVMPICLPSKDYAEVGRVGYVSGWGRNANFKFTDHLKYVMLPVADQDQCIRHYEGSTVPEKKTPKSPVGVQPILNEHTFCAGMSKYQEDTCYGDAGSAFAVHDLEEDTWYATGILSFDKSCAVAEYGVYVKVTSIQDWVQKTIAEN

SEQ ID NO: 1686 - DNA, 1245 bp, Homo sapiens
actgctcttccagaggcaagaccaaccaagatgagtgacctgggagctgtcatttccctcctgctctggggacgacagctttttgcactgtactcaggcaatgatgtcacggatatttcagatgaccgcttcccgaagccccctgagattgcaaatggctatgtggagcacttgtttcgctaccagtgtaagaactactacagactgcgcacagaaggagatggagtatacaccttaaatgataagaagcagtggataaataaggctgttggagataaacttcctgaatgtgaagcagtatgtgggaagcccaagaatccggcaaacccagtgcagcggatcctgggtggacacctggatgccaaaggcagctttccctggcaggctaagatggtttcccaccataatctcaccacaggggccacgctgatcaatgaacaatggctgctgaccacggctaaaaatctcttcctgaaccattcagaaaatgcaacagcgaaagacattgcccctactttaacactctatgtggggaaaaagcagcttgtagagattgagaaggtggttctacaccctaactaccaccaggtagatattgggctcatcaaactcaaacagaaggtgcttgttaatgagagagtgatgcccatctgcctaccttcaaagaattatgcagaagtagggcgtgtgggttacgtgtctggctggggacaaagtgacaactttaaacttactgaccatctgaagtatgtcatgctgcctgtggctgaccaatacgattgcataacgcattatgaaggcagcacatgccccaaatggaaggcaccgaagagccctgtaggggtgcagcccatactgaacgaacacaccttctgtgtcggcatgtctaagtaccaggaagacacctgctatggcgatgcgggcagtgcctttgccgttcacgacctggaggaggacacctggtacgcggctgggatcctaagctttgataagagctgtgctgtggctgagtatggtgtgtatgtgaaggtgacttccatccagcactgggttcagaagaccatagctgagaactaatgcaaggctggccggaagcccttgcctgaaagcaagatttcagcctggaagagggcaaagtggacgggagtggacaggagtggatgcgataagatgtggtttgaagctgatgggtgccagccctgcattgctgagtcaatcaataaagagctttcttttgacccaaaa

SEQ ID NO: 1687 - protein, 348 aa, Homo sapiens
MSDLGAVISLLLWGRQLFALYSGNDVTDISDDRFPKPPEIANGYVEHLFRYQCKNYYRLRTEGDGVYTLNDKKQWINKAVGDKLPECEAVCGKPKNPANPVQRILGGHLDAKGSFPWQAKMVSHHNLTTGATLINEQWLLTTAKNLFLNHSENATAKDIAPTLTLYVGKKQLVEIEKVVLHPNYHQVDIGLIKLKQKVLVNERVMPICLPSKNYAEVGRVGYVSGWGQSDNFKLTDHLKYVMLPVADQYDCITHYEGSTCPKWKAPKSPVGVQPILNEHTFCVGMSKYQEDTCYGDAGSAFAVHDLEEDTWYAAGILSFDKSCAVAEYGVYVKVTSIQHWVQKTIAEN

SEQ ID NO: 1688 - DNA, 2540 bp, Homo sapiens
attgggctgttgagcgggggccgaccgacggccaggagtttcttttctgcgcttgtgcgttttctgttcggtttccttcccgctagcggggccacgagggttgctaggcaacagcccctgggtgacttggtcttagggtcctgtccggcttggggctgatgaaaggagctgtccgcgcccgggctcttccgagaagtggttgctgacagccacaaagtgaaagggagtgaggcggcgtggacgagtaaggagtgacagtgaggattcacatttgggttatttcaagatgagcttcctactgcccaagctgactagcaaaaaggaagtagaccaggcgataaaaagtactgctgagaaggtgttggttctcaggtttgggagagatgaagatcctgtctgtctgcagctagatgatattctttctaagacctcttctgacttaagtaaaatggctgctatatacctggtggatgtggaccaaactgcagtttatacacagtattttgacatcagttatattccatctactgtctttttcttcaatgggcagcatatgaaagtggattatggatctccagatcacactaagtttgtgggaagcttcaaaaccaaacaagacttcatagatttgattgaagtaatctatcgaggagcaatgagggggaagcttattgtccaaagtcctattgatcccaagaatattcccaaatatgaccttctctatcaagacatttagtacattaattgctgtcaaagatgaagaagaaggcacatcttgacacagtacctgaatccagctgtgctgtgtttctggagtcctttggaaacatgtgtcccagaggagaagaggtttgacttgcgtgtagaaaacccggcccctgaggaaaagaccccactggttctctgatgacctgggatgcctaactgtctactccctgcaagcctcagagcagccaagtcattggtgttcattttccccacagtgatttttgtaacttctctttctaatgtttttctttatccctttaatacagaaccctcccaaacattggctagtacaacttgatttcatcatgttcatttgatacacaagtgaactggaaagtcacttcccatagaagcaaaagtacttattttctaccctagctgggtgcatgtgtgtgcacacacacacacacacacacccccacacccctttgccggttcctcgactcatacatccctcgtgctttcccatctccagtctgtattactgtaggttctcttcaaataattaattgagcagacaagtttgttttattttggagcctttttggctctggcttttaaacattgtcctggttggctcatttaattttttttttttttttgagaccgagtcactcttgtcacccaggctggagtgcagtggcgcgatctcggctcactgcaagctccacctcctgggttcatgccattctcctgcttcagcctcctgagtagctgggactacaggcgcccgccaccatgcccagctaattttttgtatttttatagaggcgcagtttcaccgtgttagccaagatggtctcgatctcctgacctcgtgatctgccctcctcagcctcccaggtgctgggattataggcgtgagccaccgcgcgcaccccatttaattattttttatgttataaaatttaatatggaaagtgagaatttgaaccttcaccatccaccactctattcaggtaaaacaatgaatgagccaccttagcaggagcagatttttcccagaagctgctgcctcttcctgaggcagaaaattggattactaaggctcaaaactaaaagagatgtcagcattgttggatagaaatgtcacctatatgggatttgcctgttttaataactttgtaaggaattcttgctcttctaggggtgcctggcgcaaccgtgggcaagttactgctcctctttaaacctcgtggtggttattgaaacagatttattagaaggagagggtaggtgcagagctggagagccatgggtgaggcagcttgtgacctgcctagcagccgctgaccacctctccaacagaagcctagtcctgttcagagcagcactgtcactgcaagtccagccccctttgccaggggctccattccacccctttcctgcagggaggggtgccatgagtcttgcttttggctcatacaggagagagggaaggctgccaggcactgcttgtatccctgctgataagaggagggagtcactccaggaataagacaaaaggagaggaggaggccatcacctctggcctcttccatcgtacacttcctgtctctggtttaatcatgatgcatggagctacaacagccatcttaggtccccgaggtgcccagcatcacgtaaaacatcgatatgctaagaagaacaaaaagagcccaatctctgatgttattgagctcctgcatgaactctggacctgcctgcctcagacttctgtgaaagaataaaatttctttttgcctaaaaaaaaaaaaaaaaaaaaaaaaaaa

SEQ ID NO: 1689 - protein, 149 aa, Homo sapiens
MSFLLPKLTSKKEVDQAIKSTAEKVLVLRFGRDEDPVCLQLDDILSKTSSDLSKMAAIYLVDVDQTAVYTQYFDISYIPSTVFFFNGQHMKVDYGSPDHTKFVGSFKTKQDFIDLIEVIYRGAMRGKLIVQSPIDPKNIPKYDLLYQDI

SEQ ID NO: 1690 - DNA, 4470 bp, Homo sapiens
cttttcctgcccccagactagaggcgggatgtagtctcttaggctaagagtgattggtcacaaggagactcggaagtgtctgatcagagccccagaggaggccttgagagcctgttggcgtaccgttccacacttggatccaggaatcgggcgtgttccaggctgctctctatggtagctttgggcggatagagggggcgcgcaaagtattaagggacaataatggccgctttcaaggtgtggattttggctccttgagcctgtctgagcgaggggtggcagcgccggcgccccagaatccgggacagaagggtcccaagagtcgcgcttggtgagagaaatcccagatcctgtgatgggggacaccagtgaggatgcctcgatccatcgattggaaggcactgatctggactgtcaggttggtggtcttatttgcaagtccaaaagtgcggccagcgagcagcatgtcttcaaggctcctgctccccgcccttcattactcggactggacttgctggcttccctgaaacggagagagcgagaggagaaggacgatggggaggacaagaagaagtccaaagtctcctcctacaaggactgggaagagagcaaggatgaccagaaggatgctgaggaagagggcggtgaccaggctggccaaaatatccggaaagacagacattatcggtctgctcgggtagagactccatcccatccgggtggtgtgagcgaagagttttgggaacgcagtcggcagagagagcgggagcggcgggaacatggtgtctatgcctcgtccaaagaagaaaaggattggaagaaggagaaatcgcgggatcgagactatgaccgcaagagggacagagatgagcgggatagaagtaggcacagcagcagatcagagcgagatggagggtcagagcgtagcagcagaagaaatgaacccgagagcccacgacatcgacctaaagatgcagccaccccttcaaggtctacctgggaggaagaggacagtggctatggctcctcaaggcgctcacagtgggaatcgccctccccgacgccttcctatcgggattctgagcggagccatcggctgtccactcgagatcgagacaggtctgtgaggggcaagtactcggatgacacgcctctgccaactccctcctacaaatataacgagtgggccgatgacagaagacacttggggtccaccccgcgtctgtccaggggccgaggaagacgtgaggagggcgaagaaggaatttcatttgacacggaggaggagcggcagcagtgggaagatgaccagaggcaagccgatcgggattggtacatgatggacgagggctatgacgagttccacaacccgctggcctactcctccgaggactacgtgaggaggcgggagcagcacctgcataaacagaagcagaagcgcatttcagctcagcggagacagatcaatgaggataacgagcgctgggagacaaaccgcatgctcaccagtggggtggtccatcggctggaggtggatgaggactttgaagaggacaacgcggccaaggtgcatctgatggtgcacaatctggtgcctccctttctggatgggcgcattgtcttcaccaagcagccggagccggtgattccagtgaaggatgctacttctgacctggccatcattgctcggaaaggcagccagacagtgcggaagcacagggagcagaaggagcgcaagaaggctcagcacaaacactgggaactggcggggaccaaactgggagatataatgggcgtcaagaaggaggaagagccagataaagctgtgacggaggatgggaaggtggactacaggacagagcagaagtttgcagatcacatgaagagaaagagcgaagccagcagtgaatttgcaaagaagaagtccatcctggagcagaggcagtacctgcccatctttgcagtgcagcaggagctgctcactattatcagagacaacagcatcgtgatcgtggttggggagacggggagtggtaagaccactcagctgacgcagtacctgcatgaagatggttacacggactatgggatgattgggtgtacccagccccggcgtgtagctgccatgtcagtggccaagagagtcagtgaagagatggggggaaaccttggcgaggaggtgggctatgccatccgctttgaagactgcacttcagagaacaccttgatcaaatacatgactgacgggatcctgctccgagagtccctccgggaagccgacctggatcactacagtgccatcatcatggacgaggcccacgagcgctccctcaacactgacgtgctctttgggctgctccgggaggtagtggctcggcgctcagacctgaagctcatcgtcacatcagccacgatggatgcggagaagtttgctgccttttttgggaatgtccccatcttccacatccctggccgtaccttccctgttgacatcctcttcagcaagaccccacaggaggattacgtggaggctgcagtgaagcagtccttgcaggtgcacctgtcgggggcccctggagacatccttatcttcatgcctggccaagaggacattgaggtgacctcagaccagattgtggagcatctggaggaactggagaacgcgcctgccctggctgtgctgcccatctactctcagctgccttctgacctccaggccaaaatcttccagaaggctccagatggcgttcggaagtgcatcgttgccaccaatattgccgagacgtctctcactgttgacggcatcatgtttgttatcgattctggttattgcaaattaaaggtcttcaaccccaggattggcatggatgctctgcagatctatcccattagccaggccaatgccaaccagcggtcagggcgagccggcaggacgggcccaggtcagtgtttcaggctctacacccagagcgcctacaagaatgagctcctgaccaccacagtgcccgagatccagaggactaacctggccaacgtggtgctgctgctcaagtccctcggggtgcaggacctgctgcagttccacttcatggacccgcccccggaggacaacatgctcaactctatgtatcagctctggatcctcggggccctggacaacacaggtggtctgacctctaccgggcggctgatggtggagttcccgctggaccctgccctgtccaagatgctcatcgtgtcctgtgacatgggctgcagctccgagatcctgctcatcgtttccatgctctcggtcccagccatcttctacaggcccaagggtcgagaggaggagagtgatcaaatccgggagaagttcgctgttcctgagagcgatcatttgacctacctgaatgtttacctgcagtggaagaacaataattactccaccatctggtgtaacgatcatttcatccatgctaaggccatgcggaaggtccgggaggtgcgagctcaactcaaggacatcatggtgcagcagcggatgagcctggcctcgtgtggcactgactgggacatcgtcaggaagtgcatctgtgctgcctatttccaccaagcagccaagctcaagggaatcggggagtacgtgaacatccgcacagggatgccctgccacttgcaccccaccagctccctttttggaatgggctacaccccagattacatagtgtatcacgagttggtcatgaccaccaaggagtatatgcagtgtgtgaccgctgtggacggggagtggctggcggagctgggccccatgttctatagcgtgaaacaggcgggcaagtcacggcaggagaaccgtcgtcgggccaaagaggaagcctctgccatggaggaggagatggcgctggccgaggagcagctgcgagcccggcggcaggagcaggagaagcgcagccccctgggcagtgtcaggtctacgaagatctacactccaggccggaaagagcaaggggagcccatgacccctcgccgcacgccagcccgctttggtctgtgagctgaggctgtccccagagaggatggcagcaggtattgggtcctcagccttctggcgggagccctgaggctgcggacaaagccctttcatctgaggactttcatctgtgcatatcacggccccccagggcagttcctgctggaccagactctctggcagaggaggtggagttcttccatgcaggagcacggcatggcgggagcggggctgcagagtatccgaggtgctgccggggcagcgggaggtggctggacccatcgcatctaaaactggcccaggacacttggtgtatgcgtgacttggctgtggctgtcttttttaatccttgtgtaaagcagcaaaaaagacctaaagggaattgtaatttggttataattcaggatttggaaataaatttattatttgtaaaacatgaaaaaaaaaaaaaaaaa

SEQ ID NO: 1691 - protein, 1227 aa, Homo sapiens
MGDTSEDASIHRLEGTDLDCQVGGLICKSKSAASEQHVFKAPAPRPSLLGLDLLASLKRREREEKDDGEDKKKSKVSSYKDWEESKDDQKDAEEEGGDQAGQNIRKDRHYRSARVETPSHPGGVSEEFWERSRQRERERREHGVYASSKEEKDWKKEKSRDRDYDRKRDRDERDRSRHSSRSERDGGSERSSRRNEPESPRHRPKDAATPSRSTWEEEDSGYGSSRRSQWESPSPTPSYRDSERSHRLSTRDRDRSVRGKYSDDTPLPTPSYKYNEWADDRRHLGSTPRLSRGRGRREEGEEGISFDTEEERQQWEDDQRQADRDWYMMDEGYDEFHNPLAYSSEDYVRRREQHLHKQKQKRISAQRRQINEDNERWETNRMLTSGVVHRLEVDEDFEEDNAAKVHLMVHNLVPPFLDGRIVFTKQPEPVIPVKDATSDLAIIARKGSQTVRKHREQKERKKAQHKHWELAGTKLGDIMGVKKEEEPDKAVTEDGKVDYRTEQKFADHMKRKSEASSEFAKKKSILEQRQYLPIFAVQQELLTIIRDNSIVIVVGETGSGKTTQLTQYLHEDGYTDYGMIGCTQPRRVAAMSVAKRVSEEMGGNLGEEVGYAIRFEDCTSENTLIKYMTDGILLRESLREADLDHYSAIIMDEAHERSLNTDVLFGLLREVVARRSDLKLIVTSATMDAEKFAAFFGNVPIFHIPGRTFPVDILFSKTPQEDYVEAAVKQSLQVHLSGAPGDILIFMPGQEDIEVTSDQIVEHLEELENAPALAVLPIYSQLPSDLQAKIFQKAPDGVRKCIVATNIAETSLTVDGIMFVIDSGYCKLKVFNPRIGMDALQIYPISQANANQRSGRAGRTGPGQCFRLYTQSAYKNELLTTTVPEIQRTNLANVVLLLKSLGVQDLLQFHFMDPPPEDNMLNSMYQLWILGALDNTGGLTSTGRLMVEFPLDPALSKMLIVSCDMGCSSEILLIVSMLSVPAIFYRPKGREEESDQIREKFAVPESDHLTYLNVYLQWKNNNYSTIWCNDHFIHAKAMRKVREVRAQLKDIMVQQRMSLASCGTDWDIVRKCICAAYFHQAAKLKGIGEYVNIRTGMPCHLHPTSSLFGMGYTPDYIVYHELVMTTKEYMQCVTAVDGEWLAELGPMFYSVKQAGKSRQENRRRAKEEASAMEEEMALAEEQLRARRQEQEKRSPLGSVRSTKIYTPGRKEQGEPMTPRRTPARFGL

SEQ ID NO: 1692 - DNA, 3405 bp, Homo sapiens
gggataggggatgtggtttgttacaaaggatgagtattttgatagcttctcattccttgaactattctgcaggtttataacaaagctcagaaaatactaaaggttaaaggagaattgagagctgccaaggaaatgaaagatgaggcgggggagagagacagagaagtgagcagcctgaacagcaagctgttaagcctgcaacttgacatcaagaatctgcacgatgtctgcaagagacagaggaagaccttgcaggacaatcagctctgcatggaggaggcaatgaacagcagccacgacaagaagcaagcacaggcattagcattcgaggagtcagaggtggaatttgggtccagtaaacagtgtcatctgagacaactccagcaactgaagaaaaaattgctggtccttcaacaagaactggagtttcacacagaggagttgcagacttcttactattctctccgccagtatcagtccatcctagagaagcagacttccgacctggttcttctgcaccatcactgcaaactgaaagaagatgaggtgattctctatgaggaggaaatgggaaatcacaacgagaacacaggggagaagctccatttggcgcaggagcaactcgccttggccggggacaagatcgcctctctagagaggagcttaaacctctacagggataaataccagtcttccctgagcaacatcgagttactagaatgccaagtgaagatgttgcagggggaactcggcgggatcatgggtcaggagcctgagaacaagggtgatcattcaaaggtacggatatacacttctccttgcatgattcaagagcatcaggagactcagaaacgactgtctgaagtctggcaaaaggtctctcaacaggatgatctcattcaagaacttcgaaataagctggcctgcagtaacgctttggttctggagcgtgaaaaggctttgataaaactacaagccgattttgcttcctgtacagccacccacagataccctcctagctcctcagaagagtgtgaagacatcaaaaagatactgaagcacttgcaggagcagaaagacagccagtgcctgcatgtggaggagtaccagaacctggtgaaggatctgcgcgtggaactagaggccgtgtcggaacagaagagaaacatcatgaaggacatgatgaagctggagctggacctgcacggactgcgggaggagacatctgcccacattgagaggaaggataaggacatcaccatcctgcagtgccggctgcaggagctgcagctggagttcaccgagacccaaaagctcactttgaagaaagacaagttcctccaagagaaagatgagatgctgcaagagctggagaagaaactgacacaggttcagaacagcctcctgaaaaaggagaaggagctggagaagcagcagtgcatggccacagaacttgaaatgacagtcaaggaggctaagcaggacaagtccaaggaggcggagtgcaaggccctgcaggctgaggtccagaagctgaagaacagtctcgaagaggccaagcagcaggagaggctggctgctcagcaagcagcccagtgcaaagaagaggctgcactggcaggctgtcacctggaggacacccagaggaaactgcagaagggtctcctcctggacaagcagaaggcagacaccatccaggaactacagagagaacttcagatgctgcagaaggagtcctcgatggctgagaaggaacaaacctccaacagaaaacgggtggaggagctgtcattagaactctctgaagccctgaggaagcttgaaaattcagacaaggaaaagaggcagcttcagaagacagtggctgagcaggatatgaaaatgaatgacatgcttgatcgtatcaagcaccagcacagggagcaaggctccatcaaatgcaagttagaagaagatcttcaggaggccacaaagcttctggaggacaaacgggagcagttgaagaagagcaaagagcatgagaagctgatggagggagaacttgaagctttgcggcaggaatttaaaaagaaagacaagacgttgaaagagaattccagaaagttggaggaagaaaatgagaatctccgagcagagctacagtgttgttctacacaactggaatcctctctcaacaaatacaacaccagccagcaagtcatccaagacttgaataaagagatagcccttcagaaggagtccttaatgagcctgcaggcccagctggacaaagctctgcagaaggagaagcactatctccagactaccatcaccaaagaagcctatgatgcattatcccggaagtcagccgcctgccaggatgacctgacacaagccctcgagaagctcaatcacgtgacctcagagacaaagagcctgcagcaaagcttgacacagacccaagagaagaaagctcagctggaagaggaaatcattgcttatgaggaaaggatgaaaaagctcaatacggaattaagaaaactgcggggcttccaccaggagagtgagctggaggtgcacgcctttgacaagaagctagaggagatgagctgccaggtgctgcagtggcagaagcaacaccagaatgacctcaagatgctggcagccaaagaggagcagctcagggagttccaggaggagatggccgccttaaaagagaacctccttgaggacgataaggagccctgctgcctgccccagtggtctgtgcccaaagacacctgtaggctctaccgagggaatgatcagattatgaccaacttggagcaatgggcaaaacagcagaaggtcgccaatgagaaactaggaaaccagctccgagagcaggtgaactacattgccaagctgagtggcgaaaaggaccacctccacagtgtaatggtccacttgcagcaggaaaacaagaagctgaagaaggagatagaagagaagaagatgaaagccgagaacacaaggctatgcaccaaagccctaggcccgagcagaacggagtccacacagagggagaaagtgtgcggcaccttgggctggaaggggttgccccaggatatgggtcaaagaatggacctcaccaagtacatcgggatgccccactgcccgggttcctcatactgctagaatccacatctagccctgagcagcatttccacgggtgtttcttcagaggacagtgagttcccagccctccctctctcttgacctggatcagctcttacaggagtatatcacggtcccagcctattttgcaagacactaacttttgttgagttttgtccacttcctgccatggagtgagctttagaaccatactaccatctccaggcccaaactctgaaataaagacatgagcatgagcaaaaaaaaaaa

SEQ ID NO: 1693 - protein, 1007 aa, Homo sapiens
MKDEAGERDREVSSLNSKLLSLQLDIKNLHDVCKRQRKTLQDNQLCMEEAMNSSHDKKQAQALAFEESEVEFGSSKQCHLRQLQQLKKKLLVLQQELEFHTEELQTSYYSLRQYQSILEKQTSDLVLLHHHCKLKEDEVILYEEEMGNHNENTGEKLHLAQEQLALAGDKIASLERSLNLYRDKYQSSLSNIELLECQVKMLQGELGGIMGQEPENKGDHSKVRIYTSPCMIQEHQETQKRLSEVWQKVSQQDDLIQELRNKLACSNALVLEREKALIKLQADFASCTATHRYPPSSSEECEDIKKILKHLQEQKDSQCLHVEEYQNLVKDLRVELEAVSEQKRNIMKDMMKLELDLHGLREETSAHIERKDKDITILQCRLQELQLEFTETQKLTLKKDKFLQEKDEMLQELEKKLTQVQNSLLKKEKELEKQQCMATELEMTVKEAKQDKSKEAECKALQAEVQKLKNSLEEAKQQERLAAQQAAQCKEEAALAGCHLEDTQRKLQKGLLLDKQKADTIQELQRELQMLQKESSMAEKEQTSNRKRVEELSLELSEALRKLENSDKEKRQLQKTVAEQDMKMNDMLDRIKHQHREQGSIKCKLEEDLQEATKLLEDKREQLKKSKEHEKLMEGELEALRQEFKKKDKTLKENSRKLEEENENLRAELQCCSTQLESSLNKYNTSQQVIQDLNKEIALQKESLMSLQAQLDKALQKEKHYLQTTITKEAYDALSRKSAACQDDLTQALEKLNHVTSETKSLQQSLTQTQEKKAQLEEEIIAYEERMKKLNTELRKLRGFHQESELEVHAFDKKLEEMSCQVLQWQKQHQNDLKMLAAKEEQLREFQEEMAALKENLLEDDKEPCCLPQWSVPKDTCRLYRGNDQIMTNLEQWAKQQKVANEKLGNQLREQVNYIAKLSGEKDHLHSVMVHLQQENKKLKKEIEEKKMKAENTRLCTKALGPSRTESTQREKVCGTLGWKGLPQDMGQRMDLTKYIGMPHCPGSSYC

SEQ ID NO: 1694 - DNA, 3678 bp, Homo sapiens
cggggctgattctctggctgtgtggggcgcacggtcccgggatactggggacggcggggtgggagggcgccgtcctggggccgcggcggccgggcgggggagatggcggcgcgatggagcagcgaaaacgtggttgtagagttccgtgactcccaggcaactgcgatgtctgtggactgtcttgggcagcatgcagtgctttctggccgcagattcttatacatcgtcaatctagatgcccctttcgaaggtcaccgaaagatctctcgccagagcaaatgggacattggagctgtgcagtggaatcctcatgacagctttgcacactattttgcggcttcgagtaaccaacgagtagacctttacaagtggaaagacggcagtggggaagttggcacaaccttacaaggccacactcgtgtcatcagcgacttggactgggcggtgtttgagcctgacctcctggttaccagctctgtggacacctacatctacatttgggatatcaaagacacaaggaaacctactgttgcactgtctgctgttgcgggtgcctcccaggtcaaatggaataaaaaaaatgctaactgccttgccaccagccatgacggcgatgtgcggatatgggataagaggaaacccagtacagcagtggaatatctagccgcccacctctccaaaatccatggcctggactggcacccagacagcgagcacattcttgctacctccagtcaagacaattctgtgaagttctgggattaccgccagcctcggaaatacctcaatattcttccttgccaggtgcctgtctggaaggccagatacacacctttcagcaatggattggtgactgtgatggttccccagctgcggagggaaaacagccttctcctgtggaatgtctttgacttgaacaccccagtccacaccttcgtggggcatgatgatgtggtcctggagttccagtggaggaagcagaaggaagggtccaaggactatcaactggtgacgtggtcccgggatcagaccttgagaatgtggcgggtggattcccagatgcagaggctttgtgcaaatgacatattagatggtgttgatgagttcattgagagtatttcccttctgccggaacctgagaagaccctgcacactgaagatacagatcaccagcacactgcaagccatggggaggaagaagccctaaaagaagatccccctagaaatctcctggaagagaggaaatcagatcaactggggctgcctcagaccttgcagcaggaattctccctgatcaatgtgcaaatccggaatgtcaatgtggagatggatgcggcagacaggagctgcacagtgtctgtgcactgcagcaaccatcgtgtcaagatgctggtgaagttccctgcacagtacccaaacaacgccgccccttccttccagtttattaaccccacaaccatcacatccaccatgaaagctaagctgctgaagatcctgaaggacacagccctgcagaaagtgaagcgtggccagagctgcctggagccctgcctgcgccagctcgtctcctgccttgagtcctttgtgaaccaggaagacagcgcttccagcaacccgtttgcactccccaactctgtcactccccccttaccgacgtttgcgcgggtgaccacggcttacgggtcgtaccaggacgccaacattccctttcctaggacttctggggccaggttctgcggagcaggttacctggtatatttcacaaggcccatgacaatgcatcgggcggtgtctcccacagagcctactccgagatctctctcagccttgtctgcttatcacactggcttgatcgcgcccatgaagatccgcacagaggcccctgggaaccttcgtttatacagtgggagccccactcgcagcgagaaagagcaggtctccatcagctccttctactacaaggagcggaaatcaagacgatggaaaagtaagcgtgagggatcagactctggcaatcgacagatcaaggctgctgggaaagtcatcatccaggatattgcttgcctcctgcctgttcacaaatcgctgggagagctgtacatattgaatgtgaatgatattcaggaaacatgtcagaagaatgccgcctctgccttgctcgttggaagaaaggatcttgtccaggtttggtcgctggctacggtagctacagatctttgccttggtccgaaatctgacccagatttggaaacaccctgggctcgacatccatttgggcggcagctgctggagtccctgttggctcactattgccggctccgggatgttcagacactggcgatgctctgtagcgtgtttgaagcccagtctcggcctcaggggctaccaaacccctttgggccttttcctaaccgttcttctaatcttgtggtgtcccatagtcgatatcctagctttacctcttctggttcctgctccagtatgtcagacccagggctcaacactggcggctggaacatagcgggaagagaggcagagcacttgtcctccccttggggagaatcctcaccagaagagctccgctttgggagtctgacctacagtgatccccgtgagcgagaacgcgaccagcatgataaaaataaaaggctcctggaccccgccaatacccagcaatttgatgactttaagaaatgctatggggaaatcctctaccgttggggtctgagagagaagcgagctgaagtgttgaagtttgtctcctgtcctcctgaccctcacaaagggatcgagttcggcgtgtactgcagccactgccggagtgaggtccgtggcacgcagtgtgccatctgcaaaggcttcacgttccagtgtgccatctgtcacgtggctgtgcggggatcgtccaatttctgcctgacctgtgggcacggtggccacaccagccacatgatggagtggtttcggacccaggaggtgtgtcccaccgggtgtgggtgccactgcctgcttgaaagcactttctgaacctacagaagttgggtattgtctgaaatcccagaggacccataagtgccggtgacaagctgtctgtcaggggagaggctccagaacctgggttcgtccccagtgagaccggaggatgatcccccaaggactgcgcagcatcagctcttggtgggcctctgccttctcttctgtttggccacctggtgtggatgtcactgtgtgaagataaggacagaagtgcagagctgcgctttgtgtgttgtctatgtcggctgagctaccaaggtggaagttttcatggagaaaagcacctggctccagggccagtgttacagtgttaccctgtaaggtgttagccttaaaccaccgagcagcgttctcttgatgccagtgcagagaccagagtcagatgcccgaggacagtgggtaggaatttcatcaacaaatggacctatggcatcatggctttagaagctggtacatttactgagctgatggacagtggccttctaaaatatgacacttaaattgtaaatatgcactgtacttaaggattcttaagatgtatttttttgttatttctcctccagctgctatcccttggctaataaaattctagtaatttgaaaaaaaaaaaaaagagagaaagttaaaaaaaaaaaaaaaaaa

SEQ ID NO: 1695 - protein, 974 aa, Homo sapiens
MAARWSSENVVVEFRDSQATAMSVDCLGQHAVLSGRRFLYIVNLDAPFEGHRKISRQSKWDIGAVQWNPHDSFAHYFAASSNQRVDLYKWKDGSGEVGTTLQGHTRVISDLDWAVFEPDLLVTSSVDTYIYIWDIKDTRKPTVALSAVAGASQVKWNKKNANCLATSHDGDVRIWDKRKPSTAVEYLAAHLSKIHGLDWHPDSEHILATSSQDNSVKFWDYRQPRKYLNILPCQVPVWKARYTPFSNGLVTVMVPQLRRENSLLLWNVFDLNTPVHTFVGHDDVVLEFQWRKQKEGSKDYQLVTWSRDQTLRMWRVDSQMQRLCANDILDGVDEFIESISLLPEPEKTLHTEDTDHQHTASHGEEEALKEDPPRNLLEERKSDQLGLPQTLQQEFSLINVQIRNVNVEMDAADRSCTVSVHCSNHRVKMLVKFPAQYPNNAAPSFQFINPTTITSTMKAKLLKILKDTALQKVKRGQSCLEPCLRQLVSCLESFVNQEDSASSNPFALPNSVTPPLPTFARVTTAYGSYQDANIPFPRTSGARFCGAGYLVYFTRPMTMHRAVSPTEPTPRSLSALSAYHTGLIAPMKIRTEAPGNLRLYSGSPTRSEKEQVSISSFYYKERKSRRWKSKREGSDSGNRQIKAAGKVIIQDIACLLPVHKSLGELYILNVNDIQETCQKNAASALLVGRKDLVQVWSLATVATDLCLGPKSDPDLETPWARHPFGRQLLESLLAHYCRLRDVQTLAMLCSVFEAQSRPQGLPNPFGPFPNRSSNLVVSHSRYPSFTSSGSCSSMSDPGLNTGGWNIAGREAEHLSSPWGESSPEELRFGSLTYSDPRERERDQHDKNKRLLDPANTQQFDDFKKCYGEILYRWGLREKRAEVLKFVSCPPDPHKGIEFGVYCSHCRSEVRGTQCAICKGFTFQCAICHVAVRGSSNFCLTCGHGGHTSHMMEWFRTQEVCPTGCGCHCLLESTF

SEQ ID NO: 1696 - DNA, 4128 bp, Homo sapiens
ggcttcttggatgggctgggcgtgcatggcataaccgtttgagaacaacaaaccaagccggccgggctgccgctctgtttcctgcgaggagggaagttacagatctccgccctggcgtccggggaaggatgggacaggctgctgagccaactgggtacatggaaaactcagtctcctacagcgcaattgaagacgttcagctgctgtcctgggagaatgccccgaagtactgtttacagctcacgattcctgggggaactgtcttactgcaggctgccaatagctacctgcgagaccagtggttccattctctgcaatggaagaaaaagatttacaaatataagaaagtgctgagtaacccaagccgctgggaagttgtcttgaaagagatccggaccctggtggacatggccctgacatcccccctgcaggatgactccatcaaccaggccccactggaaatcgtctcgaaactgctctcagagaacacaaacttgaccacccaggagcatgaaaacatcattgtggcaatcgctcctttgctggaaaacaaccacccaccaccagatctctgtgaattcttttgcaagcactgcagagagcggccccggtccatggtggtcatcgaggtgttcacccccgtggtgcagcgaatcctcaagcataacatggactttgggaagtgcccgcgactgaggctgtttactcaggagtacatccttgccttgaacgagctcaacgcggggatggaagtggtgaagaagttcattcagagcatgcacggccccacagggcactgcccccacccccgggtcctgcccaacctggtggccgtgtgcctggctgccatctactcctgctatgaagagttcatcaacagccgcgacaattccccaagcctgaaggaaatccggaacggctgccagcagccgtgcgaccggaagcccactttacctctgcgccttctgcaccccagcccggacctggtgtctcaggaagccacgctgtctgaggcccggctcaagtcggtggtcgtggcctccagtgagatccacgtggaggtggaacgcaccagcactgccaagccggcgctgacggccagcgcaggcaacgacagcgagcccaacctcatcgactgcctcatggtcagccccgcctgcagcaccatgagcatcgagctgggcccccaggccgaccgcacgctcggctgctacgtggaaatcctcaagctgctgtcagactatgatgactggagaccgtctctggccagtttgcttcaacccattccattccccaaagaagctctcgcacatgagaagttcaccaaggaactgaagtacgtgattcagaggttcgccgaagaccccaggcaagaggtccactcatgcctgctgagcgtgcgggccggcaaagatggctggttccagctctacagccccggaggggtggcctgcgacgatgacggggagctgttcgccagcatggtgcacatcctcatgggctcctgttacaagaccaaaaaattcctgctctccctggcagaaaacaagctgggtccctgcatgctcctggcactgagggggaaccagaccatggtggagatcctgtgcttgatgctggaatacaacatcatcgacaacaacgacacccaactgcagatcatctcaaccctggagagcacagacgtggggaagcgcatgtacgagcagctgtgtgaccggcagcgggagctgaaggagctgcaaaggaaaggcgggcccaccaggctaacactgccctccaagtccacagacgctgacttggctcgtttgctgagctccggctccttcggaaacctggagaacctcagtttggccttcaccaatgtaaccagtgcctgcgccgagcacctcatcaaactgccttcgctcaagcagctgaacctgtggtccactcagtttggagacgctggccttcggctcctgtcggaacacctcaccatgctccaggtgctgaacctgtgcgagaccccggtcacagacgctggcctgctggccctgagctccatgaagagtctctgcagtttaaacatgaacagcaccaagctctcagctgacacctacgaagatctgaaggccaagcttcccaatttgaaggaagtggacgtccgctacaccgaagcctggtgaagctcccagctcaaggcaggaagacgtttgcaaccgcgacaaaataactcttgactaacagccgcagagcagccggtcctggggtcccaccctggtgccctggctgtgagatagatggggagtctttctgggggcggaggggggagggggtggggagggggcccacaagcacgcccagcccccgccgaattcttttagcttcgtaattggaacctttgacctgatctaaagtggactttgtagcaacaagaggagcatcagcgggtcggggaggggtttgggggtgggctggggggtgggggaccctttgtggattttctttgcctttgtgtttgatgccgtcgtgtgggaaaagtcaactccgatgccaccattgcgggccggacgaaggatgctttcttcctagaggctccgagctgagctgcgaactcgccccccgcccttgggacaagaagacccagtcacatcactgcacccgtcctgtgtcctcaccattgctatgcaaagtgattcttgttgtacataagatttaaataatgcacctatttaagacatgttgacaaattgcgggtctgggacccgcctcttatttatgaagtctttgaccgtcccccccgcccgaccccaccgccctcccgcccccacctggcgtgtagtactgtataaaccagtcagctgtcgggttagtggtagtattattgttatttttttaaaggaaacaaacagacaacaaaaagaagaaaaaaaaaaagaacctccttggaaaaattaattgctttttcgtaatggattctctatgctaatgctctctcgtctgtctgtctgtctgcccactcccccacccaccactgtgcgtttctgatttccaaatgtctccaactccctcacgaggtggggctcaggctggaggaggagggattaagatccccttgctccactaaggcccaagctctttctctcggcaccttttagacttgaatgggaggctgctaacccgccctctccagtccaccccggtaaaagagctgttccccacccccagggagctcctgtccctgtcagcctttgctgtcccctgtccccaacggagactctgtcacccctgggctccccctgccatcgtgtgcttcacgtggccccatgcatgcccgcctctctgcatggtctcttgggaaaagagagatgtgtcgcctccgccagtccgactgccctccccaccccacccccgccaccccccacatgtgaccactgcaacgaagacactccttctgtccccacctgctccgaagacaaaccaacctccgtttcttttataaacagtcggctttttcttaataagccctcactgtacagaacagcccgttgatggtttatttggggtccccctctccccccagcccttttttctgttggtttagcacaaatacttccctcctccggcacctccaaacctaccccacagtcagtgtacttgttttatatatatttaatcttattcaatggaaaccatgcttttgtcgttttatactttgctaggtagactttattacccccccactatgccctcatttttttaaaaaaggaaaaaaaaaagaaactgggttccagtcttaattcattttccgtgccaggttttatttcgtgtgtgtgtgagtgtgttctgttttgtgttttgttttttgttgttgttttcagttgtttggttttcttttctttcccccctccggtcccatacttcacagcactctggtgcgggaagaagcagaagcaaaaaaaataaaaataaaaaaataaataaaaataaaaaaaataaaaaaggaaaaaaaaaaagaagaaacaagacatgccacctttcccctcgcactgttgcttttcctgatggttaatactactgtcacgtagctgtgtacaaagagatgtgaaatactttcaggcaaaaataaactgtaagtgactcatc

SEQ ID NO: 1697 - protein, 679 aa, Homo sapiens
MGQAAEPTGYMENSVSYSAIEDVQLLSWENAPKYCLQLTIPGGTVLLQAANSYLRDQWFHSLQWKKKIYKYKKVLSNPSRWEVVLKEIRTLVDMALTSPLQDDSINQAPLEIVSKLLSENTNLTTQEHENIIVAIAPLLENNHPPPDLCEFFCKHCRERPRSMVVIEVFTPVVQRILKHNMDFGKCPRLRLFTQEYILALNELNAGMEVVKKFIQSMHGPTGHCPHPRVLPNLVAVCLAAIYSCYEEFINSRDNSPSLKEIRNGCQQPCDRKPTLPLRLLHPSPDLVSQEATLSEARLKSVVVASSEIHVEVERTSTAKPALTASAGNDSEPNLIDCLMVSPACSTMSIELGPQADRTLGCYVEILKLLSDYDDWRPSLASLLQPIPFPKEALAHEKFTKELKYVIQRFAEDPRQEVHSCLLSVRAGKDGWFQLYSPGGVACDDDGELFASMVHILMGSCYKTKKFLLSLAENKLGPCMLLALRGNQTMVEILCLMLEYNIIDNNDTQLQIISTLESTDVGKRMYEQLCDRQRELKELQRKGGPTRLTLPSKSTDADLARLLSSGSFGNLENLSLAFTNVTSACAEHLIKLPSLKQLNLWSTQFGDAGLRLLSEHLTMLQVLNLCETPVTDAGLLALSSMKSLCSLNMNSTKLSADTYEDLKAKLPNLKEVDVRYTEAW

SEQ ID NO: 1698 - DNA, 4235 bp, Homo sapiens
cgaggagaccaagccgctgctggggggcgacgtgtcggcccccgaaggcacgaagatgggcgccgtgccctgccgccgggctcttctgctttgcaacgggatgaggtacaaactgctgcaggagggcgacattcaggtctgtgtcatccggcacccgcggacctttctcagcaagatcctcacctcgaaattcctgaggcgctgggagccgcaccacctaacgctggccgacaacagcctggcgtccgccacgccaactgggtacatggaaaactcagtctcctacagcgcaattgaagacgttcagctgctgtcctgggagaatgccccgaagtactgtttacagctcacgattcctgggggaactgtcttactgcaggctgccaatagctacctgcgagaccagtggttccattctctgcaatggaagaaaaagatttacaaatataagaaagtgctgagtaacccaagccgctgggaagttgtcttgaaagagatccggaccctggtggacatggccctgacatcccccctgcaggatgactccatcaaccaggccccactggaaatcgtctcgaaactgctctcagagaacacaaacttgaccacccaggagcatgaaaacatcattgtggcaatcgctcctttgctggaaaacaaccacccaccaccagatctctgtgaattcttttgcaagcactgcagagagcggccccggtccatggtggtcatcgaggtgttcacccccgtggtgcagcgaatcctcaagcataacatggactttgggaagtgcccgcgactgaggctgtttactcaggagtacatccttgccttgaacgagctcaacgcggggatggaagtggtgaagaagttcattcagagcatgcacggccccacagggcactgcccccacccccgggtcctgcccaacctggtggccgtgtgcctggctgccatctactcctgctatgaagagttcatcaacagccgcgacaattccccaagcctgaaggaaatccggaacggctgccagcagccgtgcgaccggaagcccactttacctctgcgccttctgcaccccagcccggacctggtgtctcaggaagccacgctgtctgaggcccggctcaagtcggtggtcgtggcctccagtgagatccacgtggaggtggaacgcaccagcactgccaagccggcgctgacggccagcgcaggcaacgacagcgagcccaacctcatcgactgcctcatggtcagccccgcctgcagcaccatgagcatcgagctgggcccccaggccgaccgcacgctcggctgctacgtggaaatcctcaagctgctgtcagactatgatgactggagaccgtctctggccagtttgcttcaacccattccattccccaaagaagctctcgcacatgagaagttcaccaaggaactgaagtacgtgattcagaggttcgccgaagaccccaggcaagaggtccactcatgcctgctgagcgtgcgggccggcaaagatggctggttccagctctacagccccggaggggtggcctgcgacgatgacggggagctgttcgccagcatggtgcacatcctcatgggctcctgttacaagaccaaaaaattcctgctctccctggcagaaaacaagctgggtccctgcatgctcctggcactgagggggaaccagaccatggtggagatcctgtgcttgatgctggaatacaacatcatcgacaacaacgacacccaactgcagatcatctcaaccctggagagcacagacgtggggaagcgcatgtacgagcagctgtgtgaccggcagcgggagctgaaggagctgcaaaggaaaggcgggcccaccaggctaacactgccctccaagtccacagacgctgacttggctcgtttgctgagctccggctccttcggaaacctggagaacctcagtttggccttcaccaatgtaaccagtgcctgcgccgagcacctcatcaaactgccttcgctcaagcagctgaacctgtggtccactcagtttggagacgctggccttcggctcctgtcggaacacctcaccatgctccaggtgctgaacctgtgcgagaccccggtcacagacgctggcctgctggccctgagctccatgaagagtctctgcagtttaaacatgaacagcaccaagctctcagctgacacctacgaagatctgaaggccaagcttcccaatttgaaggaagtggacgtccgctacaccgaagcctggtgaagctcccagctcaaggcaggaagacgtttgcaaccgcgacaaaataactcttgactaacagccgcagagcagccggtcctggggtcccaccctggtgccctggctgtgagatagatggggagtctttctgggggcggaggggggagggggtggggagggggcccacaagcacgcccagcccccgccgaattcttttagcttcgtaattggaacctttgacctgatctaaagtggactttgtagcaacaagaggagcatcagcgggtcggggaggggtttgggggtgggctggggggtgggggaccctttgtggattttctttgcctttgtgtttgatgccgtcgtgtgggaaaagtcaactccgatgccaccattgcgggccggacgaaggatgctttcttcctagaggctccgagctgagctgcgaactcgccccccgcccttgggacaagaagacccagtcacatcactgcacccgtcctgtgtcctcaccattgctatgcaaagtgattcttgttgtacataagatttaaataatgcacctatttaagacatgttgacaaattgcgggtctgggacccgcctcttatttatgaagtctttgaccgtcccccccgcccgaccccaccgccctcccgcccccacctggcgtgtagtactgtataaaccagtcagctgtcgggttagtggtagtattattgttatttttttaaaggaaacaaacagacaacaaaaagaagaaaaaaaaaaagaacctccttggaaaaattaattgctttttcgtaatggattctctatgctaatgctctctcgtctgtctgtctgtctgcccactcccccacccaccactgtgcgtttctgatttccaaatgtctccaactccctcacgaggtggggctcaggctggaggaggagggattaagatccccttgctccactaaggcccaagctctttctctcggcaccttttagacttgaatgggaggctgctaacccgccctctccagtccaccccggtaaaagagctgttccccacccccagggagctcctgtccctgtcagcctttgctgtcccctgtccccaacggagactctgtcacccctgggctccccctgccatcgtgtgcttcacgtggccccatgcatgcccgcctctctgcatggtctcttgggaaaagagagatgtgtcgcctccgccagtccgactgccctccccaccccacccccgccaccccccacatgtgaccactgcaacgaagacactccttctgtccccacctgctccgaagacaaaccaacctccgtttcttttataaacagtcggctttttcttaataagccctcactgtacagaacagcccgttgatggtttatttggggtccccctctccccccagcccttttttctgttggtttagcacaaatacttccctcctccggcacctccaaacctaccccacagtcagtgtacttgttttatatatatttaatcttattcaatggaaaccatgcttttgtcgttttatactttgctaggtagactttattacccccccactatgccctcatttttttaaaaaaggaaaaaaaaaagaaactgggttccagtcttaattcattttccgtgccaggttttatttcgtgtgtgtgtgagtgtgttctgttttgtgttttgttttttgttgttgttttcagttgtttggttttcttttctttcccccctccggtcccatacttcacagcactctggtgcgggaagaagcagaagcaaaaaaaataaaaataaaaaaataaataaaaataaaaaaaataaaaaaggaaaaaaaaaaagaagaaacaagacatgccacctttcccctcgcactgttgcttttcctgatggttaatactactgtcacgtagctgtgtacaaagagatgtgaaatactttcaggcaaaaataaactgtaagtgactcatc

SEQ ID NO: 1699 - protein, 739 aa, Homo sapiens
MGAVPCRRALLLCNGMRYKLLQEGDIQVCVIRHPRTFLSKILTSKFLRRWEPHHLTLADNSLASATPTGYMENSVSYSAIEDVQLLSWENAPKYCLQLTIPGGTVLLQAANSYLRDQWFHSLQWKKKIYKYKKVLSNPSRWEVVLKEIRTLVDMALTSPLQDDSINQAPLEIVSKLLSENTNLTTQEHENIIVAIAPLLENNHPPPDLCEFFCKHCRERPRSMVVIEVFTPVVQRILKHNMDFGKCPRLRLFTQEYILALNELNAGMEVVKKFIQSMHGPTGHCPHPRVLPNLVAVCLAAIYSCYEEFINSRDNSPSLKEIRNGCQQPCDRKPTLPLRLLHPSPDLVSQEATLSEARLKSVVVASSEIHVEVERTSTAKPALTASAGNDSEPNLIDCLMVSPACSTMSIELGPQADRTLGCYVEILKLLSDYDDWRPSLASLLQPIPFPKEALAHEKFTKELKYVIQRFAEDPRQEVHSCLLSVRAGKDGWFQLYSPGGVACDDDGELFASMVHILMGSCYKTKKFLLSLAENKLGPCMLLALRGNQTMVEILCLMLEYNIIDNNDTQLQIISTLESTDVGKRMYEQLCDRQRELKELQRKGGPTRLTLPSKSTDADLARLLSSGSFGNLENLSLAFTNVTSACAEHLIKLPSLKQLNLWSTQFGDAGLRLLSEHLTMLQVLNLCETPVTDAGLLALSSMKSLCSLNMNSTKLSADTYEDLKAKLPNLKEVDVRYTEAW

SEQ ID NO: 1700 - DNA, 664 bp, Homo sapiens
atgagcagcaaagtctctcgcgacaccctgtacgaggcagtgtgggaagtcctacgtgggaaccagcacaagcaccgcaagttcctagagacagtggagtcacagatcagcttgaagaactatgacccccagaaggacaagcgcttctcaggcaccatcaggctgaagtccactccccggcccaagttctccgtgtgtgtcctggaggaccagcagcactgtgacgaggccaaggccatgggtatcccccacatggacatcacatggacatcgaggcgctgaaaaaactcaacgagaataaaaaactggtcaagaagctggccaagaagtatgatgcatttttggcctcggggtctctgatcaagcagatttcacgaatccttggcccaggcctaaataaggcgggaaacttcccttccctgctcacacacaacaaaaacacggtggccaaagtggatgaggcgaagtccacaatcaattccgaatgaagaaggtgttatatctggctgtggctgtgggtcacgtgaagatgacagatgatgagcttgtatatgacattcacctggctgtcaccttgttggtgtcattgcccaagaaaaactggcggaatgtccgggccttatgtatcaagagcaccatgaccaagccccagcgcctatattaa

SEQ ID NO: 1701 - DNA, 2678 bp, Homo sapiens
agcgcggcagcaagcgtgggaacgcgggcggcgagacggcggcaggacggcggcaggatgtgtgaccggaatggtggtcggcggcttcgacagtggctgatcgagcagattgacagtagcatgtatccaggactgatttgggagaatgaggagaagagcatgttccggatcccttggaaacacgctggcaagcaagattataatcaggaagtggatgcctccatttttaaggcctgggcagtttttaaagggaagtttaaagaaggggacaaagctgaaccagccacttggaagacgaggttacgctgtgctttgaataagagcccagattttgaggaagtgacggaccggtcccaactggacatttccgagccatacaaagtttaccgaattgttcctgaggaagagcaaaaatgcaaactaggcgtggcaactgctggctgcgtgaatgaagttacagagatggagtgcggtcgctctgaaatcgacgagctgatcaaggagccttctgtggacgattacatggggatgatcaaaaggagcccttccccgccggaggcctgtcggagtcagctccttccagactggtgggcgcagcagcccagcacaggcgtgccgctggtgacggggtacaccacctacgacgcgcaccattcagcattctcccagatggtgatcagcttctactatgggggcaagctggtgggccaggccaccaccacctgccccgagggctgccgcctgtccctgagccagcctgggctgcccggcaccaagctgtatgggcccgagggcctggagctggtgcgcttcccgccggccgacgccatccccagcgagcgacagaggcaggtgacgcggaagctgttcgggcacctggagcgcggggtgctgctgcacagcagccggcagggcgtgttcgtcaagcggctgtgccagggccgcgtgttctgcagcggcaacgccgtggtgtgcaaaggcaggcccaacaagctggagcgtgatgaggtggtccaggtcttcgacaccagccagttcttccgagagctgcagcagttctataacagccagggccggcttcctgacggcagggtggtgctgtgctttggggaagagtttccggatatggcccccttgcgctccaaactcattctcgtgcagattgagcagctgtatgtccggcaactggcagaagaggctgggaagagctgtggagccggctctgtgatgcaggcccccgaggagccgccgccagaccaggtcttccggatgtttccagatatttgtgcctcacaccagagatcatttttcagagaaaaccaacagatcaccgtctaagtgcgtcgcttgggcgccccaccccgtctgcgtcctgcatccatctccctgttacagtggcccgcatcatgattaaagaatgtggatccctctgtctggggtgggatgccttactttgcacttaatttaataagggcattctcggaggagtagacgtttaatacgaagtggcggcatagccctgccgagatgtcggtgatggcctggatgctgtaaccacaacctgtggctaaaaattttattttctatcctttacccgtcattatcattagttgctatgattctttctgcattttcggttaactatcatttccaaagacttgtcattcagtaatattagcagatagctgcttcgataaaggaatttggagtttaaaaatcaacttgtgaaaacaaggttgtttttgtctttatcgtttgttagagttatagatttatgatttcataggcttgattctatgtgaaatatctttttacttttatgcattttaataagatttaaaaatatttagattaaagccccctttaatgagtacaagaaaaactcttggcttgttagaagaaagtatattctttctagaatttggtgcaggaatatgtgttcatatccaggcaaacgggtgtgtttttatcttcagacaatgaaaccttctcctctggggctttgttgccaggaagattagaactaaatttatttttttcatttctgtcatgaaatcattccagatacctcttttcttctttccaaatggttttcacatgtgtttgaaatatttgtacttcgaattgtcggattttccatgtcctcctttctcctttgtgcccagcctgagtcagcaccaatcccgcattcagaacctcccagtgaaagggcagccttcattttgagaaggtggaaggtgttagggtttgggagacagctcatccaatctcccaagtctcatggtggatttgtgactgtgagagtttccggtttaaaatctgaaaagccagatatgcctgtttccttttcccagcaccatgcctgtggaggggacagtcagacccagaggtcctttacgtgtggatggagttcacaggcgaatagaggagaggaccaggggacgtggcttgtcccttttgtccaacaaagcattatatttttaagaatggcagacctgtttgctgaagtgttcataagataacaataggcttgaatctccaattcaaatgaatgtcaaagcacatatctttaatatgctgaatgaatatttatttttgtatccattaaaacagtatattgatctcttttattctttattaaaataaaatgctcttttttaaaaaaaaaaaaaaaaaaa

SEQ ID NO: 1702 - protein, 426 aa, Homo sapiens
MCDRNGGRRLRQWLIEQIDSSMYPGLIWENEEKSMFRIPWKHAGKQDYNQEVDASIFKAWAVFKGKFKEGDKAEPATWKTRLRCALNKSPDFEEVTDRSQLDISEPYKVYRIVPEEEQKCKLGVATAGCVNEVTEMECGRSEIDELIKEPSVDDYMGMIKRSPSPPEACRSQLLPDWWAQQPSTGVPLVTGYTTYDAHHSAFSQMVISFYYGGKLVGQATTTCPEGCRLSLSQPGLPGTKLYGPEGLELVRFPPADAIPSERQRQVTRKLFGHLERGVLLHSSRQGVFVKRLCQGRVFCSGNAVVCKGRPNKLERDEVVQVFDTSQFFRELQQFYNSQGRLPDGRVVLCFGEEFPDMAPLRSKLILVQIEQLYVRQLAEEAGKSCGAGSVMQAPEEPPPDQVFRMFPDICASHQRSFFRENQQITV

SEQ ID NO: 1703 - DNA, 3241 bp, Homo sapiens
gcggccgccgggagggcgcgcggcgccggagacatgtccaggcggaaacagagcaacccccggcagatcaagcgttccctcggagacatggaggccagagaggaggtgcagttggtgggtgccagccacatggagcaaaaggccacggcacctgaagccccgagccctcccagcgcagatgttaactcacccccaccgctgccgccccccacatccccaggaggccccaaggagctggaaggacaggaaccagaacccaggcccacggaggaagagccgggcagtccctggagcgggccagacgagctggagccggtggtgcaggatgggcagaggcgcatacgggcccgactcagcctcgccacgggcctgtcctggggcccgttccatgggagtgtccagaccagagcctcatcccccaggcaggcggagccgagcccagccctgaccctgctgctggtggacgaggcctgctggctgaggacgctgccccaggccctgactgaggccgaggccaacacagagatccacaggaaggatgacgcactctggtgcagggtcaccaagccggtgcctgcggggggactcctgagcgtgctcctcacggccgagccccacagcacccccggccaccctgtgaagaaggagccagcagagcccacgtgcccggcccctgcacacgacctccagctcctgccccagcaggccgggatggcctccatccttgccaccgcagtgatcaacaaagacgtcttcccctgcaaggactgtggcatctggtaccgcagcgagcgcaacctgcaggcgcacctgctctactactgcgccagccgccagggcaccggctccccggccgcagccgccacagacgagaagcccaaagagacctaccccaacgagcgcgtctgccccttcccccagtgccgcaagagctgccccagcgccagctccctggagatccacatgcgcagccacagcggagagcggcccttcgtgtgcctgatctgcctgtcggccttcaccaccaaggccaactgcgagcggcacctcaaggtgcacacggacacgctgagcggtgtctgccacagctgtggcttcatctccaccacaagggacatcctctacagccacttggtcaccaaccacatggtctgccagcctggctccaagggtgagatctactcgccaggggccggacacccagcaaccaagctgcccccagacagtctgggcagcttccagcagcagcacacggccctgcaaggccccctggcctccgcggacctgggcctggcgcccaccccatcgccaggactggacagaaaggccctggccgaggccaccaacggagaggccagagcggagcctctggcccagaatggaggcagcagcgagcccccggcggcccccaggagcatcaaggtggaggcggtggaggagccggaggcggcccccatcctgggccccggagagcctgggccccaggccccgtcgcggacgccgtcgccgcgcagccccgccccggccagggtcaaggccgagctgtccagccccacgccgggctccagcccggtgcccggcgagctgggcctggccggggccctgttccttccgcagtacgtgttcgggcccgacgcggcgccccccgcctcggagatcctggccaagatgtccgagctggtgcacagccggctgcagcagggcgcgggcgcgggcgccggcggcgcgcagaccgggctcttccccggggcccccaagggcgctacgtgcttcgagtgcgagatcaccttcagcaacgtcaacaactactacgtgcacaagcgcctctactgttcaggccgccgtgcgcccgaggacgcgcctgccgcgcgcaggcccaaggcgccccccggcccggcccgcgcgccccccggccagcccgccgaacccgacgcgccgcgctcgtccccgggccccggagcgcgcgaggagggggctgggggcgcggccacgcccgaggacggcgcgggcggccggggcagcgagggcagccagagcccgggtagctccgtggacgacgcggaggacgaccccagccgcacgctgtgcgaggcctgcaacatccgcttcagccgccacgagacctacaccgtgcacaagcggtactactgcgcctcgcgccacgacccgccgccgcgccgaccggccgcgcccccgggaccccctgggccggccgcgcccccggccccctctcccgccgcgcctgtgcgcacgcgcagacgccgcaagctctacgagctgcacgcggccggcgccccgccccccccgccgcccggccacgcccccgcgcccgagtcgccgcggcccggaagcggaagcggaagcggccccggcctcgcccctgcgcgctcgcccggccccgcggccgacggccccatcgacctgagcaagaagccgcggcgcccgctccccggagccccggcaccggcgctggccgactaccacgagtgcacggcctgccgcgtgagcttccacagcctcgaggcctacctggcgcacaagaagtactcgtgccccgctgcgccaccgcccggcgcgctcggcctgcccgccgccgcctgcccctactgccccccgaacggcccggtgcgcggggacctgctggagcatttccgcctggcgcacggcctgctgctcggcgcgcccctggccggcccgggggtcgaggcccggacgccggccgaccgcggcccctcgcccgctcccgcccccgccgcctccccgcagcccgggtcccgtggcccccgggacggcctcggcccggagccccaggagccgccgcccggcccgcccccgtccccggccgccgcgcccgaggccgtgccgcccccgccggcgcccccctcctactcggacaagggcgtccagactcccagcaagggcacgccggcgccgctgcccaacggcaaccaccggtactgccgtctttgcaacatcaagttcagcagcctgtccaccttcatcgcccacaagaagtattactgctcctcgcacgccgccgagcacgtgaagtgagcgcccacactacagccgcagacgctttgcacgccccgctgcgatgcggggagggggccgcccccaggccgcacggactgccgctcctgggaaccccgccacgcacaggcctcggcggagggggccgcagggggcagcgcccgcctggacccttggcacttaataaagaagttcagtttgatgagca

SEQ ID NO: 1704 - protein, 1006 aa, Homo sapiens
MSRRKQSNPRQIKRSLGDMEAREEVQLVGASHMEQKATAPEAPSPPSADVNSPPPLPPPTSPGGPKELEGQEPEPRPTEEEPGSPWSGPDELEPVVQDGQRRIRARLSLATGLSWGPFHGSVQTRASSPRQAEPSPALTLLLVDEACWLRTLPQALTEAEANTEIHRKDDALWCRVTKPVPAGGLLSVLLTAEPHSTPGHPVKKEPAEPTCPAPAHDLQLLPQQAGMASILATAVINKDVFPCKDCGIWYRSERNLQAHLLYYCASRQGTGSPAAAATDEKPKETYPNERVCPFPQCRKSCPSASSLEIHMRSHSGERPFVCLICLSAFTTKANCERHLKVHTDTLSGVCHSCGFISTTRDILYSHLVTNHMVCQPGSKGEIYSPGAGHPATKLPPDSLGSFQQQHTALQGPLASADLGLAPTPSPGLDRKALAEATNGEARAEPLAQNGGSSEPPAAPRSIKVEAVEEPEAAPILGPGEPGPQAPSRTPSPRSPAPARVKAELSSPTPGSSPVPGELGLAGALFLPQYVFGPDAAPPASEILAKMSELVHSRLQQGAGAGAGGAQTGLFPGAPKGATCFECEITFSNVNNYYVHKRLYCSGRRAPEDAPAARRPKAPPGPARAPPGQPAEPDAPRSSPGPGAREEGAGGAATPEDGAGGRGSEGSQSPGSSVDDAEDDPSRTLCEACNIRFSRHETYTVHKRYYCASRHDPPPRRPAAPPGPPGPAAPPAPSPAAPVRTRRRRKLYELHAAGAPPPPPPGHAPAPESPRPGSGSGSGPGLAPARSPGPAADGPIDLSKKPRRPLPGAPAPALADYHECTACRVSFHSLEAYLAHKKYSCPAAPPPGALGLPAAACPYCPPNGPVRGDLLEHFRLAHGLLLGAPLAGPGVEARTPADRGPSPAPAPAASPQPGSRGPRDGLGPEPQEPPPGPPPSPAAAPEAVPPPPAPPSYSDKGVQTPSKGTPAPLPNGNHRYCRLCNIKFSSLSTFIAHKKYYCSSHAAEHVK

SEQ ID NO: 1705 - DNA, 3186 bp, Homo sapiens
atccccggggatgatcgagttcatcaaagtggaaaacttaaggcggtcttcgtcgggctgatacttcctgctttattgaatgttgatattaaatgcttacctccggaattattttttgaggtatcgactttagattaaaagcctaacaattcttacctttcccgtgggctgcctggctccccgcgcggttcaacgcgagcagcgccagtgaggggacctgtcgcgtgtcctgctcagcgcggtgtcccacgggcgcgtccacagcccggggcgtccaggggctacagcggtgcgagctgctctagagacggagggcccggccggagaccaggggccggcggtttcatcctgcgctgacccttgccaacgacgtggctggtcctggggatcacagggcttcgctcatcccatcttcctccatatccccaaggtggaaacaagggggcgagatgtccacaaactgaggaacagacaaaatgctggctgtccatgcagtggagtgtgagtcagtcatcaagaagagtgaagttcagacccatgccacaacatgggtgaaccttggaaacatactaagtaaagcaagccaatcgcaaaaggacaaaacctgtgcgactccatgctatggaccgagttctgtccccctaacatttgtatgtgaagccttaatccccaatgtgactgtgtttgcagaaagggcctttagagaagtaattaaggttaaatgagattataagggtggggtcctgatctgataggattagtgtccttggaagaggtaccacaggcctggcactgtggctcacacctgtaatcctagcactttgggagtccaaggtgggaggaccacctcctccaggagtttgagaccagcctgggcaacagagcaagacccctgtctctacaaaaaaattaacagggcaccgtggtgcgtgcctgtagtcccagcaacttgttatggttacgtaagaggaatgtgaattcaaccctggtgattttgggtcgtgtcaggagcagccctgcgacaccagttggcaccttctgcagactctatgtgtcgataagacaaggtcccacccagcaagtgcccttttctcagctgatgaacataagcctgcatggacgttactgtccatggaaaggagcggccggcaccggctgtgacagacacgtgcctgtctgcgatctgagtttcatgaacagtaaactctgttggtcacagcctctttggaaaacaatgttagttaaaagaagtgccctgtgaccagcagtgccaccctcgacagggttctccaagtgggacccgggcaagcagcctcagtatcactaggggttgttagcaatgtgccttcctgggctctgccccagagtggccgcaccagtgactgggagtgaggtcccagggccctgtggtccatgaagagctctcaggggattctgatgcccagtggtacaggtgggccaccggactggggtgtcatctgcccgtgggcacgagacatgaacaaggacatagcaggtctgttagtagtcataactaaaagaacaaaggagccgggcgcggtggctcatgcctgtggtcccagggtgttgggattgcaggcgtgagccactgcgcccggtccacgtttctatcaaattgaaatcatgagcggttttgctgagggtgtggggcacccagagcctgcggcctgtgctcgagtgaaaatggtggccccgctccagaagcctgcgacggcgctcacggaaccgcagccttcgtgcggcggcacctgggccgtgctactcctctgtgacttcccggaagagatgagctgctacgtccagcaaaaggcacatccaagatcgttcaccccagcatgactcgttacactccggactagaaggaaccccaaggtgcttcagtgacagaacgatgaaccagctggggtgtaacccccatgcaatggaatatcgtacaggaacgaaaaggacacgctacccctacaagcaacatggatctcagaggcaggatgttgcgcagaagaaaccagacacaaatgcttcggctcgtgttgctgcgactcattacaggcagccgaatctgcggtgatgggggccccaggagcagtgaccaggaggcagtgccacggagcctgcggtgggggctgatagtcagtagcgtgacctggttgggatgttctgtttttaagctggagtccatcatgtttgtttatttgttcatttcgtagaggtgggggtcttgtagaggtgggggtctcgctctgttgcccgggctggtctcaaactctgggcctcgggcgatcctcccgccttggccttccagggtgctgggattgcaggtgtgagccactgcataaggccgttattgttattagtgcttaaaaatatttagtaaacattttatttagcctaaaaaccattcagagagcagaggctggacggaacaaggcgtgccaggcggtgagagcacagaccctcctcttccagagcaggaagtgggtaaatgacttttaagcctcatttctggggtggcaaaactcttctgtatgaagaagtacaaatatgtaatgtcccataatggcagctatgggacgttacgtatttgccaaaacccacataacgcacaacgccaagagtgaactgtaatgtaaactgtggacttaagtcaatgatcgtgtcccgatacgggctggttggttgtgatgcagggcaggtgaggcccaaagtggagcttagcctgccagcgttcttggctttgcccaagaaagaattcaaggacaagccggaggtagaagagaacaacttgattgaagaggcagtgtggcagacctcactgaagatccccctaccccaggctcaagtcagagagagaggaggtggcagtgccggaatttcagctgcgcatccgtcccagctctgcactgcgggcgtccgtcccagctctgcactgcgtgcgtcccgccctggctggagcttgcagacggcagccctgcaggaacccaccggggctgactccttcctccccagatcccacaaaacagcagtggatctccactcggcacgcattcccctctacattcacacgaagtgtcttttaatggaaagtgtataaactcgttaattttggttactgcactgaagttaggcaagcttctgcagctttattaaatgaccaatgctgtccct

SEQ ID NO: 1706 - protein, 147 aa, Homo sapiens
MIVSRYGLVGCDAGQVRPKVELSLPAFLALPKKEFKDKPEVEENNLIEEAVWQTSLKIPLPQAQVRERGGGSAGISAAHPSQLCTAGVRPSSALRASRPGWSLQTAALQEPTGADSFLPRSHKTAVDLHSARIPLYIHTKCLLMESV

SEQ ID NO: 1707 - DNA, 3572 bp, Homo sapiens
ggggagcccgtttgttccgcccgtgtcgagcctggagccagaacctgtgaagagcggaagggccaagggacgtcttctccacgccgctccgactccaggggagccgtggcctcctctccgccctagcgctgagaaccgtgggtaccgatggatgtggccgagagccctgaacgggatcctcactctccagaggatgaagagcagccacagggactctcggacgatgacattctgagggacagcgggtccgatcaggatttggacggggcgggggtgagggcttctgatctggaggatgaggaaagtgcagccagggggccgagccaggaggaggaagataatcactccgacgaggaggaccgggcaagtgagcctaaatcccaagaccaggactcagaggtgaatgagctgagccggggcccgaccagctccccctgcgaggaggagggggacgaaggggaggaagaccggacaagcgaccttagggatgaggcctcctcagtcaccagggagctggatgagcatgagctagactacgatgaggaggttcctgaggagccagctcccgccgtccaggaggacgaggctgagaaagcgggggctgaggatgatgaggagaagggcgaaggcactcccagggaggaggggaaggctggtgttcagagtgtgggagaaaaggaatccctggaggctgccaaggagaaaaagaaagaggacgatgatggagaaatcgatgatggggaaatagacgatgatgacctggaagaaggtgaagtgaaggaccccagtgacaggaaggtgaggcctcgtcccacctgccggttcttcatgaaagggaactgtacctggggaatgaattgtaggtttatacaccctggagtgaacgacaaggggaactactccctaatcaccaaagccgaccccttcccgcctaatggtgccccgcctctcggacctcacccgctgatgcccgccaacccttggggtgggccggtagttgatgaaattttgcctccaccccctccagagcccccaacagagagtgcctgggaacgaggactccggcatgcaaaggaggttttaaaaaaagcaactattcgaaaagaacaggagcctgattttgaagagaaaaggtttacggtgaccattggcgaagacgaacgggaatttgacaaagaaaatgaagtttttcgagattggaattctcggatcccgagagatgtcagagacacagtactcgagccttacgcagacccttattatgactatgaaattgagcggttttggcgtggcggacagtatgagaatttcagggtgcagtatacagaaacagagccgtatcataattaccgagaaagggagcgggagcgagagagagagaacagacagcgcgagcgcgagcgggagcgggagcgggaccgagagcgggagcgccggcagagggagcgcgagcgagagcgggagcacgagcgcgacaaggagcggcagcggaggaaggaggagtgggagcgtgagcgagccaagcgggacgagaaggaccggcagcaccgtgaccgcgaccgggagaaggagcgggagaaggagaaggggaagcccaagccccgctccccgcagccgccaagccgccaagctgagccaccaaagaaggaggctgccaccacggggccgcaggtgaagagagcagatgagtggaaggacccttggcgccgatccaagtctcccaagaagaaactcggggtgtcggtctccccgagccgggctcgaaggcgtcggaaaacatcagcctcgtcagcctctgcctctaattcctccaggtcgtcttcgcggtcatcgtcctactctggctccggctcctcccggtcgcgatcccggtcttcatcctacagctcctactccagccgctcttccagacacagctcgttctcaggaagccggtccaggtcccggtccttctcttcgtccccgtccccgtccccaacaccttccccacatagaccttccatcagaaccaagggagagccggccccgccgcccgggaaagcaggagagaagtcagtgaagaagccggccccgcctccagccccaccacaggccaccaaaaccactgctcctgtccccgagcccaccaagccaggagaccctcgggaagccaggaggaaggagcggccagccaggaccccccccaggaggcggacgctaagcggcagcggcagtggcagtggtagcagctatagtggttccagctcccgatccaggtccctgagcgtgagcagcgtctcctcagtgtccagtgctacgtcgagcagcagctctgcacacagcgtggactcggaggacatgtacgcagacctggctagccccgtgtcctcagccagctctcggtccccggccccagcccagaccaggaaggagaaaggaaaatctaagaaagaagacggtgttaaagaggaaaagcggaaaagggattcgtccacacaaccacccaaatctgcaaaacctccagcaggggggaagtcctcccagcagccctcgacaccccagcaggcaccccccgggcagccccagcagggcacatttgtggcccacaaggagatcaagttgacactgttgaataaggcggctgataaaggaagcaggaagcgctatgaaccatcagacaaggacaggcagagccctcctccagccaagcggcccaacacatccccagaccgaggttctcgggaccggaagtcaggtgggagactgggctccccgaagccagagcggcagagaggccagaactccaaagcccctgcagccccggctgacaggaagcgccagctgtcaccccagtccaagagctccagcaaggtcacgagcgtgcccggcaaagcctcggatcccggcgccgccagcaccaaatcagggaaggccagcacgctgtctcggcgggaggagctgctgaaacagctgaaggccgtggaggatgctattgcacgcaagcgggccaagatccccgggaaagcataggccgtgccccgaccggactggacgcatttttatacatagggtaagcgcagccattttggattttgcagttaatgtcttattttggctgtgattctttttaaaaagtaaaaaagaaaaaaaagtttctcagctggaaaagaagccacacaggaaatgacaacgacgctgaatcccagcctccctccccagagcagaagtcccgcaggacagacagacacagacagcgctagtgaccagcacggttctcatgtaaattacaagccccagccgccagccccgccttctcttcctcctcctccgtcttcttccctggccctggtcaggcctgtggagccccagctctgggtccctagcccgggtccaggcagccaggctccctcctgagctgagaaacggaacctcgcgaaccactggtggcacatccttctcctcccccgcccctgatcacccgcccccggatcagaaatatatctatattctcgactaaagtctcatcaggaaatatttcctgtcttttattttaagcatcaaattgttttagttgatttaaaaaaaaaaaaaaa

SEQ ID NO: 1708 - protein, 953 aa, Homo sapiens
MDVAESPERDPHSPEDEEQPQGLSDDDILRDSGSDQDLDGAGVRASDLEDEESAARGPSQEEEDNHSDEEDRASEPKSQDQDSEVNELSRGPTSSPCEEEGDEGEEDRTSDLRDEASSVTRELDEHELDYDEEVPEEPAPAVQEDEAEKAGAEDDEEKGEGTPREEGKAGVQSVGEKESLEAAKEKKKEDDDGEIDDGEIDDDDLEEGEVKDPSDRKVRPRPTCRFFMKGNCTWGMNCRFIHPGVNDKGNYSLITKADPFPPNGAPPLGPHPLMPANPWGGPVVDEILPPPPPEPPTESAWERGLRHAKEVLKKATIRKEQEPDFEEKRFTVTIGEDEREFDKENEVFRDWNSRIPRDVRDTVLEPYADPYYDYEIERFWRGGQYENFRVQYTETEPYHNYRERERERERENRQRERERERERDRERERRQREREREREHERDKERQRRKEEWERERAKRDEKDRQHRDRDREKEREKEKGKPKPRSPQPPSRQAEPPKKEAATTGPQVKRADEWKDPWRRSKSPKKKLGVSVSPSRARRRRKTSASSASASNSSRSSSRSSSYSGSGSSRSRSRSSSYSSYSSRSSRHSSFSGSRSRSRSFSSSPSPSPTPSPHRPSIRTKGEPAPPPGKAGEKSVKKPAPPPAPPQATKTTAPVPEPTKPGDPREARRKERPARTPPRRRTLSGSGSGSGSSYSGSSSRSRSLSVSSVSSVSSATSSSSSAHSVDSEDMYADLASPVSSASSRSPAPAQTRKEKGKSKKEDGVKEEKRKRDSSTQPPKSAKPPAGGKSSQQPSTPQQAPPGQPQQGTFVAHKEIKLTLLNKAADKGSRKRYEPSDKDRQSPPPAKRPNTSPDRGSRDRKSGGRLGSPKPERQRGQNSKAPAAPADRKRQLSPQSKSSSKVTSVPGKASDPGAASTKSGKASTLSRREELLKQLKAVEDAIARKRAKIPGKA

SEQ ID NO: 1709 - DNA, 1048 bp, Homo sapiens
gccaggtgtgcaggccgctccaagcccagcctgccccgctgccgccaccatgacgctcctccccggcctcctgtttctgacctggctgcacacatgcctggcccaccatgacccctccctcagggggcacccccacagtcacggtaccccacactgctactcggctgaggaactgcccctcggccaggcccccccacacctgctggctcgaggtgccaagtgggggcaggctttgcctgtagccctggtgtccagcctggaggcagcaagccacagggggaggcacgagaggccctcagctacgacccagtgcccggtgctgcggccggaggaggtgttggaggcagacacccaccagcgctccatctcaccctggagataccgtgtggacacggatgaggaccgctatccacagaagctggccttcgccgagtgcctgtgcagaggctgtatcgatgcacggacgggccgcgagacagctgcgctcaactccgtgcggctgctccagagcctgctggtgctgcgccgccggccctgctcccgcgacggctcggggctccccacacctggggcctttgccttccacaccgagttcatccacgtccccgtcggctgcacctgcgtgctgccccgttcagtgtgaccgccgaggccgtggggcccctagactggacacgtgtgctccccagagggcaccccctatttatgtgtatttattgttatttatatgcctcccccaacactacccttggggtctgggcattccccgtgtctggaggacagccccccactgttctcctcatctccagcctcagtagttgggggtagaaggagctcagcacctcttccagcccttaaagctgcagaaaaggtgtcacacggctgcctgtaccttggctccctgtcctgctcccggcttcccttaccctatcactggcctcaggcccccgcaggctgcctcttcccaacctccttggaagtacccctgtttcttaaacaattatttaagtgtacgtgtattattaaactgatgaacacatccccaaaa

SEQ ID NO: 1710 - protein, 197 aa, Homo sapiens
MTLLPGLLFLTWLHTCLAHHDPSLRGHPHSHGTPHCYSAEELPLGQAPPHLLARGAKWGQALPVALVSSLEAASHRGRHERPSATTQCPVLRPEEVLEADTHQRSISPWRYRVDTDEDRYPQKLAFAECLCRGCIDARTGRETAALNSVRLLQSLLVLRRRPCSRDGSGLPTPGAFAFHTEFIHVPVGCTCVLPRSV

SEQ ID NO: 1711 - DNA, 743 bp, Homo sapiens
cgcgcctagcagtgtcccagccgggttcgtgtcgccatggggcagatcgagtgggccatgtgggccaacgaacaggcgctggcgtccggcctgatcctcatcaccgggggcatcgtggccacagctgggcgcttcacccagtggtactttggtgcctactccattgtggcgggcgtgtttgtgtgcctgctggagtacccccgggggaagaggaagaagggctccaccatggagcgctggggacagaagtacatgaccgccgtggtgaagctgttcgggccctttaccaggaattactatgttcgggccgtcctgcatctcctgctctcggtgcccgccggcttcctgctggccaccatccttgggaccgcctgcctggccattgcgagcggcatctacctactggcggctgtgcgtggcgagcagtggacgcccatcgagcccaagccccgggagcggccgcagatcggaggcaccatcaagcagccgcccagcaaccccccgccgcggcccccggccgaggcccgcaagaagcccagcgaggaggaggctgcggtggcggcggggggacccccgggaggtccccaggtcaaccccatcccggtgaccgacgaggtcgtgtgacctcgccccggacctgccctcccgccaggtgcacccacctgcaataaatgcagcgaagccgggaaaaaaaaaaaaaaaaaaaaaaaaaaaaaaaaaaaaaaaaaaaaaaaaaaaaaaaa

SEQ ID NO: 1712 - protein, 195 aa, Homo sapiens
MGQIEWAMWANEQALASGLILITGGIVATAGRFTQWYFGAYSIVAGVFVCLLEYPRGKRKKGSTMERWGQKYMTAVVKLFGPFTRNYYVRAVLHLLLSVPAGFLLATILGTACLAIASGIYLLAAVRGEQWTPIEPKPRERPQIGGTIKQPPSNPPPRPPAEARKKPSEEEAAVAAGGPPGGPQVNPIPVTDEVV

SEQ ID NO: 1713 - DNA, 1812 bp, Homo sapiens
tgggaccatggcctcggagaagccgctggcggcagtcacttgtacagcgccggtcaacatcgcggtcatcaagtactggggcaagcgcgatgaagagctggttctgcccatcaactcctccctgagcgtcactctgcaccaggaccagttaaaaaccaccacaacagccgtcatcagcaaggacttcaccgaggaccggatttggctgaatggccgggaggaggatgtggggcagccgaggctgcaggcctgcctgcgggagatccgctgcctggcccggaagcggaggaactcacgggatggggacccgctgccctccagcctcagctgcaaggtgcacgtggcatcggtgaacaacttccccacggctgcgggcctggcctcctcagcggcgggctatgcctgcctagcctacaccctggcccgtgtctacggcgtggagagtgacctctcagaagtggctcgccggggctcaggcagcgcctgccggagcctgtatgggggctttgtggagtggcagatgggagagcaggccgacgggaaggacagcatcgctcggcaagtggcccccgagtcacactggcctgaactccgcgtgctcatccttgtggtgagcgctgagaagaagctgacaggcagtaccgtgggcatgcgggccagtgtggagaccagccccctgcttcggttccgggccgagtccgtggtgcccgcgcgcatggcggagatggcccgctgcatccgggagcgagacttccccagcttcgcccagctgaccatgaaggacagcaaccagttccacgccacctgcctcgacaccttcccgcccatctcttacctcaatgccatctcctggcgcatcatccacctggtgcaccgcttcaacgcccaccacggggacaccaaggtggcgtacacctttgacgcgggccccaatgccgtgatcttcaccctggacgacactgtggctgagtttgtggctgctgtgtggcacggctttcccccaggctcgaatggagacacgtttctgaaggggctgcaggtgaggccggcccctctctcagctgagcttcaggctgcgctggccatggagccgacccccggtggggtcaaatacatcattgtcactcaggtggggccagggcctcaaatcctggatgacccctgcgcccacctcctgggtcctgacggcctgccgaagccagctgcctgactgcctcagcagggaccgcatgccgcttggagaaggggtggcctcgccggagctagggagcggatgtggtgggctggccggactcctgggacatgtgggtggtggcttgaccccgggcccatgggcagcttgctgtggggcagtgcagggagtcctgcggccgcccaggtgtcaggagaggtccccgccgagtgcttcagctgccctaagctgcaccagcgctttgccaagatgggatggggagggggtatgagaactggcagagcctcggtgcagcagggctgaagggctttctcaccccagctctggctatgcccagttctctgagaaaggagctcagtggggaggtggtccctccagcggaccagggaaggggtcactgtgctgggagcagcctccttgggcctcaggaaaccaccaagtgcctcggatggtggctgcccacggcgcttctgctgagaccctgcccccggcccaggtgtctcggagggtggctgcccacggcctgggtgtggctggaatggtggcaggagtgggcaccagtgcggccccggtggccatggggaataaaccagcattgctgccaaaaaaaaaaaaaaaaa

SEQ ID NO: 1714 - protein, 400 aa, Homo sapiens
MASEKPLAAVTCTAPVNIAVIKYWGKRDEELVLPINSSLSVTLHQDQLKTTTTAVISKDFTEDRIWLNGREEDVGQPRLQACLREIRCLARKRRNSRDGDPLPSSLSCKVHVASVNNFPTAAGLASSAAGYACLAYTLARVYGVESDLSEVARRGSGSACRSLYGGFVEWQMGEQADGKDSIARQVAPESHWPELRVLILVVSAEKKLTGSTVGMRASVETSPLLRFRAESVVPARMAEMARCIRERDFPSFAQLTMKDSNQFHATCLDTFPPISYLNAISWRIIHLVHRFNAHHGDTKVAYTFDAGPNAVIFTLDDTVAEFVAAVWHGFPPGSNGDTFLKGLQVRPAPLSAELQAALAMEPTPGGVKYIIVTQVGPGPQILDDPCAHLLGPDGLPKPAA

SEQ ID NO: 1715 - DNA, 1623 bp, Homo sapiens
cagcagtccggacccaggcgcgcccctcccgccccagcccaccccggcctgccgcccgggaggggaacatgccgcgctccttcctggtgaaaacgcactccagccacagggtccccaactaccggcggctggagacgcagagagaaatcaatggtgcctgctctgcctgtggggggctggtggtgcccctcctcccccgagacaaggaggccccttctgtgcccggtgaccttccccagccctgggaccgctcctcggccgtcgcctgcatctccctgcccctcctgccacggatcgaggaagctctgggggcctctgggctggacgccttggaagtcagcgaggtcgaccctcgggccagccgggccgccattgtacccctcaaagacagcctgaaccacctcaacctgcccccactgctggtgctgcccacacggtggtccccgaccttgggcccagaccggcacggggctccggaaaaactgcttggggctgagcggatgccccgagccccgggcggctttgagtgcttccactgccacaaaccctaccacacgctggccgggctggccaggcaccggcagctgcactgccacctgcaggtggggcgtgtcttcacctgcaagtactgcgacaaggagtacaccagcctgggtgccctcaagatgcacatccgcactcacacgctgccctgcacctgcaagatctgtggcaaggccttctccaggccctggttactgcagggccatgtccgcacccacacaggggagaagccctatgcctgctcgcactgcagcagggcctttgccgaccgctccaaccttcgggcccatctgcaaacgcactcagacgccaagaagtaccggtgccggcgctgcaccaagaccttctcccgcatgtccctcctggcgcggcatgaggagtctggctgctgcccgggcccctgagaggcacgtggtcggcgcaggtaggagggatggtcctcaccgggagagctggcgtccctcctgcccccagaggagccaggagtctgggagggcggggccgggcctcacacttggtgcgtcctccacatctgcgtccaatcagaaccaaagaagtccagcggggggccactgggccggaggacactcccccaggcatcccaccgcgcggagcccactcagaggagactcctctcccggggaaggctttcatcagaacaagagccatggttccatttcgacacggccaggtctccggggctacccttccaagagtcagagcctcggggaggtggccgccagcatgggccagcactgccgccggatggctggcaaggctgcctagttcccttgcagcagaaatgaacagttctgacttatagtgagcacggccctgtggcccttcctcagtaggcacaactacctctcagccagcccccgccagcctttggtttggggtctgggacgagctgccccatgtcacacgtctatgtgcatgtgcacacacactcaaacatgtacacacacgtgccctccccacctcactagactctccgggagatggggcaggactgggagagcccacgattggtgatttgggtgtgttgggatgaggcggagtgcctgtgggatttgtccc

SEQ ID NO: 1716 - protein, 292 aa, Homo sapiens
MPRSFLVKTHSSHRVPNYRRLETQREINGACSACGGLVVPLLPRDKEAPSVPGDLPQPWDRSSAVACISLPLLPRIEEALGASGLDALEVSEVDPRASRAAIVPLKDSLNHLNLPPLLVLPTRWSPTLGPDRHGAPEKLLGAERMPRAPGGFECFHCHKPYHTLAGLARHRQLHCHLQVGRVFTCKYCDKEYTSLGALKMHIRTHTLPCTCKICGKAFSRPWLLQGHVRTHTGEKPYACSHCSRAFADRSNLRAHLQTHSDAKKYRCRRCTKTFSRMSLLARHEESGCCPGP

SEQ ID NO: 1717 - DNA, 1895 bp, Homo sapiens
ggcacagggctgtgactagcgggccggcccgggccaggacagcgggcggcgggcggcgcgggcctggccccgggatggctatgttccgcagcctggtggcctcggctcagcagcggcagccgccggccgggccggcgggcggcgacagcggcctggaggcgcagtacacctgccccatctgcctggaggtctatcaccggcccgtggccatcggcagctgcggccacacgttctgcggggagtgtctccagccctgcctgcaggtgccatccccgctgtgcccactgtgccgcctgcccttcgaccccaagaaggtggacaaggccacccacgtggagaagcagctctcatcctacaaagcgccctgtcgaggctgcaacaaaaaggtgaccctggcaaagatgagagtgcacatttcgtcctgcctgaaggtccaggagcagatggccaactgccccaagttcgtccccgtggtgcccacatcacagcctatccccagcaacatccccaacaggtccaccttcgcctgcccgtactgtggtgcccgcaacctggaccagcaggagctggtgaagcactgtgtggaaagccaccgcagcgaccccaaccgcgtggtgtgccccatctgctcggcaatgccctggggggaccccagctacaagagcgccaacttcctgcagcacctgcttcaccgacacaagttctcctacgacacctttgtggactacagtattgacgaggaggccgccttccaggctgctctggccctgtctctctctgagaactgaagggaagcgcagccacccgcctgcgtctggggtcagggatgtccccgctcctgtgtcgcacctggcacctgctcgggagcgcacctcaccggactgagctcacaggaggagcctgcacccgcgcagaaggggagccggggccgagcctccgggcctgaatacgggccagccgccgaggccgccagagcagggccgcctggtcccaccggcgtcgctgggttcttcggtgcttctggccgagcaggcggcctacttgggcagggctggacgctgggacctggagctgccgccgtctcttcaaagccatgataccccctcgtgggaagaagggaccgacgcgcgagtcgcgctccgcagtcgagccgggaggaacccaggctgctgccctgcccagcccgaccctgccccggccccgcttccaccttgcgcatttggtactggcttttgtgatacttaggaaccctggcatcttttctatattatccagtgtgataatcttttcacgttttatagagcaaagacagagcagttactcttcatattgcaatatctgtgtttgactaggaataatagtatttttatggaacatttacaaaattatattttttaagaaaacaatcaaaacaagcattgggggattggggcaaggatggaaggagcagtggggcagctgccagagctcaggcgagccatggggtctgctgtggggtctgccctggccacccactgtgtgtctgggtccttgaggtttgtacgtttctctttgatgaccaggaagaaatcccagcaccccagccacaggctgtggctgctcccagcagaggtggggccggcagagaaggggcctcctccacccagagtcctggccttggcccgctgtcaccttcaaagctgactgtgccccgctgcgggaggggacggcaccccagtggtggcagagcttgggggcctgggcaggggcccgcttggcgggccgggcaacacgtcaacattcttttctgttcttggcattaattattgctgtctttttttaaaaaaaaaaagtttaaataaaatgtctcagagcaaaaaaaaaaaaaaaaaaaaaaaaaaaaaaaaaaaaaaaaa

SEQ ID NO: 1718 - protein, 237 aa, Homo sapiens
MAMFRSLVASAQQRQPPAGPAGGDSGLEAQYTCPICLEVYHRPVAIGSCGHTFCGECLQPCLQVPSPLCPLCRLPFDPKKVDKATHVEKQLSSYKAPCRGCNKKVTLAKMRVHISSCLKVQEQMANCPKFVPVVPTSQPIPSNIPNRSTFACPYCGARNLDQQELVKHCVESHRSDPNRVVCPICSAMPWGDPSYKSANFLQHLLHRHKFSYDTFVDYSIDEEAAFQAALALSLSEN

SEQ ID NO: 1719 - DNA, 1740 bp, Homo sapiens
gccctcgcgctgtcgccgccacagtctgcgacgggacccggcgtgcccatgtgtcaggtgggcgaggactacggggagccggcgcctgaggagccgcccccggcgccgcggcccagccgtgagcagaagtgtgtgaagtgcaaggaagcgcagcccgttgtggtgatacgagccggagatgccttctgcagggactgtttcaaggccttctacgtccacaagttcagagccatgctgggcaagaaccggctcatctttccaggcgagaaggtgctcttggcgtggtctggggggccttcgtccagctccatggtctggcaggttcttgagggcctgagccaagattctgccaaaagactgcgctttgtggcaggagtcatctttgttgacgagggagcagcctgtggccagagcctagaggagagatcaaagaccctggccgaagtgaagcccattctgcaagcaactgggttcccatggcatgtggtggccttagaggaggtgttcagcctgccaccgtcggtgctttggtgctctgcccaggagctggtgggatccgagggggcctacaaggcggccgtggacagcttcctccagcagcagcatgtgctgggggccgggggtggtcctggcccgactcaaggggaggaacagccaccccagcccccgctggacccccagaacctggcaagaccgcctgcccctgcccagactgaggctctttcccaactgttctgctcagtgaggacactgactgccaaggaggagcttctgcagaccctgcggacccacctgatcctccacatggcccgagcccacggctactccaaggtcatgactggggacagctgcacacgcttggctatcaagctcatgaccaacctggcgctgggtcgaggggccttcctggcctgggatacgggcttctcggatgagcggcacggggacgtggtggtggtgcggcccatgcgggaccacaccctgaaggaggtcgctttctacaaccgcctgttctccgttccttctgtcttcacaccagccgtcgacaccaaggcccctgaaaaggccagcatccaccggctgatggaggccttcatcctcaggctgcagacccagttcccctccactgtcagcactgtgtacaggacaagtgagaagctggtgaagggcccccgggatggccctgctgctggcgactccggcccccgctgcctcctctgcatgtgtgccctggacgtcgacgccgctgacagtgccacggcttttggggctcagacctcctcgcgtctctcccagatgcagtcacccatccccctgactgagacccggacacccccggggccctgctgttctccaggggtgggctgggcccagcgctgtggccagggggcctgcaggagggaggacccccaagcctgcattgaggagcagctgtgctacagctgccgcgtgaacatgaaggacttgccctcactggaccccctgccgccgtacatcctggctgaggcccagctccgcacacagagggcctggggcttgcaggagatccgggactgtctgattgaggacagtgacgacgaggcgggccagagctgagcgtgaggacgtgcttgccgggacagcaggcagtggccacctggtacaccacactggagccggaaggcaaggacgggggactggcctctgattgtccatttgtataaataaaacattttttaattaaaaaaaaaaaaaaaaaaa

SEQ ID NO: 1720 - protein, 515 aa, Homo sapiens
MCQVGEDYGEPAPEEPPPAPRPSREQKCVKCKEAQPVVVIRAGDAFCRDCFKAFYVHKFRAMLGKNRLIFPGEKVLLAWSGGPSSSSMVWQVLEGLSQDSAKRLRFVAGVIFVDEGAACGQSLEERSKTLAEVKPILQATGFPWHVVALEEVFSLPPSVLWCSAQELVGSEGAYKAAVDSFLQQQHVLGAGGGPGPTQGEEQPPQPPLDPQNLARPPAPAQTEALSQLFCSVRTLTAKEELLQTLRTHLILHMARAHGYSKVMTGDSCTRLAIKLMTNLALGRGAFLAWDTGFSDERHGDVVVVRPMRDHTLKEVAFYNRLFSVPSVFTPAVDTKAPEKASIHRLMEAFILRLQTQFPSTVSTVYRTSEKLVKGPRDGPAAGDSGPRCLLCMCALDVDAADSATAFGAQTSSRLSQMQSPIPLTETRTPPGPCCSPGVGWAQRCGQGACRREDPQACIEEQLCYSCRVNMKDLPSLDPLPPYILAEAQLRTQRAWGLQEIRDCLIEDSDDEAGQS

SEQ ID NO: 1721 - DNA, 1681 bp, Homo sapiens
gccctcgcgctgtcgccgccacagtctgcgacgggacccggcgtgcccatgtgtcaggtgggcgaggactacggggagccggcgcctgaggagccgcccccggcgccgcggcccagccgtgagcagaagtgtgtgaagtgcaaggaagcgcagcccgttgtggtgatacgagccggagatgccttctgcagggactgtttcaaggccttctacgtccacaagttcagagccatgctgggcaagaaccggctcatctttccaggcgagaaggtgctcttggcgtggtctggggggccttcgtccagctccatggtctggcaggttcttgagggcctgagccaagattctgccaaaagactgcgctttgtggcaggagtcatctttgttgacgagggagcagcctgtggccagagcctagaggagagatcaaagaccctggccgaagtgaagcccattctgcaagcaactgggttcccatggcatgtggtggccttagaggaggtgttcagcctgccaccgtcggtgctttggtgctctgcccaggagctggtgggatccgagggggcctacaaggcggccgtggacagcttcctccagcagcagcatgtgctgggggccgggggtggtcctggcccgactcaaggggaggaacagccaccccagcccccgctggacccccagaacctggcaagaccgcctgcccctgcccagactgaggctctttcccaactgttctgctcagtgaggacactgactgccaaggaggagcttctgcagaccctgcggacccacctgatcctccacatggcccgagcccacggctactccaaggtcatgactggggacagctgcacacgcttggctatcaagctcatgaccaacctggcgctgggtcgaggggccttcctggcctgggatacgggcttctcggatgagcggcacggggacgtggtggtggtgcggcccatgcgggaccacaccctgaaggaggtcgctttctacaaccgcctgttctccgttccttctgtcttcacaccagccgtcgacaccaaggcccctgaaaaggccagcatccaccggctgatggaggccttcatcctcaggctgcagacccagttcccctccactgtcagcactgtgtacaggacaagtgagaagctggtgaagggcccccgggatggccctgctgctggcgactccggcccccgctgcctcctctgcatgtgtgccctggacgtcgacgccgctgacagtgccacggcttttggggctcagacctcctcgcgtctctcccagatgcagtcacccatccccctgactgagacccggacacccccggggccctgctgttctccaggggtgggctgggcccagcgctgtggccagggggcctgcaggagggaggacccccaagcctgcattgaggagcagctgtgctacagctgccgcgtgaacatgaaggacttgggcctggggcttgcaggagatccgggactgtctgattgaggacagtgacgacgaggcgggccagagctgagcgtgaggacgtgcttgccgggacagcaggcagtggccacctggtacaccacactggagccggaaggcaaggacgggggactggcctctgattgtccatttgtataaataaaacattttttaattaaaaaaaaaaaaaaaaaaa

SEQ ID NO: 1722 - protein, 485 aa, Homo sapiens
MCQVGEDYGEPAPEEPPPAPRPSREQKCVKCKEAQPVVVIRAGDAFCRDCFKAFYVHKFRAMLGKNRLIFPGEKVLLAWSGGPSSSSMVWQVLEGLSQDSAKRLRFVAGVIFVDEGAACGQSLEERSKTLAEVKPILQATGFPWHVVALEEVFSLPPSVLWCSAQELVGSEGAYKAAVDSFLQQQHVLGAGGGPGPTQGEEQPPQPPLDPQNLARPPAPAQTEALSQLFCSVRTLTAKEELLQTLRTHLILHMARAHGYSKVMTGDSCTRLAIKLMTNLALGRGAFLAWDTGFSDERHGDVVVVRPMRDHTLKEVAFYNRLFSVPSVFTPAVDTKAPEKASIHRLMEAFILRLQTQFPSTVSTVYRTSEKLVKGPRDGPAAGDSGPRCLLCMCALDVDAADSATAFGAQTSSRLSQMQSPIPLTETRTPPGPCCSPGVGWAQRCGQGACRREDPQACIEEQLCYSCRVNMKDLGLGLAGDPGLSD

SEQ ID NO: 1723 - DNA, 6368 bp, Homo sapiens
ccatggacctgcgccctgagctgcccaccaccctgggccccgtcagcctgcgccagctggggctggagcacacccgctacccctgtctggaccttggtgccatgttgctctacaccctgaccttctggctcctgctgcgccagtttgtgaaagagaagctgctgaagtgggcagagtctccagctgcgctgacggaggtcaccgtggcagacacagagcctacgcggacgcagacgctgttgcagagcctgggggagctggtgaagggcgtgtacgccaagtactggatctatgtgtgtgctggcatgttcatcgtggtcagcttcgccggccgcctcgtggtctacaagattgtctacatgttcctcttcctgctctgcctcaccctcttccaggtctactacagcctgtggcggaagctgctcaaggccttctggtggctcgtggtggcctacaccatgctggtcctcatcgccgtctacaccttccagttccaggacttccctgcctactggcgcaacctcactggcttcaccgacgagcagctgggggacctgggcctggagcagttcagcgtatccgagctcttctccagcatcctggtgcccggcttcttcctcctggcctgcatcctgcagctgcactacttccacaggcccttcatgcagctcaccgacatggagcacgtgtccctgcctggcacgcgcctcccgcgctgggctcacaggcaggatgcagtgagtgggaccccactgctgcgggaggagcagcaggagcatcagcagcagcagcaggaggaggaggaggaggaggactccagggacgaggggctgggcgtggccactccccaccaggccacgcaggtgcctgaaggggcagccaagtggggcctggtggctgagcgcctgctggagctggcagccggcttctcggacgtcctctcacgcgtgcaggtgttcctgcggcggctgctggagcttcacgttttcaagctggtggccctgtacaccgtctgggtggccctgaaggaggtgtcggtgatgaacctgctgctggtggtgctgtgggccttcgccctgccctacccacgcttccggcccatggcctcctgcctgtccaccgtgtggacctgcgtcatcatcgtgtgtaagatgctgtaccagctcaaggttgtcaacccccaggagtattccagcaactgcaccgagcccttccccaacagcaccaacttgctgcccacggagatcagccagtccctgctgtaccgggggcccgtggaccctgccaactggtttggggtgcggaaagggttccccaacctgggctacatccagaaccacctgcaagtgctgctgctgctggtattcgaggccatcgtgtaccggcgccaggagcactaccgccggcagcaccagctggccccgctgcctgcccaggccgtgtttgccagcggcacccgccagcagctggaccaggatctgctcggctgcctcaagtacttcatcaacttcttcttctacaaattcgggctggagatctgcttcctgatggccgtgaacgtgatcgggcagcgcatgaactttctggtgaccctgcacggttgctggctggtggccatcctcacccgcaggcaccgccaggccattgcccgcctctggcccaactactgcctcttcctggcgctgttcctgctgtaccagtacctgctgtgcctggggatgcccccggccctgtgcattgattatccctggcgctggagccgggccgtccccatgaactccgcactcatcaagtggctgtacctgcctgatttcttccgggcccccaactccaccaacctcatcagcgactttctcctgctgctgtgcgcctcccagcagtggcaggtgttctcagctgagcgcacagaggagtggcagcgcatggctggcgtcaacaccgaccgcctggagccgctgcggggggagcccaaccccgtgcccaactttatccactgcaggtcctaccttgacatgctgaaggtggccgtcttccgatacctgttctggctggtgctggtggtggtgtttgtcacgggggccacccgcatcagcatcttcgggctgggctacctgctggcctgcttctacctgctgctcttcggcacggccctgctgcagagggacacacgggcccgcctcgtgctgtgggactgcctcattctgtacaacgtcaccgtcatcatctccaagaacatgctgtcgctcctggcctgcgtcttcgtggagcagatgcagaccggcttctgctgggtcatccagctcttcagccttgtatgcaccgtcaagggctactatgaccccaaggagatgatggacagagaccaggactgcctgctgcctgtggaggaggctggcatcatctgggacagcgtctgcttcttcttcctgctgctgcagcgccgcgtcttccttagccattactacctgcacgtcagggccgacctccaggccaccgccctgctagcctccaggggcttcgccctctacaacgctgccaacctcaagagcattgacttccaccgcaggatagaggagaagtccctggcccagctgaaaagacagatggagcgtatccgtgccaagcaggagaagcacaggcagggccgggtggaccgcagtcgcccccaggacaccctgggccccaaggaccccggcctggagccagggcccgacagtccagggggctcctccccgccacggaggcagtggtggcggccctggctggaccacgccacagtcatccactccggggactacttcctgtttgagtccgacagtgaggaagaggaggaggctgttcctgaagacccgaggccgtcggcacagagtgccttccagctggcgtaccaggcatgggtgaccaacgcccaggcggtgctgaggcggcggcagcaggagcaggagcaggcaaggcaggaacaggcaggacagctacccacaggaggtggtcccagccaggaggtggagccagcagagggccccgaggaggcagcggcaggccggagccatgtggtgcagagggtgctgagcacggcgcagttcctgtggatgctggggcaggcgctagtggatgagctgacacgctggctgcaggagttcacccggcaccacggcaccatgagcgacgtgctgcgggcagagcgctacctcctcacacaggagctcctgcagggcggcgaagtgcacaggggcgtgctggatcagctgtacacaagccaggccgaggccacgctgccaggccccaccgaggcccccaatgccccaagcaccgtgtccagtgggctgggcgcggaggagccactcagcagcatgacagacgacatgggcagccccctgagcaccggctaccacacgcgcagtggcagtgaggaggcagtcaccgaccccggggagcgtgaggctggtgcctctctgtaccagggactgatgcggacggccagcgagctgctcctggacaggcgcctgcgcatcccagagctggaggaggcagagctgtttgcggaggggcagggccgggcgctgcggctgctgcgggccgtgtaccagtgtgtggccgcccactcggagctgctctgctacttcatcatcatcctcaaccacatggtcacggcctccgccggctccctggtgctgcccgtgctcgtcttcctgtgggccatgctgtcgatcccgaggcccagcaagcgcttctggatgacggccatcgtcttcaccgagatcgcggtggtcgtcaagtacctgttccagtttgggttcttcccctggaacagccacgtggtgctgcggcgctacgagaacaagccctacttcccgccccgcatcctgggcctggagaagactgacggctacatcaagtacgacctggtgcagctcatggcccttttcttccaccgctcccagctgctgtgctatggcctctgggaccatgaggaggactcaccatccaaggagcatgacaagagcggcgaggaggagcagggagccgaggaggggccaggggtgcctgcggccaccaccgaagaccacattcaggtggaagcgagggtcggacccacggacgggaccccagaaccccaagtggagctcaggccccgtgatacgaggcgcatcagtctacgttttagaagaaggaagaaggagggcccagcacggaaaggagcggcagccatcgaagctgaggacagggaggaagaagagggggaggaagagaaagaggcccccacggggagagagaagaggccaagccgctctggaggaagagtaagggcggccgggcggcggctgcagggcttctgcctgtccctggcccagggcacatatcggccgctacggcgcttcttccacgacatcctgcacaccaagtaccgcgcagccaccgacgtctatgccctcatgttcctggctgatgttgtcgacttcatcatcatcatttttggcttctgggcctttgggaagcactcggcggccacagacatcacgtcctccctatcagacgaccaggtacccgaggctttcctggtcatgctgctgatccagttcagtaccatggtggttgaccgcgccctctacctgcgcaagaccgtgctgggcaagctggccttccaggtggcgctggtgctggccatccacctatggatgttcttcatcctgcccgccgtcactgagaggatgttcaaccagaatgtggtggcccagctctggtacttcgtgaagtgcatctacttcgccctgtccgcctaccagatccgctgcggctaccccacccgcatcctcggcaacttcctcaccaagaagtacaatcatctcaacctcttcctcttccaggggttccggctggtgccgttcctggtggagctgcgggcagtgatggactgggtgtggacggacaccacgctgtccctgtccagctggatgtgtgtggaggacatctatgccaacatcttcatcatcaaatgcagccgagagacagagaagaaatacccgcagcccaaagggcagaagaagaagaagatcgtcaagtacggcatgggtggcctcatcatcctcttcctcatcgccatcatctggttcccgctgctcttcatgtcgctggtgcgctccgtggttggggttgtcaaccagcccatcgatgtcaccgtcaccctcaagctgggcggctatgagccgctgttcaccatgagcgcccagcagccgtccatcatccccttcacggcccaggcctatgaggagctgtcccggcagtttgacccccagccgctggccatgcagttcatcagccagtacagccctgaggacatcgtcacggcgcagattgagggcagctccggggcgctgtggcgcatcagtccccccagccgtgcccagatgaagcgggagctctacaacggcacggccgacatcaccctgcgcttcacctggaacttccagagggacctggcgaagggaggcactgtggagtatgccaacgagaagcacatgctggccctggcccccaacagcactgcacggcggcagctggccagcctgctcgagggcacctcggaccagtctgtggtcatccccaatctcttccccaagtacatccgtgcccccaacgggcccgaagccaaccctgtgaagcagctgcagcccaatgaggaggccgactacctcggcgtgcgtatccagctgcggagggagcagggtgcgggggccaccggcttcctcgaatggtgggtcatcgagctgcaggagtgccggaccgactgcaacctgctgcccatggtcattttcagtgacaaggtcagcccaccgagcctcggcttcctggctggctacggcatcatggggctgtacgtgtccatcgtgctggtcatcggcaagttcgtgcgcggattcttcagcgagatctcgcactccattatgttcgaggagctgccgtgcgtggaccgcatcctcaagctctgccaggacatcttcctggtgcgggagactcgggagctggagctggaggaggagttgtacgccaagctcatcttcctctaccgctcaccggagaccatgatcaagtggactcgtgagaaggagtaggagctgctgctggcgcccgagagggaaggagccggcctgctgggcagcgtggccacaaggggcggcactcctcaggccgggggagccactgccccgtccaaggccgccagctgtgatgcatcctcccggcctgcctgagccctgatgctgctgtcagagaaggacactgcgtccccacggcctgcgtggcgctgccgtcccccacgtgtactgtagagttttttttttaattaaaaaatgttttatttatacaaatgg

SEQ ID NO: 1724 - protein, 2035 aa, Homo sapiens
MDLRPELPTTLGPVSLRQLGLEHTRYPCLDLGAMLLYTLTFWLLLRQFVKEKLLKWAESPAALTEVTVADTEPTRTQTLLQSLGELVKGVYAKYWIYVCAGMFIVVSFAGRLVVYKIVYMFLFLLCLTLFQVYYSLWRKLLKAFWWLVVAYTMLVLIAVYTFQFQDFPAYWRNLTGFTDEQLGDLGLEQFSVSELFSSILVPGFFLLACILQLHYFHRPFMQLTDMEHVSLPGTRLPRWAHRQDAVSGTPLLREEQQEHQQQQQEEEEEEDSRDEGLGVATPHQATQVPEGAAKWGLVAERLLELAAGFSDVLSRVQVFLRRLLELHVFKLVALYTVWVALKEVSVMNLLLVVLWAFALPYPRFRPMASCLSTVWTCVIIVCKMLYQLKVVNPQEYSSNCTEPFPNSTNLLPTEISQSLLYRGPVDPANWFGVRKGFPNLGYIQNHLQVLLLLVFEAIVYRRQEHYRRQHQLAPLPAQAVFASGTRQQLDQDLLGCLKYFINFFFYKFGLEICFLMAVNVIGQRMNFLVTLHGCWLVAILTRRHRQAIARLWPNYCLFLALFLLYQYLLCLGMPPALCIDYPWRWSRAVPMNSALIKWLYLPDFFRAPNSTNLISDFLLLLCASQQWQVFSAERTEEWQRMAGVNTDRLEPLRGEPNPVPNFIHCRSYLDMLKVAVFRYLFWLVLVVVFVTGATRISIFGLGYLLACFYLLLFGTALLQRDTRARLVLWDCLILYNVTVIISKNMLSLLACVFVEQMQTGFCWVIQLFSLVCTVKGYYDPKEMMDRDQDCLLPVEEAGIIWDSVCFFFLLLQRRVFLSHYYLHVRADLQATALLASRGFALYNAANLKSIDFHRRIEEKSLAQLKRQMERIRAKQEKHRQGRVDRSRPQDTLGPKDPGLEPGPDSPGGSSPPRRQWWRPWLDHATVIHSGDYFLFESDSEEEEEAVPEDPRPSAQSAFQLAYQAWVTNAQAVLRRRQQEQEQARQEQAGQLPTGGGPSQEVEPAEGPEEAAAGRSHVVQRVLSTAQFLWMLGQALVDELTRWLQEFTRHHGTMSDVLRAERYLLTQELLQGGEVHRGVLDQLYTSQAEATLPGPTEAPNAPSTVSSGLGAEEPLSSMTDDMGSPLSTGYHTRSGSEEAVTDPGEREAGASLYQGLMRTASELLLDRRLRIPELEEAELFAEGQGRALRLLRAVYQCVAAHSELLCYFIIILNHMVTASAGSLVLPVLVFLWAMLSIPRPSKRFWMTAIVFTEIAVVVKYLFQFGFFPWNSHVVLRRYENKPYFPPRILGLEKTDGYIKYDLVQLMALFFHRSQLLCYGLWDHEEDSPSKEHDKSGEEEQGAEEGPGVPAATTEDHIQVEARVGPTDGTPEPQVELRPRDTRRISLRFRRRKKEGPARKGAAAIEAEDREEEEGEEEKEAPTGREKRPSRSGGRVRAAGRRLQGFCLSLAQGTYRPLRRFFHDILHTKYRAATDVYALMFLADVVDFIIIIFGFWAFGKHSAATDITSSLSDDQVPEAFLVMLLIQFSTMVVDRALYLRKTVLGKLAFQVALVLAIHLWMFFILPAVTERMFNQNVVAQLWYFVKCIYFALSAYQIRCGYPTRILGNFLTKKYNHLNLFLFQGFRLVPFLVELRAVMDWVWTDTTLSLSSWMCVEDIYANIFIIKCSRETEKKYPQPKGQKKKKIVKYGMGGLIILFLIAIIWFPLLFMSLVRSVVGVVNQPIDVTVTLKLGGYEPLFTMSAQQPSIIPFTAQAYEELSRQFDPQPLAMQFISQYSPEDIVTAQIEGSSGALWRISPPSRAQMKRELYNGTADITLRFTWNFQRDLAKGGTVEYANEKHMLALAPNSTARRQLASLLEGTSDQSVVIPNLFPKYIRAPNGPEANPVKQLQPNEEADYLGVRIQLRREQGAGATGFLEWWVIELQECRTDCNLLPMVIFSDKVSPPSLGFLAGYGIMGLYVSIVLVIGKFVRGFFSEISHSIMFEELPCVDRILKLCQDIFLVRETRELELEEELYAKLIFLYRSPETMIKWTREKE

SEQ ID NO: 1725 - DNA, 4521 bp, Homo sapiens
tatgccctaaaatctgggccctgggcaagcacacagcaggagagacaggcccccggtgggctatgggcagaacacgagggctccggcaattgggctgacaccgtccctgagcgtcagggatggccctgccagcacctgccgttctctgggcctcactttccttgaaagggtgggaaaggtggccctgaccccctttccagctctgcgcacctgaagactctcaggacccccaccccagggccgtggcttcatttgcttcattcagaaacacattgcaaaatggaaaatcaagcgttagggtaaagaaagaaagtagccagaaagagcccccaggccctcccaaggcgacatggccaacacagagttcccaggccagcccctgccctggacgagcggcctcctggggccactgggccacctggagcagctcccagagctaacagcacaagacagcatagccacattctctggggaggggttgggggacctggaggccccccatggggtcttggggatcaacgacgcggccactcagctgccctgggggtcttgggggttggtcagtgacatggccactcggctgccctgggggtctcgggggtcactgacaccgacccgtggatgtcctgggcccccgagggggcggcaggcagaggtgcggcgcgagcatgcgagagcgccaggcggccaccagggggcagcaccggcctccgccccgccccccgcccccagccataccttgcagtgtgcggtacccaccaggccgccgcaggagggagctctggccggtcagctcgtgcacgatgcagttatcagcctcggtgtcgggtgctgtgggcaccacgtgctgtgggcaagcagcgctgagccatgcacgggctggccgggcgccccccacgctggcgtctccacctgcctggctgctcacctggtcagactcccgttcctggggccactggtccagctctgctagctccagctcccgagcctcatacccctttgccgcctccttcctctgcagagaccagcgtcttgagcccaaaccagctccacaccccacccagaggcaggaggtcctgagaccagccccatggcctggcctcagcccacccaccatgggtggcaggtgctcacctggccggaggggcggtacgcgcggagcttgcgcagagaggccgtggcgtagcacagcagcaggaggacgccggggctggcatacacaggccagtccaggccggtgttgaggaccagcgcgtgggggctggagcagttggtgggacccacgaagtccttgagacccagcaccctgtccagagaagacccgtcacagcctaccaccccagaggcagtggggccacaggggctagacgagccaggtgggcgggaccagggtggcaggaaaaaggggctgtgtggcaagccgttacctagcccagatgccggcaggcgggagcagagcctgtgccaagggcatctggtagcagtagaggcagatgagatggccggcgccgaagcaccccaccgcggcgcagagtctgttgaagccccgagtgctgatgggaaagtggcaggcccaccaggtgcagagggccaggaagagcagcagtcatcagggaactcccaagacccctcccagtgtgactgccagtgccccctgcctcggtgcgtacctgccagtgcaagcagtgttacggccaggacccgcccagccgccaccagcagccagtgggccgtgactcggaaacgagcggccagccgtgacctccgtgtaggggccagcgttgctgcttcctgcagccctgccgtcgggctggcatccacatccctctcatcatcatcctgccaaggtcacggacaggggcaaggtcaggtgtatcgcactgacgccacctctccagcccacacctgcccagccaggagcgtgggaggcggccacatccacagctgctcctctgagggccacaggacagcctccccgggcacaggccccagccgtccctgaggtctgcctgacaccttcctacttcctcactcaagctcacagttcctgcaggccttcctggtagcagctcccaccctggccgaagacccagggtctgtcctgccaagcccaggcacgtgatgaccttgccaggtacagacagaccacagactgtcctataccacctcatctccccgaaccacgcacccagggagcagcggggccctgtctataccccggggggtctctagagaccaagggggcctgagggacatggccaggctccagggtctcctgtgtacccctgccagccttctgggtggctctgcctggaagataggggtggtactcctgccctccccaagcctctggggggacagaggtggccagctgcctagaagaagtgacaggccggcctggggctggggagagagacctgccgggcctgttttccctggacctgactaaagatttcccagaacacagccatttcccaaacaccagggaaagccaggtgtggtggaaagaacacggctgtcgtcagatgccctggctctggcctggctgccaccggcccagtgtccccatctgtgactcgggggctctcctggtggctgaggcgccaggtgcccgggctgagaccgcaggctgtggggctggacgataggccccaccccagctctgacagtctccgtgctctgcaggccgaggcaagtcacagcctctcggagcctattccccttctgtcaaatgggatgggggcttgacgggacagatgaaccagaccagtcctgtcctcacaggcctccagggctgcaggggctgctgggagactccgaggccagggtaacagggagatcagggcaggagaggcccaggccctgagcccacccctctcagagaccacacagcagctgggggcgaggctggatcagaacgcagggcgccatcgctcaccccacccacagcctggccctggccctggccctgggaaatcttctgagcagagccgtgaaaaatgagcatttctgggagtggaaagaacagaggcagctgctgtgagagaacaggtgtgaggccaccgaggggcaggcccggccctgacttggggtatgaggccaccgaggggcaggcccggccctgacttggggtgtgaggccaccgaggggcaggcccggccctgacttgggccccacgtgccgcagccatgctgcagacgcccctcaccctcctctagcggccagcacccctcgggctggctggcacactccgtcgcatgcctgcaaacacgtgtgtgtgttgcccatatgtgggagtgagggtcgcccgggggccctgccaggccgggtcatggggcttctagatctttcggaacggtatcctgcaggtgcctggtgcccccagctcactctgaagtctgtccacgctggccgcccagggcgcagctgcacactcaggctcccatcacaccaagatgaagatgaccagagtccagccacccagccccttcccagcagccaaactctaggaagctcatgccccatgcccccatcagcatggaggggctgacgagggaggggcgggtctcttggaggacaggcagcagcacagtcctcatgagcgctggaccccctcaaatgcccggaaaagccacttgacctccaggtccccgttcccacttctgaaatgcgggcaccagccttgccccatggggtggcgacaggacaggcaggagggcaggccgcctctgcaggctgagcaggtgtactcgacctaccgtgtggcttggggaacccctttccctctcgggactcctctagaagttgaggcccatgtgcgtggcgagcatcagctatctgacgagtgggcactgggagggtgaggtgggaggaggctgggtgcccggggcagggagttcgtgggccaggacacccaggtggccataaatcctggctgagcctggggatggcaagtgtgggcccaggcagggacgagagggtctgagcagtcaacgttgggtgtcgcaggccccagctcatgccctgtccgtgtgagggggccatagctcagagattcccggggccggacctccaagtcttgtagcagctaaagttcactctgcctcccactccgaggacagaggccctgcttcaggcccgtcgctcctggggtccaggcccctgctggggctctgggccgacagcctgtttgcctgtaagtgcatggggcctgctggggccgccccttctcagcccttctgcagtggctctccagccagacccactgcccagcactgcaggtttccaccaccgcgtggccccgaataattcccctgtgaagagttcctaagggcacagatgccatgtcggggcgtggaggtttctgactagaggcagagcccgagtagaaacaggtctgaacggatggaactgcaggctgggccccggggtgggatttggaacttcctcctctctttaacaccaacttacaaccaaaacgtctacatctgttttaaaaagattaaaataaccctcaaaatg

SEQ ID NO: 1726 - protein, 207 aa, Homo sapiens
MANTEFPGQPLPWTSGLLGPLGHLEQLPELTAQDSIATFSGEGLGDLEAPHGVLGINDAATQLPWGSWGLVSDMATRLPWGSRGSLTPTRGCPGPPRGRQAEVRREHARAPGGHQGAAPASAPPPAPSHTLQCAVPTRPPQEGALAGQLVHDAVISLGVGCCGHHVLWASSAEPCTGWPGAPHAGVSTCLAAHLVRLPFLGPLVQLC

SEQ ID NO: 1727 - DNA, 2140 bp, Homo sapiens
aatagacacaaggagaggcaagaagctccacctcaccccagtgggggctgcaggtggatggagaccagggcatgcggagcgcccctgagcagccgtggctggggtgggagcagggccatgatggctctggagaaaagtggggcaggcagctgcctccctggggctgaggggctgcaaggagaagttgcatccctatgcatggcctatgcatggtacccagtccccatggccaccctggcatttcaggcatctgctgtgcgccaggtcaggccccagaccggcatcctctctctctctgtgcacccgcacctggcaggaagcggcagcaccatctggttgcctggcaaccttgtcctgctcccagctgcctgtggccccactggactcagccccccagcagggaggccttcggctgcagggcaggggctgggcgggcgcaccctgtggctgggggcactcaggagccctggcttcacctctgctctcggcgcacatgtggacagctcaccctccagcaggggcccggaccaaagtccttgacccaccgggttctgagtcctgacagggctgtggacagcttccctttccaccccggcacctgctggcaggagcttccgggccctcaccctggggcagcaactcctgcaccaccagccacgcccggccacgagaaagtgcagaacagctcaggcccttctcacaacttcctggagctcagacacagttttttgagcacaaatggtgttaggtgacagactcgggattggccttggacactcagccccctctttctggagcaaagactcatgacccacgtccaagtcaccctgcacatccctaagcctgaccgtgaggcagccctcacggatgcccaggactccctgtccgcaccaccaggcagccgaggcaggtttggaccagcttctcacactcacaccttcctagggttgccccaggccctgacctgctgaccctgcagctatgacctctgacctgtggaggatgggaggggcgagcagcagggagagtgggaaggaggaatggaaaaccgtccaggaagggaggctgcagccccgacacgaacaggagccaccaccagggggtgctgtgcagggctcccggaggacaggaccttccagggcctccctgccccgaacccataggtgccaggcttctcactgctcacgacctccgtgccgggctcatacctgccgcgccagcccctcttcagcagagcacaagtctggcagcaggagggcaccagccaggggccccgcgcccccgcctctgtacagcagggtcaccgtggggtgacatgagaacaccgacccagggaatgggctcctgccacacctgcctgggaacctgggctgtgagtcctgcccgctgcaccctctagcctgacgttgaagtaacctcgccagcggggccctctgtggcactgggcactcagggagagcacgtggcattggagaaggtcccacccccaaatgcaaagctgggaaaaccaggctgagccggggatcaggccacctccgcagggacccactgctgcctcttccaggagcccaggagacccagtgggtctcctgcccccgactccaactccctcctggcaggacacacccagctcacagtggcctttccatcctgggaaagggagtgagaggaggctcaggccagggacccgcccagctctggccggcaaccgcccttcagcctttgttcctgaaccactgtgtgggccccaacccatccgctgcctgccggagggagcccatggggaatggactattcttgccacccctatccatggcaggggaggggctcagcatggctcttgcccacccagaagaaggtgcagggggcctggcgtggtggttcacacctttgggaggccgaggtgggtggatcacctcaggtcaggagtttgagaccagcctggccaacatggtgaaaccctgtttctactgaaaatacaaaaattagccaggcgtggtgatgggcacctgtaatctcagctactcaggaggctgaggcaggagaatcactttcacttaaacccaggaggcggaggttgcagtgagttgagatcgcgccactgcactccagcctgggcaacagaacaagactccgtctc

SEQ ID NO: 1728 - protein, 185 aa, Homo sapiens
MHGLCMVPSPHGHPGISGICCAPGQAPDRHPLSLCAPAPGRKRQHHLVAWQPCPAPSCLWPHWTQPPSREAFGCRAGAGRAHPVAGGTQEPWLHLCSRRTCGQLTLQQGPGPKSLTHRVLSPDRAVDSFPFHPGTCWQELPGPHPGAATPAPPATPGHEKVQNSSGPSHNFLELRHSFLSTNGVR

SEQ ID NO: 1729 - DNA, 2546 bp, Homo sapiens
cagcggcggcccaggaggcagccggtgagcgcctgcgagcagagtggcgggggccgctgacaggtcccgcgcagcccagcccagcccagccacgcggctcacaggtggggtccaagagcagtttggagcaacccggcgctacggagaggggtggacggctctgcacgggcctcctgtctcccgctcgggcagagggactcggggggacctcgctccttggccgagagaacctgaactcgggcggagagaacgcgcccaggcgggcaaggggaccagagaaagccggggctggaagtcactgtcgctcgccactgtctggagcgcacggagcgcagaggcccggcagccgcgcgtgccctcccggggaccgagccagtgatgcaggatcgctgagcggagatccgcgccgagaagtctctcggggccggggctgagacgcacgccttcgacaccgctgccaagaccccgattccggcgactcttgcggggaaccgaggggccaaggctgccccaagctcaggacttgggcgagtctaagacgatggtttcttaagcacggacccgcgttccccttcccgccccctcgactggaggcagggatcctgcgcggggcccccgggattccgtttccccgcggagccccggccgctgcctcccgggacagttcgcacggccacaggggcgcacggcgatgtggcctccgtccagcgcgctggcccgccggggggatgctctggcacctgtcggggtccaggcctagcatggccggcgcgttgcccgacgtcgcctccggctaggatggcccctccgggcccggccagtgccctctccacctcggccgagccgctgtcccgcagcatcttccggaagttcttgctgatgctctgctccctgctcacgtccctttacgtcttctactgcctggccgagcgctgccagaccctgtccggccccgtcgtggggctgtccggcggcggcgaggaggcgggggcccctggtggcggcgtcctggccggaggcccgagggagctggcggtgtggccggcggcggcacagagaaagcgcctcctgcaactgccgcagtggcggaggcgccggccgcccgcgccccgcgacgacggcgaggaggcggcctgggaagaagagtcccctggcctgtcagggggtccgggcggctccggggccggaagcaccgtggccgaggccccgccggggaccctggcgctgctcctggacgaaggcagcaagcagctgccgcaggccatcatcatcggagtgaagaagggcggcacgcgggcgctgctggagttcctgcgcgtgcaccccgacgtgcgcgccgtgggcgccgagccccacttcttcgaccgcagctacgacaagggcctcgcctggtaccgggacctgatgcccagaaccctggacgggcagatcaccatggagaagacgcccagttacttcgtcacgcgggaggcccccgcgcgcatctcggccatgtccaaggacaccaagctcatcgtggtggtgcgggacccggtgaccagggccatctcggactacacgcagacgctgtccaagcggcccgacatccccaccttcgagagcttgacgttcaaaaacaggacagcgggcctcatcgacacgtcgtggagcgccatccagatcggcatctacgccaagcacctggagcactggctgcgccacttccccatccgccagatgctcttcgtgagcggcgagcggctcatcagcgacccggccggggagctgggccgcgtgcaagacttcctgggcctcaagaggatcatcacggacaagcacttctacttcaacaagaccaagggcttcccctgcctgaagaaggcggagggcagcagccggccccattgcctgggcaagaccaagggcaggacccatcctgagatcgaccgcgaggtggtgcgcaggctgcgcgagttctaccggcctttcaacctcaagttctaccagatgaccgggcacgactttggctgggatggataaccatataatttaaaaagaaaaaaaaaatcaaaatataatatatttttttaccaatcggtagagaagagacagtttaatatttgtgctgaaaatatgtttcagtatttttttcaatgaatgttaagagattgttctcactcccgccccatcttaatgtataaccaacaccaaacacgtggatcaacagaaaaggaaaatttcactcgtctaaacactttcaattttcagtttttattttatgttctatatacccagtcataaagtataagcatcagttgtcattaaaagttttcagaaaatcttgaggttaaacatctctctctctttttttaaaatacaaggccctgataaaattgatatctatccttatatttttctccctttttcccgtgccactttttcttaaattatttcccagttagtattatcatatgtttgtacccgtcacagttttcatagtgctttcaaatacacctttttgatcattaaaataaaaaaataaatcttggaaaaaaaaaaaaaaaaaa

SEQ ID NO: 1730 - protein, 406 aa, Homo sapiens
MAPPGPASALSTSAEPLSRSIFRKFLLMLCSLLTSLYVFYCLAERCQTLSGPVVGLSGGGEEAGAPGGGVLAGGPRELAVWPAAAQRKRLLQLPQWRRRRPPAPRDDGEEAAWEEESPGLSGGPGGSGAGSTVAEAPPGTLALLLDEGSKQLPQAIIIGVKKGGTRALLEFLRVHPDVRAVGAEPHFFDRSYDKGLAWYRDLMPRTLDGQITMEKTPSYFVTREAPARISAMSKDTKLIVVVRDPVTRAISDYTQTLSKRPDIPTFESLTFKNRTAGLIDTSWSAIQIGIYAKHLEHWLRHFPIRQMLFVSGERLISDPAGELGRVQDFLGLKRIITDKHFYFNKTKGFPCLKKAEGSSRPHCLGKTKGRTHPEIDREVVRRLREFYRPFNLKFYQMTGHDFGWDG

SEQ ID NO: 1731 - DNA, 522 bp, Homo sapiens
atggggaagtcagctccccgtcccccacctcggacgcactcacaaagctcacctccgcccccggcgccccgcgaatgcaccccacgtccccaccccacgctccgcaaagactccgcgcctcggcgcaagcagatcccttgccacactcgcccctcgcgcccccatgcccccacccgacctcagctggccgcacatcccccagaagaccctcagccgcggcgcagggcgcccccaccctgcagctccccagacgtccatccggaagagcggacgagcggacgggcgggcgggcgacgcgcggggggagaaggagagcaagagcgcgaggaaaaaagttcccgggcggcctggctgcgctcgctcgcggccccgggcgccaggtgggccgtgcgcgccccgacagcaccccctggcggtccgcgcgccccactgcgcgccccccgcccgctggccggcctgcgggagggggcctctgcgtttgagaaacattttcgatttcaaaactccattggcttcatgtaa

SEQ ID NO: 1732 - protein, 173 aa, Homo sapiens
MGKSAPRPPPRTHSQSSPPPPAPRECTPRPHPTLRKDSAPRRKQIPCHTRPSRPHAPTRPQLAAHPPEDPQPRRRAPPPCSSPDVHPEERTSGRAGGRRAGGEGEQEREEKSSRAAWLRSLAAPGARWAVRAPTAPPGGPRAPLRAPRPLAGLREGASAFEKHFRFQNSIGFM

SEQ ID NO: 1733 - DNA, 7668 bp, Homo sapiens
cccgcggacaccaggcaggcccggccgggtgcgcggccaaggcccgctccccgcgtccccgggcgccgcccccgcccgcggctgggctccgagagacgagtgggagagcgagtgcagcgagggcgagaggcgagccgagcaggccgccctgcccgcggccctagcgccggcgcgaggagggggcgccgcggcccaccctccttcctgcctggccgcgggccggccgggccgccgcgccccgacccccatggccacccaggcctccgggccgcgaagtcgcagcgccagacccaaggcccccgagtgagcgcgggcgccgaggatctcatctggccaccgcgttctggaagaggcgagagggagagcgtgcgcgagaggagagagacggcgggggaaagggagacggcgagacgcgcagcgccggcgcccgggagacccaggaggagcccgcagataaccagcccgagtcatgcagtcttttcgagaaaggtgtggtttccatggcaaacaacagaactaccagcagacctcgcaggaaacatcacgcctagagaattacaggcagccgagtcaggccgggctaagctgcgaccggcagcggctgctcgccaaggactattataacccgcagccttacccgagctatgagggtggcgctggcacgccctctggcactgcagccgcggtggccgccgacaagtaccaccgaggcagcaaggccctgcccacacagcaaggcctgcaggggaggccggctttccctggctacggcgtccaggacagcagcccctacccaggccgctatgctggtgaggagagccttcaggcttggggggccccacagccaccacccccacagccgcagccactacctgcaggggtggccaagtatgatgagaacttgatgaaaaagacagcagtgccccccagcaggcagtatgcagagcagggcgcccaggtgccctttcggactcactccctgcacgtccagcagccaccgccgccccagcagcccctggcataccccaagctccaaaggcagaagctgcagaacgacattgcctcccctctgcccttcccccagggtacccactttcctcagcattcccagtccttccccacctcctccacctactcctcctctgtccagggtggtgggcagggggcccactcctataagagttgcacagcaccgactgcccagccccatgacaggccgctgactgccagctccagcctggccccggggcagcgggtccagaatcttcatgcctaccagtcgggccgcctcagctatgaccagcagcagcagcagcagcagcagcagcagcagcagcagcaagcccttcagagccggcaccatgcccaggaaaccctccattaccaaaacctcgccaagtatcagcactacgggcagcaaggccagggctactgccagccggacgcagccgtccggaccccagagcagtactaccagaccttcagccccagctccagccactcacccgcccgctccgtgggccgctcaccttcctacagttccacaccgtcgccgctgatgccaaacctggagaactttccctacagccagcagccgctcagcaccggggccttccccgcagggatcactgaccacagccacttcatgcccctgctcaatccctccccaacggatgccaccagctctgtggacacccaggctggcaactgcaagccccttcagaaggacaagctccctgagaacctgctgtcggatctcagcctgcagagcctcacggcgctgacctcacaggtggagaacatctccaacaccgtccagcagctgctgctctccaaggctgctgtgccgcagaagaaaggtgtcaagaacctcgtgtccaggaccccagagcagcataaaagccagcactgcagccccgaagggagcggctactcagccgagcccgcaggcacaccgctgtcagagccgccgagcagcacgccacagtccacgcatgcggagccgcaggaggccgactacctgagcggctccgaggacccactggagcgcagcttcctctactgcaaccaggcccgtggcagccctgccagggtcaacagcaactcgaaggccaagcccgagtccgtgtccacctgttctgtgacctctcctgacgacatgtccaccaaatctgacgactccttccagagcctacacggcagtctgccgctcgacagcttctccaagttcgtggcgggtgagcgggactgtccgcggctgctgctcagcgccctggcacaggaggacctggcctccgagatcctggggctgcaggaagccatcggtgagaaggccgacaaagcttgggctgaagcacccagcctggtcaaggacagcagcaagccacccttctcgctggagaaccacagcgcctgcctggactctgtggccaagagtgcgtggccccggcctggggagccggaggccctgcccgactccttgcagctggacaagggcggcaatgccaaggacttcagcccagggctgtttgaagacccttccgtggccttcgctacgcctgaccccaaaaagacaactggtcctctctcctttggtaccaagcccacccttggggttcctgctccagaccccactacagcagcttttgactgtttcccggacacaaccgctgccagctcagcggacagcgccaacccctttgcctggccagaggaaaacctgggggatgcttgtcccaggtggggattgcaccctggcgagcttaccaagggcctggagcagggtgggaaggcctcagatggcatcagcaaaggggacacccatgaggcttcggcctgcctgggcttccaggaggaggacccccctggggagaaggtggcctcgttgcccggggacttcaagcaggaggaggtgggtggggtgaaggaggaggcaggtgggctgctgcagtgccccgaggtggccaaggctgaccggtggctggaggacagccggcactgctgttccaccgccgacttcggggacctcccactgctgccacccaccagcaggaaggaggacctggaagctgaggaggagtactcctccctatgtgagctcctgggcagccccgagcagaggcctggcatgcaggacccgctgtcacccaaggccccactcatctgcaccaaggaggaggtggaggaggtgctggactccaaggccggctggggctctccgtgccacctctcaggggagtccgtcatcctgctgggccctacagtgggcaccgagtcaaaggtccagagctggtttgagtcctctctgtcacacatgaagccaggtgaagaggggcctgatggggagcgagctccaggggattccaccacctcggacgcctctctggcccagaagcccaacaagcctgctgtgcccgaggcgcccatcgcaaagaaagagcctgtgccacggggcaaaagcttacggagccgtcgggtgcaccgggggctgcccgaggccgaggactccccatgcagggcaccagtgctgcccaaagacctcttgctccctgaatcctgcacagggcccccccagggacagatggaaggggctggagccccaggccggggggcctcggaagggctccccaggatgtgtactcgttctctcacggccctgagtgagccccgcacgcccggacccccaggcctgaccaccacccctgcacccccagacaaactggggggcaagcagcgagccgccttcaagtcgggcaagcgggtggggaagccctcacccaaggctgcctccagccccagcaacccggccgccctgcctgtggcctccgacagcagcccgatgggctccaagaccaaggagacagactcacccagcacgcctggcaaggaccagcgctccatgatccttcggtcacgcaccaaaacccaggagatcttccactccaagcggcggaggccctctgagggccggctccccaactgccgtgccaccaagaagctcctcgacaacagccacttgcccgccacattcaaggtctccagcagcccccagaaggagggcagggtgagccagcgggcaagggtccccaaacctggtgcaggcagcaagctctctgaccggcccctccatgcgctcaaaaggaagtcggccttcatggcgccggtccccaccaagaagcggaacctggtcttgcggagccgcagcagcagcagcagcaacgccagtggcaatgggggagatgggaaggaggagaggcctgagggttcccccaccctcttcaagaggatgtcttctcccaagaaagccaagcccaccaagggcaatggcgagcctgccacaaagctcccacccccggagacccccgatgcctgcctcaagctcgcctctcgggcagccttccagggggccatgaagaccaaggtgctgccaccccggaagggccggggcctgaagctggaagccatcgtgcagaagatcacctcgcccagcctcaagaagttcgcatgtaaagcgccaggggcctctcctggtaatcctctgagcccatccctttccgacaaagaccgtgggctcaagggtgctgggggcagcccagtgggggtggaagaaggcctggtaaatgtgggcaccgggcagaagctcccaacttctggggctgatccgttatgcagaaatccaaccaacagatccttaaaaggcaaactcatgaacagtaagaaactgtcttctactgactgtttcaaaaccgaggccttcacatccccggaggccctgcagcctggggggactgccctggcgcctaagaagaggagccggaaaggccgggcaggggcccatggactctccaaaggcccgctggagaagcggccctatcttggcccggctctgctcctgactccccgagacagggccagtggcacacaaggggccagtgaggacaactctggtggaggaggcaagaagccaaagatggaggagctgggcctggcctcccagcccccggagggcaggccctgccagccccagacaagggcacagaaacagccaggccacaccaactacagcagctattccaagcggaagcgcctcactcggggccgggccaagaacaccacctcttcaccctgtaaggggcgtgccaagcgacgacgacagcagcaggtgctgcccctggatcccgcagagcctgaaatccgcctcaagtacatttcctcttgcaagcggctgaggtcagacagccggacccccgccttctcacccttcgtgcgggtggagaagcgagacgcgttcaccaccatatgcactgttgtcaactcccctggagatgcgcccaagccccacaggaagccttcctcctctgcctcctcttcctcatcctcgtcctcgttctccttggatgcagccggggcctccctggccacactccctggaggctccatcctgcagccgcggccctccttgcccctctcctccacgatgcacttggggcctgtggtttccaaggccctgagtacctcttgccttgtttgctgcctctgccaaaacccggccaacttcaaggaccttggggacctctgtgggccctactaccctgaacactgcctccccaaaaagaagccaaaactcaaggagaaggtgcggccagaaggcacctgtgaggaggcctcgctgccgcttgagagaacactcaaaggtcccgagtgtgcagctgccgccactgccgggaagccccccaggcctgacggcccagctgacccggccaagcagggcccactgcgcaccagtgcccggggcctgtcccggaggctgcagagctgctactgctgtgatggccgggaggatgggggcgaggaggcagccccagccgacaagggtcgcaaacatgagtgcagcaaggaggctccggcagagcccggcggggaggcccaggagcactgggtgcatgaggcctgtgccgtgtggaccggcggcgtctacctggtggccgggaagctctttgggctgcaggaggccatgaaggtggccgtggacatgatgtgttccagctgccaagaagccggggccaccattgggtgctgccacaaaggatgcctccacacctaccactacccgtgtgccagcgatgcaggttgcatattcatcgaagagaacttttctttgaaatgtcccaaacataagaggctgccgtagtaatccaccccaacggccggaggagccgccggagcccgcctgcccgcccgccgccgaaggagaggagccgcctgcgcagcccccgggcctttgagctgctcccagcgctggtccagagccgatccttgatccgggtcccggatcgtggatccggccgcctagggctcagacttgcggccccgggttgggaggaaaacccgttccggagccgcctgctcccggaaccggacggcacagggcgttcttgcccaccccaggggccaggcttgcggagggggagcccgcggagcggccagactccccggggcgctcagcctccggcgagggtgggagacggctttgtcctggggacactttccctctggaatctcaagacgacgtggcacacattccacgtgggtgctgccgccaccccagtcggtcgtggcgtgcagctgggagccctgggcttgggggtgggggtcgaaacagtactggaagaggcggagggcggctcctagctccgtggactaggcgggggagaaaggaagcctttctgagagcgggctaggccggcactggagaggccggagcctttggaacaaaccgtgcggaacgcgtccaggggccttcccgcccagcctttgccagatctctcgtgcggttcgggcaaagccggggtagacctgggctatgctcagttaggggttgcgggatccccgagtgtgggcgggactgggacaccctttggcctctgtttgtcccctttccagtcctccaccccacccctggagcccagcctgggagcgcaaaacccaagaagcggccagaacgcacctccggctccggcggacgcgcgaccgttgtgcaccaccagggaccgccgcgcctactctgcacgggagcagggacagcgctagatttcgtgtacaaaacctgtgtacccctctatatatatgttacatagaatgtatatatgttgggaacatgctcgcttctcccgtgtgtcgccgccgtgcgtcgtgcgcccgcaacagagccccaaccgggcctttgccgggtaaggggctaccgcgacgccacttgtccacgcagccaccaccggcccgggccagtccctgccagtccgtccgcctgtccgtccgtgtcctcagctctgtccacgcttcgataggcctgacgcagcccccagcccagggccgccctagcaacttcctgtacatatgactgtaaaatggtaaacgtgtgtattatatctggcctcgttatatagtgtatatatatgtatacatatacatatatataatatatatgaagactgtaaatgttaagacgactagtgttcttattagtatattgcttcacactgaagattgtgtgtatcgagctgtttctaaaagatgtttattttccttaagagtaaaaaacagtcattgcattcagaaaaaaaaaaaaaaaaaagtcaataaagatacaacgattgttttggaaaaaaaaaa

SEQ ID NO: 1734 - protein, 1906 aa, Homo sapiens
MQSFRERCGFHGKQQNYQQTSQETSRLENYRQPSQAGLSCDRQRLLAKDYYNPQPYPSYEGGAGTPSGTAAAVAADKYHRGSKALPTQQGLQGRPAFPGYGVQDSSPYPGRYAGEESLQAWGAPQPPPPQPQPLPAGVAKYDENLMKKTAVPPSRQYAEQGAQVPFRTHSLHVQQPPPPQQPLAYPKLQRQKLQNDIASPLPFPQGTHFPQHSQSFPTSSTYSSSVQGGGQGAHSYKSCTAPTAQPHDRPLTASSSLAPGQRVQNLHAYQSGRLSYDQQQQQQQQQQQQQQALQSRHHAQETLHYQNLAKYQHYGQQGQGYCQPDAAVRTPEQYYQTFSPSSSHSPARSVGRSPSYSSTPSPLMPNLENFPYSQQPLSTGAFPAGITDHSHFMPLLNPSPTDATSSVDTQAGNCKPLQKDKLPENLLSDLSLQSLTALTSQVENISNTVQQLLLSKAAVPQKKGVKNLVSRTPEQHKSQHCSPEGSGYSAEPAGTPLSEPPSSTPQSTHAEPQEADYLSGSEDPLERSFLYCNQARGSPARVNSNSKAKPESVSTCSVTSPDDMSTKSDDSFQSLHGSLPLDSFSKFVAGERDCPRLLLSALAQEDLASEILGLQEAIGEKADKAWAEAPSLVKDSSKPPFSLENHSACLDSVAKSAWPRPGEPEALPDSLQLDKGGNAKDFSPGLFEDPSVAFATPDPKKTTGPLSFGTKPTLGVPAPDPTTAAFDCFPDTTAASSADSANPFAWPEENLGDACPRWGLHPGELTKGLEQGGKASDGISKGDTHEASACLGFQEEDPPGEKVASLPGDFKQEEVGGVKEEAGGLLQCPEVAKADRWLEDSRHCCSTADFGDLPLLPPTSRKEDLEAEEEYSSLCELLGSPEQRPGMQDPLSPKAPLICTKEEVEEVLDSKAGWGSPCHLSGESVILLGPTVGTESKVQSWFESSLSHMKPGEEGPDGERAPGDSTTSDASLAQKPNKPAVPEAPIAKKEPVPRGKSLRSRRVHRGLPEAEDSPCRAPVLPKDLLLPESCTGPPQGQMEGAGAPGRGASEGLPRMCTRSLTALSEPRTPGPPGLTTTPAPPDKLGGKQRAAFKSGKRVGKPSPKAASSPSNPAALPVASDSSPMGSKTKETDSPSTPGKDQRSMILRSRTKTQEIFHSKRRRPSEGRLPNCRATKKLLDNSHLPATFKVSSSPQKEGRVSQRARVPKPGAGSKLSDRPLHALKRKSAFMAPVPTKKRNLVLRSRSSSSSNASGNGGDGKEERPEGSPTLFKRMSSPKKAKPTKGNGEPATKLPPPETPDACLKLASRAAFQGAMKTKVLPPRKGRGLKLEAIVQKITSPSLKKFACKAPGASPGNPLSPSLSDKDRGLKGAGGSPVGVEEGLVNVGTGQKLPTSGADPLCRNPTNRSLKGKLMNSKKLSSTDCFKTEAFTSPEALQPGGTALAPKKRSRKGRAGAHGLSKGPLEKRPYLGPALLLTPRDRASGTQGASEDNSGGGGKKPKMEELGLASQPPEGRPCQPQTRAQKQPGHTNYSSYSKRKRLTRGRAKNTTSSPCKGRAKRRRQQQVLPLDPAEPEIRLKYISSCKRLRSDSRTPAFSPFVRVEKRDAFTTICTVVNSPGDAPKPHRKPSSSASSSSSSSSFSLDAAGASLATLPGGSILQPRPSLPLSSTMHLGPVVSKALSTSCLVCCLCQNPANFKDLGDLCGPYYPEHCLPKKKPKLKEKVRPEGTCEEASLPLERTLKGPECAAAATAGKPPRPDGPADPAKQGPLRTSARGLSRRLQSCYCCDGREDGGEEAAPADKGRKHECSKEAPAEPGGEAQEHWVHEACAVWTGGVYLVAGKLFGLQEAMKVAVDMMCSSCQEAGATIGCCHKGCLHTYHYPCASDAGCIFIEENFSLKCPKHKRLP

SEQ ID NO: 1735 - DNA, 357 bp, Homo sapiens
atgtcaccctcgcgtcctgccaccccttgtccccgccgcactcggcccccatgtcctcctcccgggttccctgccttcaaggcgcgtgagagggggggccggcctcgaaaagggcggcgggctgcgccgccgtctgtggggcgcaaggctcgcgtgtccggggcccccgcccgtgacgtcatccccgaagggcccgtgcctcccgggcctggccgctacagagctccccaggtcgcgggggccgcttcctgcccggcctcggggcctgcgcacaggccccggggccgctgcccgggtagggacaccgcagagagcccgagcacccatctcgccacgcacggccttcgccggccctga

SEQ ID NO: 1736 - protein, 118 aa, Homo sapiens
MSPSRPATPCPRRTRPPCPPPGFPAFKARERGGRPRKGRRAAPPSVGRKARVSGAPARDVIPEGPVPPGPGRYRAPQVAGAASCPASGPAHRPRGRCPGRDTAESPSTHLATHGLRRP

SEQ ID NO: 1737 - DNA, 4284 bp, Homo sapiens
agcagagctgcggccgggggaacccagtttccgaggaacttttcgccggcgccgggccgcctctgaggccagggcaggacacgaacgcgcggagcggcggcggcgactgagagccggggccgcggcggcgctccctaggaagggccgtacgaggcggcgggcccggcgggcctcccggaggaggcggctgcgccatggacgagccacccttcagcgaggcggctttggagcaggcgctgggcgagccgtgcgatctggacgcggcgctgctgaccgacatcgaaggtgaagtcggcgcggggaggggtagggccaacggcctggacgccccaagggcgggcgcagatcgcggagccatggattgcactttcgaagacatgcttcagcttatcaacaaccaagacagtgacttccctggcctatttgacccaccctatgctgggagtggggcagggggcacagaccctgccagccccgataccagctccccaggcagcttgtctccacctcctgccacattgagctcctctcttgaagccttcctgagcgggccgcaggcagcgccctcacccctgtcccctccccagcctgcacccactccattgaagatgtacccgtccatgcccgctttctcccctgggcctggtatcaaggaagagtcagtgccactgagcatcctgcagacccccaccccacagcccctgccaggggccctcctgccacagagcttcccagccccagccccaccgcagttcagctccacccctgtgttaggctaccccagccctccgggaggcttctctacaggaagccctcccgggaacacccagcagccgctgcctggcctgccactggcttccccgccaggggtcccgcccgtctccttgcacacccaggtccagagtgtggtcccccagcagctactgacagtcacagctgcccccacggcagcccctgtaacgaccactgtgacctcgcagatccagcaggtcccggtcctgctgcagccccacttcatcaaggcagactcgctgcttctgacagccatgaagacagacggagccactgtgaaggcggcaggtctcagtcccctggtctctggcaccactgtgcagacagggcctttgccgaccctggtgagtggcggaaccatcttggcaacagtcccactggtcgtagatgcggagaagctgcctatcaaccggctcgcagctggcagcaaggccccggcctctgcccagagccgtggagagaagcgcacagcccacaacgccattgagaagcgctaccgctcctccatcaatgacaaaatcattgagctcaaggatctggtggtgggcactgaggcaaagctgaataaatctgctgtcttgcgcaaggccatcgactacattcgctttctgcaacacagcaaccagaaactcaagcaggagaacctaagtctgcgcactgctgtccacaaaagcaaatctctgaaggatctggtgtcggcctgtggcagtggagggaacacagacgtgctcatggagggcgtgaagactgaggtggaggacacactgaccccacccccctcggatgctggctcacctttccagagcagccccttgtcccttggcagcaggggcagtggcagcggtggcagtggcagtgactcggagcctgacagcccagtctttgaggacagcaaggcaaagccagagcagcggccgtctctgcacagccggggcatgctggaccgctcccgcctggccctgtgcacgctcgtcttcctctgcctgtcctgcaaccccttggcctccttgctgggggcccgggggcttcccagcccctcagataccaccagcgtctaccatagccctgggcgcaacgtgctgggcaccgagagcagagatggccctggctgggcccagtggctgctgcccccagtggtctggctgctcaatgggctgttggtgctcgtctccttggtgcttctctttgtctacggtgagccagtcacacggccccactcaggccccgccgtgtacttctggaggcatcgcaagcaggctgacctggacctggcccggggagactttgcccaggctgcccagcagctgtggctggccctgcgggcactgggccggcccctgcccacctcccacctggacctggcttgtagcctcctctggaacctcatccgtcacctgctgcagcgtctctgggtgggccgctggctggcaggccgggcagggggcctgcagcaggactgtgctctgcgagtggatgctagcgccagcgcccgagacgcagccctggtctaccataagctgcaccagctgcacaccatggggaagcacacaggcgggcacctcactgccaccaacctggcgctgagtgccctgaacctggcagagtgtgcaggggatgccgtgtctgtggcgacgctggccgagatctatgtggcggctgcattgagagtgaagaccagtctcccacgggccttgcattttctgacacgcttcttcctgagcagtgcccgccaggcctgcctggcacagagtggctcagtgcctcctgccatgcagtggctctgccaccccgtgggccaccgtttcttcgtggatggggactggtccgtgctcagtaccccatgggagagcctgtacagcttggccgggaacccagtggaccccctggcccaggtgactcagctattccgggaacatctcttagagcgagcactgaactgtgtgacccagcccaaccccagccctgggtcagctgatggggacaaggaattctcggatgccctcgggtacctgcagctgctgaacagctgttctgatgctgcgggggctcctgcctacagcttctccatcagttccagcatggccaccaccaccggcgtagacccggtggccaagtggtgggcctctctgacagctgtggtgatccactggctgcggcgggatgaggaggcggctgagcggctgtgcccgctggtggagcacctgccccgggtgctgcaggagtctgagagacccctgcccagggcagctctgcactccttcaaggctgcccgggccctgctgggctgtgccaaggcagagtctggtccagccagcctgaccatctgtgagaaggccagtgggtacctgcaggacagcctggctaccacaccagccagcagctccattgacaaggccgtgcagctgttcctgtgtgacctgcttcttgtggtgcgcaccagcctgtggcggcagcagcagcccccggccccggccccagcagcccagggcaccagcagcaggccccaggcttccgcccttgagctgcgtggcttccaacgggacctgagcagcctgaggcggctggcacagagcttccggcccgccatgcggagggtgttcctacatgaggccacggcccggctgatggcgggggccagccccacacggacacaccagctcctcgaccgcagtctgaggcggcgggcaggccccggtggcaaaggaggcgcggtggcggagctggagccgcggcccacgcggcgggagcacgcggaggccttgctgctggcctcctgctacctgccccccggcttcctgtcggcgcccgggcagcgcgtgggcatgctggctgaggcggcgcgcacactcgagaagcttggcgatcgccggctgctgcacgactgtcagcagatgctcatgcgcctgggcggtgggaccactgtcacttccagctagaccccgtgtccccggcctcagcacccctgtctctagccactttggtcccgtgcagcttctgtcctgcgtcgaagctttgaaggccgaaggcagtgcaagagactctggcctccacagttcgacctgcggctgctgtgtgccttcgcggtggaaggcccgaggggcgcgatcttgaccctaagaccggcggccatgatggtgctgacctctggtggccgatcggggcactgcaggggccgagccattttggggggcccccctccttgctctgcaggcaccttagtggcttttttcctcctgtgtacagggaagagaggggtacatttccctgtgctgacggaagccaacttggctttcccggactgcaagcagggctctgccccagaggcctctctctccgtcgtgggagagagacgtgtacatagtgtaggtcagcgtgcttagcctcctgacctgaggctcctgtgctactttgccttttgcaaactttattttcatagattgagaagttttgtacagagaattaaaaatgaaattatttataatctggaaaaaa

SEQ ID NO: 1738 - protein, 1177 aa, Homo sapiens
MDEPPFSEAALEQALGEPCDLDAALLTDIEGEVGAGRGRANGLDAPRAGADRGAMDCTFEDMLQLINNQDSDFPGLFDPPYAGSGAGGTDPASPDTSSPGSLSPPPATLSSSLEAFLSGPQAAPSPLSPPQPAPTPLKMYPSMPAFSPGPGIKEESVPLSILQTPTPQPLPGALLPQSFPAPAPPQFSSTPVLGYPSPPGGFSTGSPPGNTQQPLPGLPLASPPGVPPVSLHTQVQSVVPQQLLTVTAAPTAAPVTTTVTSQIQQVPVLLQPHFIKADSLLLTAMKTDGATVKAAGLSPLVSGTTVQTGPLPTLVSGGTILATVPLVVDAEKLPINRLAAGSKAPASAQSRGEKRTAHNAIEKRYRSSINDKIIELKDLVVGTEAKLNKSAVLRKAIDYIRFLQHSNQKLKQENLSLRTAVHKSKSLKDLVSACGSGGNTDVLMEGVKTEVEDTLTPPPSDAGSPFQSSPLSLGSRGSGSGGSGSDSEPDSPVFEDSKAKPEQRPSLHSRGMLDRSRLALCTLVFLCLSCNPLASLLGARGLPSPSDTTSVYHSPGRNVLGTESRDGPGWAQWLLPPVVWLLNGLLVLVSLVLLFVYGEPVTRPHSGPAVYFWRHRKQADLDLARGDFAQAAQQLWLALRALGRPLPTSHLDLACSLLWNLIRHLLQRLWVGRWLAGRAGGLQQDCALRVDASASARDAALVYHKLHQLHTMGKHTGGHLTATNLALSALNLAECAGDAVSVATLAEIYVAAALRVKTSLPRALHFLTRFFLSSARQACLAQSGSVPPAMQWLCHPVGHRFFVDGDWSVLSTPWESLYSLAGNPVDPLAQVTQLFREHLLERALNCVTQPNPSPGSADGDKEFSDALGYLQLLNSCSDAAGAPAYSFSISSSMATTTGVDPVAKWWASLTAVVIHWLRRDEEAAERLCPLVEHLPRVLQESERPLPRAALHSFKAARALLGCAKAESGPASLTICEKASGYLQDSLATTPASSSIDKAVQLFLCDLLLVVRTSLWRQQQPPAPAPAAQGTSSRPQASALELRGFQRDLSSLRRLAQSFRPAMRRVFLHEATARLMAGASPTRTHQLLDRSLRRRAGPGGKGGAVAELEPRPTRREHAEALLLASCYLPPGFLSAPGQRVGMLAEAARTLEKLGDRRLLHDCQQMLMRLGGGTTVTSS

SEQ ID NO: 1739 - DNA, 4194 bp, Homo sapiens
agcagagctgcggccgggggaacccagtttccgaggaacttttcgccggcgccgggccgcctctgaggccagggcaggacacgaacgcgcggagcggcggcggcgactgagagccggggccgcggcggcgctccctaggaagggccgtacgaggcggcgggcccggcgggcctcccggaggaggcggctgcgccatggacgagccacccttcagcgaggcggctttggagcaggcgctgggcgagccgtgcgatctggacgcggcgctgctgaccgacatcgaagacatgcttcagcttatcaacaaccaagacagtgacttccctggcctatttgacccaccctatgctgggagtggggcagggggcacagaccctgccagccccgataccagctccccaggcagcttgtctccacctcctgccacattgagctcctctcttgaagccttcctgagcgggccgcaggcagcgccctcacccctgtcccctccccagcctgcacccactccattgaagatgtacccgtccatgcccgctttctcccctgggcctggtatcaaggaagagtcagtgccactgagcatcctgcagacccccaccccacagcccctgccaggggccctcctgccacagagcttcccagccccagccccaccgcagttcagctccacccctgtgttaggctaccccagccctccgggaggcttctctacaggaagccctcccgggaacacccagcagccgctgcctggcctgccactggcttccccgccaggggtcccgcccgtctccttgcacacccaggtccagagtgtggtcccccagcagctactgacagtcacagctgcccccacggcagcccctgtaacgaccactgtgacctcgcagatccagcaggtcccggtcctgctgcagccccacttcatcaaggcagactcgctgcttctgacagccatgaagacagacggagccactgtgaaggcggcaggtctcagtcccctggtctctggcaccactgtgcagacagggcctttgccgaccctggtgagtggcggaaccatcttggcaacagtcccactggtcgtagatgcggagaagctgcctatcaaccggctcgcagctggcagcaaggccccggcctctgcccagagccgtggagagaagcgcacagcccacaacgccattgagaagcgctaccgctcctccatcaatgacaaaatcattgagctcaaggatctggtggtgggcactgaggcaaagctgaataaatctgctgtcttgcgcaaggccatcgactacattcgctttctgcaacacagcaaccagaaactcaagcaggagaacctaagtctgcgcactgctgtccacaaaagcaaatctctgaaggatctggtgtcggcctgtggcagtggagggaacacagacgtgctcatggagggcgtgaagactgaggtggaggacacactgaccccacccccctcggatgctggctcacctttccagagcagccccttgtcccttggcagcaggggcagtggcagcggtggcagtggcagtgactcggagcctgacagcccagtctttgaggacagcaaggcaaagccagagcagcggccgtctctgcacagccggggcatgctggaccgctcccgcctggccctgtgcacgctcgtcttcctctgcctgtcctgcaaccccttggcctccttgctgggggcccgggggcttcccagcccctcagataccaccagcgtctaccatagccctgggcgcaacgtgctgggcaccgagagcagagatggccctggctgggcccagtggctgctgcccccagtggtctggctgctcaatgggctgttggtgctcgtctccttggtgcttctctttgtctacggtgagccagtcacacggccccactcaggccccgccgtgtacttctggaggcatcgcaagcaggctgacctggacctggcccggggagactttgcccaggctgcccagcagctgtggctggccctgcgggcactgggccggcccctgcccacctcccacctggacctggcttgtagcctcctctggaacctcatccgtcacctgctgcagcgtctctgggtgggccgctggctggcaggccgggcagggggcctgcagcaggactgtgctctgcgagtggatgctagcgccagcgcccgagacgcagccctggtctaccataagctgcaccagctgcacaccatggggaagcacacaggcgggcacctcactgccaccaacctggcgctgagtgccctgaacctggcagagtgtgcaggggatgccgtgtctgtggcgacgctggccgagatctatgtggcggctgcattgagagtgaagaccagtctcccacgggccttgcattttctgacacgcttcttcctgagcagtgcccgccaggcctgcctggcacagagtggctcagtgcctcctgccatgcagtggctctgccaccccgtgggccaccgtttcttcgtggatggggactggtccgtgctcagtaccccatgggagagcctgtacagcttggccgggaacccagtggaccccctggcccaggtgactcagctattccgggaacatctcttagagcgagcactgaactgtgtgacccagcccaaccccagccctgggtcagctgatggggacaaggaattctcggatgccctcgggtacctgcagctgctgaacagctgttctgatgctgcgggggctcctgcctacagcttctccatcagttccagcatggccaccaccaccggcgtagacccggtggccaagtggtgggcctctctgacagctgtggtgatccactggctgcggcgggatgaggaggcggctgagcggctgtgcccgctggtggagcacctgccccgggtgctgcaggagtctgagagacccctgcccagggcagctctgcactccttcaaggctgcccgggccctgctgggctgtgccaaggcagagtctggtccagccagcctgaccatctgtgagaaggccagtgggtacctgcaggacagcctggctaccacaccagccagcagctccattgacaaggccgtgcagctgttcctgtgtgacctgcttcttgtggtgcgcaccagcctgtggcggcagcagcagcccccggccccggccccagcagcccagggcaccagcagcaggccccaggcttccgcccttgagctgcgtggcttccaacgggacctgagcagcctgaggcggctggcacagagcttccggcccgccatgcggagggtgttcctacatgaggccacggcccggctgatggcgggggccagccccacacggacacaccagctcctcgaccgcagtctgaggcggcgggcaggccccggtggcaaaggaggcgcggtggcggagctggagccgcggcccacgcggcgggagcacgcggaggccttgctgctggcctcctgctacctgccccccggcttcctgtcggcgcccgggcagcgcgtgggcatgctggctgaggcggcgcgcacactcgagaagcttggcgatcgccggctgctgcacgactgtcagcagatgctcatgcgcctgggcggtgggaccactgtcacttccagctagaccccgtgtccccggcctcagcacccctgtctctagccactttggtcccgtgcagcttctgtcctgcgtcgaagctttgaaggccgaaggcagtgcaagagactctggcctccacagttcgacctgcggctgctgtgtgccttcgcggtggaaggcccgaggggcgcgatcttgaccctaagaccggcggccatgatggtgctgacctctggtggccgatcggggcactgcaggggccgagccattttggggggcccccctccttgctctgcaggcaccttagtggcttttttcctcctgtgtacagggaagagaggggtacatttccctgtgctgacggaagccaacttggctttcccggactgcaagcagggctctgccccagaggcctctctctccgtcgtgggagagagacgtgtacatagtgtaggtcagcgtgcttagcctcctgacctgaggctcctgtgctactttgccttttgcaaactttattttcatagattgagaagttttgtacagagaattaaaaatgaaattatttataatctggaaaaaa

SEQ ID NO: 1740 - protein, 1147 aa, Homo sapiens
MDEPPFSEAALEQALGEPCDLDAALLTDIEDMLQLINNQDSDFPGLFDPPYAGSGAGGTDPASPDTSSPGSLSPPPATLSSSLEAFLSGPQAAPSPLSPPQPAPTPLKMYPSMPAFSPGPGIKEESVPLSILQTPTPQPLPGALLPQSFPAPAPPQFSSTPVLGYPSPPGGFSTGSPPGNTQQPLPGLPLASPPGVPPVSLHTQVQSVVPQQLLTVTAAPTAAPVTTTVTSQIQQVPVLLQPHFIKADSLLLTAMKTDGATVKAAGLSPLVSGTTVQTGPLPTLVSGGTILATVPLVVDAEKLPINRLAAGSKAPASAQSRGEKRTAHNAIEKRYRSSINDKIIELKDLVVGTEAKLNKSAVLRKAIDYIRFLQHSNQKLKQENLSLRTAVHKSKSLKDLVSACGSGGNTDVLMEGVKTEVEDTLTPPPSDAGSPFQSSPLSLGSRGSGSGGSGSDSEPDSPVFEDSKAKPEQRPSLHSRGMLDRSRLALCTLVFLCLSCNPLASLLGARGLPSPSDTTSVYHSPGRNVLGTESRDGPGWAQWLLPPVVWLLNGLLVLVSLVLLFVYGEPVTRPHSGPAVYFWRHRKQADLDLARGDFAQAAQQLWLALRALGRPLPTSHLDLACSLLWNLIRHLLQRLWVGRWLAGRAGGLQQDCALRVDASASARDAALVYHKLHQLHTMGKHTGGHLTATNLALSALNLAECAGDAVSVATLAEIYVAAALRVKTSLPRALHFLTRFFLSSARQACLAQSGSVPPAMQWLCHPVGHRFFVDGDWSVLSTPWESLYSLAGNPVDPLAQVTQLFREHLLERALNCVTQPNPSPGSADGDKEFSDALGYLQLLNSCSDAAGAPAYSFSISSSMATTTGVDPVAKWWASLTAVVIHWLRRDEEAAERLCPLVEHLPRVLQESERPLPRAALHSFKAARALLGCAKAESGPASLTICEKASGYLQDSLATTPASSSIDKAVQLFLCDLLLVVRTSLWRQQQPPAPAPAAQGTSSRPQASALELRGFQRDLSSLRRLAQSFRPAMRRVFLHEATARLMAGASPTRTHQLLDRSLRRRAGPGGKGGAVAELEPRPTRREHAEALLLASCYLPPGFLSAPGQRVGMLAEAARTLEKLGDRRLLHDCQQMLMRLGGGTTVTSS

SEQ ID NO: 1741 - DNA, 2296 bp, Homo sapiens
gggggcaagtgtcagtcaggacgggagtccggcgggttacagcggaggcctaggtggcagacagggggcccgggccgctgcgtgttgtccacccaagatggagttcctcctggggaacccgttcagcacaccagtggggcagtgcctcgaaaaggcaacagatggctccctgcaaagtgaggattggacgttgaatatggagatctgtgacatcatcaatgagacggaggaagggccaaaggatgccattcgagccctgaagaagcggctcaacgggaaccggaactacagagaggtgatgctggcattaacagcatgggctgatgcctttcgaagcagtcctgatctcaccggcgttgtgcacatatatgaggagctgaagaggaaaggggttgaatttcccatggcagacttggacgctctgtctcccatacacacaccacagcggagtgtccctgaagtggatccagctgcgaccatgcccaggtcccaatcacagcagaggacaagtgctggttcctattcctcgccgcctcctgctccctactccgcaccgcaggccccagctctgagtgtgactggccccatcacagccaattcagaacagattgccaggctgcggagtgaactggacgtcgttcgaggaaacacaaaagtcatgtctgagatgttaacagaaatggtccctggacaggaggattcatctgatctggagttgctgcaggagctcaacaggacctgtcgggccatgcagcagcgcatcgtggagctcatctcccgcgtgtccaatgaggaggtcaccgaggagctgctgcatgtgaacgatgacctcaacaacgtcttccttcgatacgagaggttcgaacgatacaggtctggccgatccgttcaaaatgccagtaatggagtactgaatgaagtaaccgaagacaacttaatagacctggggccagggtctccagccgtggtgagcccaatggtggggaacacagcgcccccatcttccctctcctcccagcttgcaggcttagacttggggacagagagcgtcagtggcaccctcagttcactccagcaatgtaatccccgtgacggctttgacatgtttgcccagacgagaggaaactccttggctgagcagcgcaagacggtaacctatgaggatcctcaggctgtcggaggacttgcttctgcactagacaatcgaaaacagagttcagaagggatccccgttgcgcagccatctgtcatggacgacattgaggtgtggctcaggaccgacctgaagggtgatgatctggaggagggtgtcacaagtgaagagtttgataaattccttgaagaaagagccaaagctgctgaaatggttcccgacctcccctcgccccccatggaggctcctgccccagcctcaaacccttctggccggaagaagccagagcggtcagaggatgccctcttcgccctgtgagcagctctgtggtttgcctccccagatggcgggtccccgctcgcaccccgtggacaccgggcactggccactcctacatccccagctccacacggcctgcacacctgtgtttccatggaaatgccaccgtgtctgctcccaggcctcccactagtcaggaccagcttcagccacttcttttctctgagtggtgggacaactgcagccagagactctctcccctcccaccatgggcccctctgcccatgtttcctcccaggaagagcgggcagagtggcccagccccaggcagtgcttcctgagcagaccacccggactgtctttcctccacccgcccatggagaaagagcacgcccggccccgccctgtgctcacctctgcctggctcagcgaccttctcaggcattctgccctcctgggcccctctctccctgaaggggctttgtggcatctctggaagagcagggtgtgctgcactcatgggcctggtctcactccttggacttgtcaccttgtgacatttggcttatcagcatttgagaaggctctgctgggtctccatggtgggggtctctcaccttcttgaccctctctccatcattcagctgccagcccaggcttcacacccaagctggctcagcagccgagcctggcaccgagggtccctgcaggctccctgggcagggagagggccaaggacaattgggagggcagcaggcagcccgcagatggtggccatgtggcacgctgctgagacgacactaccaataaaccaaactgccacgcacacactgcaggctcacacccgcaaaaaaaaaaaaaaaa

SEQ ID NO: 1742 - protein, 457 aa, Homo sapiens
MEFLLGNPFSTPVGQCLEKATDGSLQSEDWTLNMEICDIINETEEGPKDAIRALKKRLNGNRNYREVMLALTAWADAFRSSPDLTGVVHIYEELKRKGVEFPMADLDALSPIHTPQRSVPEVDPAATMPRSQSQQRTSAGSYSSPPPAPYSAPQAPALSVTGPITANSEQIARLRSELDVVRGNTKVMSEMLTEMVPGQEDSSDLELLQELNRTCRAMQQRIVELISRVSNEEVTEELLHVNDDLNNVFLRYERFERYRSGRSVQNASNGVLNEVTEDNLIDLGPGSPAVVSPMVGNTAPPSSLSSQLAGLDLGTESVSGTLSSLQQCNPRDGFDMFAQTRGNSLAEQRKTVTYEDPQAVGGLASALDNRKQSSEGIPVAQPSVMDDIEVWLRTDLKGDDLEEGVTSEEFDKFLEERAKAAEMVPDLPSPPMEAPAPASNPSGRKKPERSEDALFAL

SEQ ID NO: 1743 - DNA, 1917 bp, Homo sapiens
aagtgtcagtcaggacgggagtccggcgggttacagcggaggcctaggtggcagacagggggcccgggccgctgcgtgttgtccacccaagatggagttcctcctggggaacccgttcagcacaccagtggggcagtgcctcgaaaaggcaacagatggctccctgcaaagtgaggattggacgttgaatatggagatctgtgacatcatcaatgagacggaggaagggccaaaggatgccattcgagccctgaagaagcggctcaacgggaaccggaactacagagaggtgatgctggcattaacagtgctggagacatgtgtgaagaactgtggccaccgcttccacatccttgtggccaaccgagatttcatcgacagtgttctggtcaaaattatatctcccaagaacaaccctcccaccattgtacaggacaaagtgcttgctctgatccagagtgtccctgaagtggatccagctgcgaccatgcccaggtcccaatcacagcagaggacaagtgctggttcctattcctcgccgcctcctgctccctactccgcaccgcaggccccagctctgagtgtgactggccccatcacagccaattcagaacagattgccaggctgcggagtgaactggacgtcgttcgaggaaacacaaaagtcatgtctgagatgttaacagaaatggtccctggacaggaggattcatctgatctggagttgctgcaggagctcaacaggacctgtcgggccatgcagcagcgcatcgtggagctcatctcccgcgtgtccaatgaggaggtcaccgaggagctgctgcatgtgaacgatgacctcaacaacgtcttccttcgatacgagaggttcgaacgatacaggtctggccgatccgttcaaaatgccagtaatggagtactgaatgaagtaaccgaagacaacttaatagacctggggccagggtctccagccgtggtgagcccaatggtggggaacacagcgcccccatcttccctctcctcccagcttgcaggcttagacttggggacagagagcgtcagtggcaccctcagttcactccagcaatgtaatccccgtgacggctttgacatgtttgcccagacgagaggaaactccttggctgagcagcgcaagacggtaacctatgaggatcctcaggctgtcggaggacttgcttctgcactagacaatcgaaaacagagttcagaagggatccccgttgcgcagccatctgtcatggacgacattgaggtgtggctcaggaccgacctgaagggtgatgatctggaggagggtgtcacaagtgaagagtttgataaattccttgaagaaagagccaaagctgctgaaatggttcccgacctcccctcgccccccatggaggctcctgccccagcctcaaacccttctggccggaagaagccagagcggtcagaggatgccctcttcgccctgtgagcagctctgtggtttgcctccccagatggcgggtccccgctcgcaccccgtggacaccgggcactggccactcctacatccccagctccacacggcctgcacacctgtgtttccatggaaatgccaccgtgtctgctcccaggcctcccactagtcaggaccagcttcagccacttcttttctctgagtggtgggacaactgcagccagagactctctcccctcccaccatgggcccctctgcccatgtttcctcccaggaagagcgggcagagtggcccagccccccctgggcagggagagggccaaggacaattgggagggcagcaggcagcccgcagatggtggccatgtggcacgctgctgagacgacactaccaataaaccaaactgccacgcacacactgcaggctcacacccgcaaaaaaaaaaaaaaaa

SEQ ID NO: 1744 - protein, 462 aa, Homo sapiens
MEFLLGNPFSTPVGQCLEKATDGSLQSEDWTLNMEICDIINETEEGPKDAIRALKKRLNGNRNYREVMLALTVLETCVKNCGHRFHILVANRDFIDSVLVKIISPKNNPPTIVQDKVLALIQSVPEVDPAATMPRSQSQQRTSAGSYSSPPPAPYSAPQAPALSVTGPITANSEQIARLRSELDVVRGNTKVMSEMLTEMVPGQEDSSDLELLQELNRTCRAMQQRIVELISRVSNEEVTEELLHVNDDLNNVFLRYERFERYRSGRSVQNASNGVLNEVTEDNLIDLGPGSPAVVSPMVGNTAPPSSLSSQLAGLDLGTESVSGTLSSLQQCNPRDGFDMFAQTRGNSLAEQRKTVTYEDPQAVGGLASALDNRKQSSEGIPVAQPSVMDDIEVWLRTDLKGDDLEEGVTSEEFDKFLEERAKAAEMVPDLPSPPMEAPAPASNPSGRKKPERSEDALFAL

SEQ ID NO: 1745 - DNA, 1686 bp, Homo sapiens
ataaaggtctctggggttggaggcagccacagcatgctcttagccttcctgagcaccttcccttttttcagccaactgctcgctcgctcacctccctccttggcacgatgagcacctgcagccaccagttcacctcctccagatccatgaagggctcctgcagtatcgggggcagcatcgggggcggctccagccgcatctcctctgtcctggccggagggtcctgccatgcccccagcacctactggggggcctgtgtgtctccttctctcgcttctcctttgggggagcctgcgggctggggggcggctatggcggtggcttcggcagcagcagcagctttgctagtggctttgggggaggatatggtggtggccttggtgctggcttcggtggtggcttgggtgctggcttgggtggtggctttgctggtggtgatgggcttctggtgggcagtgagaaggtgaccatgcagcacctcggtgaccgcctggcctcctacctggacaaggtgcgtgctctggaggaggccaacgccgacctggaagtgaagatccgtgactggtaccagaggcagcggcccagtgagatcaaagactacagtccctacttcaagaccatcgaggacctgaggcacaagatcattgcggccaccattgagaatgcgcagcccattttgcagattgacaatgccaggctggcagctgatgacttcaggaccaattaggagcacgagctggccctgcggctgactgtggaggctggcgtcaatggcctgtgccgggtgttggacgagctgaccctggccaggactgacctggagatggagatggaaggcctgaaggaggagctggcctacctgaggaagaaccacgaggaggagatgcttgctctgcgaggtcagaccggtggagaagtgaacgtggagacggatgccgcacctggcgtggacctgagctgcatcctgaatgagatgcgcaaccagtacgagcagatggcaaagcacaaccacagagatgctgggcctggttcctgagcaagaccaaggagctcaacaaaaaagtggcctccagcagtgaactggtacagagcagccgcagtgaggtgacggagctccagagggtgttccagggcctggagatggagctgcagtcccagctcagcataaaagcgtccctggagaacagcctggaggaaaccaaaggctgccactgcatgcagctgtcccagatccagggactgattggcagtgtggaggagcagctggcccagctacgctgtgagatggagcagcagagccgggagtaccagatcttgctggacatgaagacacggctggagcaggagatcgccacctaccgctgcctgctggagggcgaggacgcccacctttcctccccacacgcatctggccaatcctgttcttcccgagtggtcttcacctcctcttcgtcctcttcgagccgtcagacctggcccatcctcaaggagcagggctcatccagcttcagccagggccagtgctcctagaactgagctgcctctaccacagcctcctgcccaccagctggcctcacctcctgaaggcctgggtcaggaccctgctctcccagtgcagttcccagctgtctccctgctcctctactggtgatgggctaataaagctgactttctggttgatgcaaa

SEQ ID NO: 1746 - DNA, 557 bp, Homo sapiens
ctttatttaatgaaccgttggtggatacttaccttggttccatgaccttgctgttaagttgaactaattgacacctaccaccgcttgctggaggttgaggacgcccagtgagtgtgcacccgggctggagaaggcaggaggtatggcccggaaaagagacacagaaaggtggatgatgcccacctggctgccgatgacttctgcaccaagtgaggctgggtctctggagctgccccaggggctggacaagctgaccctgcctggagccaacctggagatgcagcctgagaacctcaaggaggacctggtctacctgaagaagaaccatgaggaggtgagttcagctcagggaatgcagcagaaattcacctggaagcaagcgaggctggggcccagaacctccctgggctgggccatgcttccagtccagttcccatcctttatggatgcctagcactgaccctcagaggaccctgggtgaggcctggaggagccctcttctcaaatagacttcatttgtcccttgaggctcagctcactgcagttaactaactaat

SEQ ID NO: 1747 - protein, 103 aa, Homo sapiens
MARKRDTERWMMPTWLPMTSAPSEAGSLELPQGLDKLTLPGANLEMQPENLKEDLVYLKKNHEEVSSAQGMQQKFTWKQARLGPRTSLGWAMLPVQFPSFMDA

SEQ ID NO: 1748 - DNA, 2088 bp, Homo sapiens
tggtttgtttgcttgcttgttttttagagagacagggtctcattctgtcacctcagctggaattcagtgttgtgatcctcacccactgcagccttcaactcctgagttcaagcgatcctcccacctcagcctcctgagtagctgggactgcaggcacatgccaccatgcctgttaaattttttgatttttttttttcagaatgggggtctcactccattgcccaagctggtctcaaactgttagcctctagtgatcctcccaccttgggctcccaaagagctgggattacaggtgtgagccactgtacccaggcaaaagataactttggaacaccacctgagaatgttacttacaatgaatcctgtcctcattctcatttacttatttggatggagtttcctgaaatttgtctcactatcatctaggatcctttttctttctccaactgggagattgtgtctggtttggaaactgcaagccctgttcaggaaaagggaaaagacccaaggcacacacccagtccccaggtgatcatcaggcccaggtgaaaactcaggccttaggtgcacctccggcctcaggtggacacccaggccccaggtgatcaccagtccccaggtggacacaaggccttaggtgaacaacaagacccagtaggccatcaggccccagctggatacagtccccaggtgaacacaaggccccaagagggacataggccaaggcagacatcaggccccaggtggacatcaggcctgaggacgacatctggcccctggtgaacatcaggcacaggtgtccaagcagagcctgggtggacataactgtgtacgggtcaggagatgacctgaggggagggtgagtagtcagtaacccagtggagtcctgagtaggcttatggaaggaaggggcctaggggacagaaccgtaaagaagcgacctcacttcctcgatgatgacacacacgaagagaacttagaactctggtaaccaggcacccatatcctagagtcagcgccgtaaccagctcactttgtgggagacgctcaagagagcaagatgttctcctgttgcttccccacttcgagaggttgctgcttcaggaatggagggagtgagagccttttccgacaatgccgaagaaggctcatccctcaccccagacgcctgtggccctttgtaagaaggcgcacccaggtaccacaggacagcccggggcaggccctagctggccaggccacaccagagatcccatcggggctgcctctgcacattgtccttgtccaggaggagattcgggagcccatggaggcacagacacatgctcctggtccgtacgcagacatagcagcacttgcggcaccggctgtcgagccaaagccagcatgggaagagccccctccagagagagcgctggaggtggagggagctccagccaaggaccagcccagccaggagctgcctgaaatcatggcacctactgtagccactggccttaatgctggagctgaaaacgtggctggagagagaagtgggagggagggggtgacaagcacagccccagccagcagatcccatgctgcccctagtcctgggcatggtggcaaacatggaggcggagaccagggcattcagactggactcctgtacctcgctggagagaggcttctctcattcgccggaaccacagccctgctgctgcagggcctgtttattgtgctaattctggtggggtatatctctgtgaaggtgatgctcaagagcattaaaacaaggctgggaagaagagttccagcagctcctcctgctctcagacgcaatcttctcctccaggcatggaagtgtgtctgcaactgggcatccaggctgtttgcccctaatgtgctgccccgaacgggctcttaacaggtgggcaggggttgaggggaccaggaggtggctccaaagggtacagcaaggaaagcttttaaagacagctgttgtgctccaggctctccatgccaccacctgccctagcatttattaatagtgttagaattacaagtttatgaaatgaaatataaataaagtttgatttctgaaacttc

SEQ ID NO: 1749 - protein, 110 aa, Homo sapiens
MPKKAHPSPQTPVALCKKAHPGTTGQPGAGPSWPGHTRDPIGAASAHCPCPGGDSGAHGGTDTCSWSVRRHSSTCGTGCRAKASMGRAPSRESAGGGGSSSQGPAQPGAA

SEQ ID NO: 1750 - DNA, 3044 bp, Homo sapiens
atggcaggtgccccaggccatacggtggagcgtgaacaggcctccgggaaacatcttccatcagccaaaccctcctgctgccttattgaagaagtccctcttcaggctcttctgctcacgtctctgaatctctccttggcaaaggctcacgtgggctctggcaccggcgtcatgcggaggacaatgaagggcagccgggcatcttggggtgactcccggagccccgcctgcacccaggccggctcttcctgcacagtggccctgcctgaggctgctttccaccagcaggaatcgaaactgatctggatgagaacacgtgttgagactgaactaaagttaatctgtggcgacctgctggatgcactggacaagcacctcattcagcagctgacgctggcaagtccaaggttttctattatgaaatgtaggttctatactagaaaggaaaatgcaatgatagtaggaaatgctaaagatacagctcatacaaaagcagaatggaatattctggaagaagtaaagcatcccttcatcgtggatttaatttatgcttttcagactggtggaaaactctacctcatccttgagtatctcagtggtcagtacacagagtttggagaactatttatgcagttagaaagagagggaatatttatggaagacactgcgtgcttttacttggcagaaatctccatggctttggggcatttacatcaaaaggggatcatctacagagacttgaagctggagaatatcatgcttaatcaccaaggtcatgtgaaactaacagactttggactatgcaaagaatcattcatgacggaacagtcacacacacattttgtggaacaatagaatacatggcccctgaaatcttgatgagaagtggccacaattgtgctgtggattgttggagtttgggagcattaatgtatgacatgccaactggagcacctccatttactggggagaatagaaagaaaacaattgacaacatcctcaaatgtaaactaatttgcctccctacctcacacaagaagccagagatctgcttaaaaagctactgaaaagaaatgctgcttctcatctgggagctggtcctggggatgctggagatgttcaagctcatccattctttagacacattaactgggaagaacttctggctcgaaaggtggagcccccatttaaacctctgttgcaatctgaagaggatgtaagtcagtttgattccaagtttacacgtcagacacctgtcgacagcccagatgactcaactctcagtgaaagtgcccatcaggtctttctgggttttacttatgtggctccatctgtacttgaagtgtgaaagaaaagttttcctttgaaccaaaaatccgatcacctcgaagatttattggcagcccacgaacacctgtcagcccaattttctcctggggatttctggggaagaggcgcttcggccagcacagcaaatcctcagacacctgtggaatacccaatggaaacaagtggcacagagcagatggatgtgacaacgagtggggaagcattggcaccacttccaatacgacagccgaactctgggccatacaaaaaacaagcttttcccatgatctccaaacggccagagcacctgcgtatgaatctatgccacagcaatgcttttaatgaatttaaggcaaaaaaggtggagaggccgatgtgtgagcatcctacagggtgaaacaagactcaaagtgacaatttcagagagtcagtgtcattacatagaacactttggacagaggaaaaataaacatggattttaaaaaaatcaatcaatcgtgcaaaaaaacttaaagcaaaatagtactgctgaacactcaggcacatcaattaattgtttcctcgtgacatcttctcaaccttatcaaggattttcatgttgatgactcgaaactgacagtattaagggtaggatgttgcttctgaatcactgttgagttctaactgtgtcgaagaagggttatcctttcattaggcaaagtacaaaattgcctataatacttgcaactaaggacaaattagcatgcaagcttggtcaaactttttccagcaacatggaatcaaagacaaaagaaacttaccaattgatgttttacgtgaacataacctgaatctttttttatataaatatatatttttcaagtagatttttgattcagctcattatgaaaaacatcccaaactttaaaatgcgaaattattagttggtgtgaagaaagccaaacaacttccgtttcttctcttggtgaaataataaaatgcaaatgaatcattgttaaccacatctgtggctcgttcgagggactggggtggacctggggtttattttcagtaacccagctgcaatactcgtctgtaatatgagaaaaaaaaagaatctatttaatcatttctacttgcagtactgctatgtgctaagcttaactggaagccttggaatgggcataagttgtatgtcctacatttcatcattgtcccgggcctgcattgcactggaaaaaaaatcgccacctgttcttacaccagtatttggttcaagacgccaaatgtgttcagcccatggctgaagaacaacagaagagagtcaggataaaaaatacatactgcggtcggcaaggtgagagagatagggatatccaggggaagagggtgttgctgtggcccactctctgtctaatctcttcacagcaaattggtaagattttcagttttatttctttctactgtttctactgtctaccttccttatatttttctcctcaacagttttaaaaagaaaaaaaggtctatttttttttctcctatactggggctacatttttttattgtaaaaatatttgatggccttttgatgaatgtcttccacagtaaataagaaaacttagtggcttcatttaggaaacatgttaacaggacactatgtttttgaaattataaccaaatctacataaatgatttacaggtacaaagaataaaagtaaaggtaactttacctt

SEQ ID NO: 1751 - DNA, 1975 bp, Homo sapiens
atgtataagtcagagtctcctaaagagcctgaacaactgaggaagctcttcgttggacggttgagctttgaaacaactgatgagagcctgaggagccactctgagcaatgggaacgctcacggactgtgtggagacagagccctgaagcaaagacatgtgggtcagagaaaaagtatttaagggccacgcaagccaatcgtagccaactgcgcagtcctccaggaactgaaagcagtgaggatgcctcagcccctcactgtgtccacacaagattgacagaagaaggttcttgtcttcattctggagatgttcatatccagataaatgccatatctaaagaatgtgcggaaaatacaagctccagaaatataaggtcagatgtccatagctgtgcccatggatgggtacacagtcacttacagggtcactcccacagtgaagcaaggctgcctgatgatactgccgcagaatctggagatcacggtagtagctcttcaagtggttgcaaaaaagtcttccacatattttgattctgagtgtcaaacttgttatgcagcatataacaggaatttctcttggaattgggctgctaacaacttttatgtatgcaaacaaaagcactgtaaatcaggtttttctaagggaaaggtcctcaaagattcagtgtgcttggttactggtattcttagcaggatcttctgttcttttatattacacctttcattctcagtcactttattacagctgaatttttttatatcctattttggaccatttgagcttctgggaagtactttggattattggaattacagacttcattctgaaattctttttcatgagcttaaaatgccttatcttattggtgccttctttcatcatgccttttaaatctaagggttactggtatatgcttttagaagaattgtatcaatactaccgaacttttgttcccatactagtttggtttcactaccttataagctatggggagtttggtaatgtaactagacggagtcttaggatattgctggctttactttacctcgtactaaaacttttggaattttttgggcatctgagaactttcagacaggttttacgaatattttttacatgaccaagttatggagtggctgccagcaagagacagtgttcagatgtggatggtacttgttcaatatgtcaagctgaatttcagaagccaattcttctcatctgtcagcatatattttgtgaagagtgcattaccttatggtttaacagagagaaaacatgtccactctgcagagctgtgatttcagaccatataaacaaatggaaagatggagccacttcatcacaccttcaaaattattaagttgtataaactattaaggccacaaaatactaatgtcatttggtcataatgactaccgataaggcatcagaatggattttcggggctaccagaaaaatgtttccagatggttttagaatgtaagacttaacggtccaattcaccaaaagattaaatgaaaccaccctgtgttttaaaatatatataatgttcaacctaatgtatatgcaacattctattctaattatttgacaggtaactgcagtgttaaattgtaaatgtgttttcttaatattaccaaaacagcaatttgaaactagaactagtggttttagagaactcaggtattctttccagcattgttttcagaataaagaatatttttcataatattttaagatacatactatctaaaagtagaattctgctttcagcattgactttttaattcccatcctaaaaattcttaatattttcataaaatttgtatttttaaatgaaagttctaaatgttatattttatcagtaacagattttctaagtgaagattaatttaccgaggatgatacattttaatattgtattattctctgtagtatgactagtaatcagtgaaaataaatgatttaaattca

SEQ ID NO: 1752 - DNA, 3750 bp, Homo sapiens
aggggccgggtggtgtggtgtcggtgtcggcagcatccccggcgccctgctgcggtcgccgcgagcctcggcctctgtctcctccccttccagccctcacctccacgcgggaccgctcgcgccagtcaactccgcgcacgttgcccctgcttggcagccaataaaagggggctgaggaaataccggacacggtcacccgttgccagctctagcctttaaattcccggatcgggcacctccacgcaccgcggctagcgccgacacccagctagcgtgcaaggcgccgcggctcagcgcgcaccggcgggcttcgaaatcgcagtcctccggcgaccccgaactccgccccggagcctcagcccctggaaagtgatcctggcatccgagagccaagatgccggcccacttgctgcaggacgatatctctagctcctataccaccaccaccaccaccattacagcgcctccttccagggtcccgcagaatggaggagataagttggagacgacgcccctctacttggaagaagacattcgccctgatataaaagatgatatatataacctcacctacaaggataaggaaggcccaagccccaaggttgaatatgtctggagaaacatcatccttatgtctctgctacacttgggcgccctgtatgggatcactttgattcctacctgcaacttatacacctggctttggggggtattctactattttatcagtgccctgggcataacagcaggagctcatcctctgtggagccactgatcttacaaagctcggctgtccctgtggctctttctgatcattgccaacacaatggcattccagaatgatgtctatgaatgggctcgcgaccaccgtgcccaccacaagttttcagaaacacatgctgatcctcataattcctgacgtggctttttcttctctcacgtgggttggctgcttgtgcgcaaacacccaactgtcaaagagaagggcagtacgctagacttgtctgacctagaagccgagaaactggtgatgttccagaggaggtactacaaacccggcttgctgttgatgtgcttcatcctgcccacgcttgtgccctggtgtttctggggtgaaacttttcaaaacagcgtgttcgttgccactttcttgcgatatgctgtggtgcttaatgccacgtggctggtgaacagtgctgcccacctcttcagatatcgtccttatgacaagaacattagcctccgggagaatatcctggtttcacttggagctgtgggtgagggctttcacaactaccaccactcctttccctatgactactctgccagtgagtaccgctggcacatcaacttcaccacattcttcattgattgcatggccgccttcggtctggcctacgaccagaagaaagtctccaaggccgccatcttggccaggattaaaagaaccggagagggaaactacaagagtggctgagtttggggtccctcaggttccttcttcaaaagccagccaggcagaggttttaatgtctgtttattaactactgaataatgctaccaggatgctaaagatgatgatgataacccattccagtacagtattcttttaaaattcgaaagtattgaaagccaacaactctgcctttatgatgctaaactgacattatttcttctcttatcctctctctcttctaggcccattgtcctccttttcactttgttgctatcatcctcctttctcttattgccacccaggcaagcagctggtcagtctttgttcagtgtccagcttccaaagcctagacaacctttctgtagcctaaaacgaatggtctctgctccagataactctctttccttgagctgttgtgagctttgaagtaggtggcttgagctagagataaaacagaatcttctgggtagtcccctgttaattatcttcagcccaggcttttgctagatggaatggaaaagcaacttcatttgacacaaagcttctaaagcaggtaaattgttgggggagagagttagcatgtatgaatgtaaggatgagggaagcgaagcaagaggaacctcttgccatgatcagacatgcagctgcctacctagtgaggacttcaagccccaccacatagcatgcttcctttctctcctggcttggggtaagaagtggctgtggtgtttggcaatgctaattcaatgccgcaacatatagtttaggccaaggataaagaagagacactttaagtttgtagtaaaagtggtctctgctggggaagggttttcttttctttttttctttaataacaaggagatttcttagttcatgtatcaagaattcttgaagttgggtgtttccataattggtaaaaacagcagctcacagaattttgagtattccatgagctgctcatcacagttctttcctctttctgctctgccatcttcaggatattggttgttcccctcatagtaataagatggctgtggcatttccaaccatccaaaaaaagggaaggattttaggaggtggagtcgggtcaaacaagaaatatatatatacatatatacattgcttagaacgttaaactattagagtatttccctcccaaagagggatgtttgaaaaaactctgaaggagaggaggaattagttgggatgccaatttcctctccactgctgtacatgagatggggaggttgagggacaggatctataggcagcttctaagagcaaacttcacacaggaagggatctgagaacacattgccgggggcttgagaaggttactgagtgagttattgggagtcttaataaaataaactagatattaggtccattcattaattagttccagtttctccttgaaatgagtaaaaactagaaggcttctccccacagtgttgtgccccttcactcattttttattggcggggtggggggctctgttaacatctagcctaagtatagaactgcctggggggcagggttaggaatctcttcactaccctgattcttgattcctggttctaccctgtctgtcccttttcttttactagatctttctcttccctgaacgttttcttctttccctggacaggcagcctcctttgggtgtattcagaggcagtgatgacttgctgtccaggcagctccctcctgcagacagaatgctcagggtcactgaaccactgcttctcttccgaaagtagagctagctgccactttcgcatggcctccggagtgtctccacctacacctctgtgctcccccgccacactgatggctcaagacaaggctggcaaaccctcccagaaatgtctctggcccagaaagcctctctctccctccctctctcatgaggcacagccaagccaagtgctcatgagccagtgggcctgccacagagcaaacgagggtttattttcagtcccctctctctggatcagaaccagagagcatgctgaatgcccctctgcttgctcggtaagggtgccccacctgaatcagtgctctcagctggcagtgcaatgcttgtagaagtaggaggaaacagttctcactgggaagaagcaagggcaagaacccaagtgcctcacctcaaaaggaggccctgttccctggagtcagggtgaactgcaaacctttggctgagacctgggatttgagataccacaaaccctgctgaacagagtgtctgttcagcaaactaaccagcattccctatagcctagggaatagtatag

SEQ ID NO: 1753 - DNA, 1489 bp, Homo sapiens
cacaggagctgcggcggtggcggtgcaggaggccgggcaggggtgcggagggaccgacggacgcacgggcgggcggccgggagccatggagcgcggccctggggcccgggggcgcgggccggggtgggcttcccacggcacgacatggagacctgtggttgcgaggctccctggggctcggcttggaccgcgatggggctgggccctggcctcctaacggggctgctgtctggggcggtagctgcgggggcgctctcccctctgcccgcgactcggagcacccccacccctcccctgccgggccaggccgggcggcgttgttggcgggggccccggtggaggcccggcccaggcggcgcccgccatgaacgggctgtcgttgagtgagctctgctgcctcttctgctgcccgccctgccccggccgcatcgctgccaagctcgccttcctgccgccggaggccacctacaccctggtgcctgagcccaagccggggcctggtggggccgggaccgcccccttggggaccctgcgggcctcctcgggcgcaccgcacccgggcgcaggaagctgcacctgacggagcataccgacttccagtacagccagcgcgagctggacaccatcgaggtcttccccaccaagagcgccagcggcaaccgcgtctcctgcatgtatgttcgctgcgtgcctggtgccagcttctacattggcctgggctcccgcctccactgcaacatcttctcctacgactactccggctacgatgccagctcgggcaggccttccgagaggaacctctatgccgacatcgacgccgcctggcaggccctgcgcaccaggtacggcatcagcccggacagcatcatcctgtaccggcagagcatcggcacggtgcccaccgtggacctggcctcgcgctacgagtgtgccgcggtggtgctgcactcgccgctcacctcgggcatgcgcgtcgccttccctgacaccaagacgacctactgcttcgacgccttccctaacatcgagaaggtgtcctagatcacgtcgcccgtgctcatcatccacggcacggaggacgaggtgatcgacttctcgcacgggctggcgctctacgagcgctgccccaaggcggtggagccgctgtgggtggagggcgccgggcacaacgacatcgagctctacagccagtacctggagcgcctgcgtcgcttcatctcccaggagctgcccagccagcgcgcctagcggcggccccaaccggccggacctcagcaataaggcggcccccggacctcaccccgcgccggccccccaggggctgcatgtggaccccccgggcggcccgggggaccccgccccgacccaggggctgtggacgatgtacaggcaacagagctacgcactcctttccttttggaagcaagaagaaaatacgtgaaaacggaaattaaagatttaaaattaaaaaaaaaaaaagaaatcaaga

SEQ ID NO: 1754 - DNA, 2838 bp, Homo sapiens
gcttggcgtggcagtgatcgcttggcttggcatttctggcttagcggtcctcctttcgcagattggaaaccgcgggctatcctgctgggaggttgtggccgaggcagtagctcgctactgatggcctcctggggtggagaaaagcggggaggggctggggggtctccgaagccggcagtctacgccacgaggaagacccctagtgttgggagccaggaggaccagtggtacttggactacccgggggaccagtggtccttgggcttctcctacagctggtggaagaacagcgtcggcagcgagagcaagcacggtgagggcgccttagaccagctccagcacgatgtccgcctggaagatcttggcgagctccacagagctgcccggtcgggcgacgtccctggggtggagcacgtcttggctcctggagacactggcgtggacaagagggataggaagaagagcattcagcaactagttcctgaatataaggaaaaacagacacctgaaagtcttcctcaaaataacaatccagctgctccaagccaggctgaaggaggagaaggaggagtcgcctgtggtacggtggagcagatgacgtggctctgcagcttgcctcatgcagttggtggtggagatggagaccacagctcgactggagcggtaggagggcacccacgggggcctggagagtattgtcatctgcatgagcaaagagttcatcaccacatctttgcaagaggaaaaagaaaggggaagaatcatgtgtctaatgttgtaaggtaaacattcacaaccaaaaacaaggttttattaacttttgcctttaagaacctgcagtgtttagccctctttgattcctagtattattacctttggtatgaactcttttattaaactgatcactctagaggtttatgcattttgtatcatttttcaagccaacagaaatgtgtaatgcctataattctgacactttagttatttttaaggctatgagcatgtaagatactgttggaagaatatgtataaataccactaggtagcttattttgaagagatagtatctaaatttttgtccagagtagattggttgcagtttcttaggtgtgtttcttaatacgttgcctcaatgttttaaagcatgtagaaatttgaatacagtttaacttcatatagtcctttgtttatagatttaatatttctaaagactaaagacatcacagctccctttaagattcagtaatattaataaaattttagaaatatagggttagaatccaacaaattcagaggaaaattgttaaattctatagctgtagagcagaaatgaaacccaggttctaagctctaagggggccatgaggtaccatacaggtgcatcagtgactgggcatagattcagcaaaattacaggatggttaagagagtgagctgtggagccaaactctatgtaacatgaatttttaaactgcctggtgcctcagtttatccatctttacagtggggactgtagtaagtttttctttttctgctcagttgtctgtcttgttgccactgttccctagtctgtcttgttgccactcagtgcccacatgagaggatctacggtaatttctgacagcctgggactccttaaagaaaaacagaaggtgctacaaaacccattttaggagaaacctctgttgtcctcatggaaccccaagaacttcaggcagacaggtctctctcaaaatctaaggctctcctctgttttgttttgcgttatctgaccttttaggtttggttgggcatcagaaatcagtcggggagagagatctaaagaaagttgtggatatgaagatgtatttatggtaaaaaagttatgaaggaaagaaatgttatatgagagaggatcttgtatggcaaattcttgtcctaaagtagaatgactaattatgaaagagggaaatacaggaaaagtcagaaagttcatgtcatagatggtctgtggaagttgtgctagggttcataaaatgagaaagaaaaacttacaactgctagatcttctcctgtctaggagtgttgtgtatgtgatggatatgtaaaggagccctaattacttggcttagaagaaaaggacggctcttaaatattttgtcagaaaaatagaatctccaatgccttttatttcacatgacttcagtaatctttgggaaataaagacagtgttaaaatcattggtaaaaaaaatcatcaaaatttatccattttgtctaatttaagtcagaggttaaattttagaagtgctttaacgtcataaattgattgactttggaaaattgttctgtttacctggtttggagctgctcaacttctaggtaaggcctgggggacaggtggagttagccatgtctcctagctatgctggaaagagtcagactttacctgcagttctgtcttgtatcctatacactgcacctggtacgttattaaaacttcctgctgcttctaatctctgagttccactttaaatttttccatcacttgaatactatcctctgtactaaatttttccgcaattaaatacttagaatcatttttgcccacttgacccaagcattagtgatatatctttaaaatacttataatgtgtcacaatatatttagcaaatgtagcgaatggcatttttacttttgtcagcatttacatagcatttagcaatgctatctcaagtatttttagtcatttgaatgttacataatatgcttttcctttgtttctatgtaaataaataggagatattcaataaatagtatcaattaaaaaaaaaaaaaaaaagaaaaaaaaaaaaaaaa

SEQ ID NO: 1755 - protein, 221 aa, Homo sapiens
MASWGGEKRGGAGGSPKPAVYATRKTPSVGSQEDQWYLDYPGDQWSLGFSYSWWKNSVGSESKHGEGALDQLQHDVRLEDLGELHRAARSGDVPGVEHVLAPGDTGVDKRDRKKSIQQLVPEYKEKQTPESLPQNNNPAAPSQAEGGEGGVACGTVEQMTWLCSLPHAVGGGDGDHSSTGAVGGHPRGPGEYCHLHEQRVHHHIFARGKRKGKNHVSNVVR

SEQ ID NO: 1756 - DNA, 1755 bp, Homo sapiens
atgtgctaccgtggggcttttgtcctgggctggagtgtggtcctcttgatcctagaaaagaggccgctcaggatggggatgagacttccattgctccggccagacgcatcccctcaggtgatcgaggccttcacagacccaaagcggaaccgccgcgaaaacgatcgacagccggccacaggacccagggaaagacgcagaaagaggctcaccaaagaccgaccgacatatgcctggatgccaggcccccctggagatactgggaccctggcctgggcctggacagaaggtgttgctgtgccatttggagatgaccccatagatgagagtaaatccgtcagtgcttctgggccgcggccgccacctacagcctccacagtgcccggcgtcccggagctggctccactccagttcctgagcaccaaggctgcagaagctgaggcccctgacggaggcgccaaggccctgggggtgaaggaaccggacgaggaggtgtgcaacctgaccaaggtggtcctagcggggagcttcgctccagcgctcttccggggaggctggctcacttctgggacagtggccaacccaggcctgcgaccacctgctgagccggtgaccgacgccgcctgaccctccctcgcccgccagggtccaacgcccgctggacgaatccctgctacacaatctgctgctggagggctgggctgcatctaggaggggttgatggtgtctcatccctgcagtcctatggaaagaggctgtctcagagaggggagatgggcaagccagctgtggatactcggctggatggcctggacgcagccctcaacagcttggaggagaagctggagggctaggtacccacagaagggctggaagcctggccactgtcacataagtcaaggagtgtccccaaatctcccagccccagaagctgaccctgaagggctaaggccagcactgggagctgttcaaggaacccatgcaatcctgccatgagagccaggccacgctccagtgcacacctgccccacaccctaggcagctcaacctcaagggctgtgacggcatttctggtgttagtgtctctggctgtgagttctgcatccaactcaccggaggcaagcgacccccacctgcggggcagaagcagccgggtgcatgctgcaggggctgccgctggcttcccaggaggggctgcaccgtgcagggaacagccgccagcgaggtgcaggccttccagcagacaggcaccgggttcggcaaccacccccagggcagtggcgccgttttcaaggccaagcagctcatcccacggatcctggaagccctcagaatgtggcctggctcttaccgaccaggcccatctgtgcctccatcaggcctggcaatccttgcctgactttggcatctactacctcatggtcaggctcaagagcagaaaagatcctgggactcgtcaacaatcaacagttcacatcgacttgacagttggtgatgtggtgacctgggtttcagcgatatgtggtactgggatgtcaactgggataccagcaggcggttatccacatggccttcagctgcgtgtttcccatctgtccagttatgcacaaccacttgaggggctacattttcctgttgatccagagtgggaccctggggaggagctggatgaggggatctcttcctgcagctcagggatggcggccttctaagggctgtctgactgcccctgtcctgctcatcctctgcggctag

SEQ ID NO: 1757 - DNA, 585 bp, Homo sapiens
atgcagttggtgttggagatggagaccacagctcgactggagcggtggtttcctagaaacatgattgtttattggcattgatctcacagtctggtgaggacttctttactgataatgtcaagttcatgttaccctcccaaccaaggagcattcagcacagaacaaagtcattatcctcctcactctgtaaagtatacgtttcccagcacctgccaccagcaggatccaacatttggaggcaaacatgaagctccatcctctccaatttcggggcaaccatgtggagatgatcaaaatgcttcaccttcaaaactttcaaaggaagagttaatacagagtatggatcgtataaatcgagaaattgcaaaagtagaacagcagatccttaaactgaaaaagaaacaagtaaaagtctttgcttataatattctaagaatgtgtgtttttctccctatagaagatatttttgagttttccatattttgaaactgtacataaaaggaatcatgccttatatattctggcttgctgttttttgctgctattgtggttttctttcattcattcattttccttgctgcactg

SEQ ID NO: 1758 - protein, 123 aa, Homo sapiens
MSSSCYPPNQGAFSTEQSHYPPHSVKYTFPSTCHQQDPTFGGKHEAPSSPISGQPCGDDQNASPSKLSKEELIQSMDRINREIAKVEQQILKLKKKQVKVFAYNILRMCVFLPIEDIFEFSIF

SEQ ID NO: 1759 - DNA, 687 bp, Homo sapiens
ctgaggcttcgcaaagcaggagccctccgtagcagggcttcggtgtcggggctccgaggctccggcctgacttctccacggggtacacaggaacgtctccggacgccaggacctgaaatgggccgactaggatgacgaaaccacaggcagagtccggggaagcagcgcggcatcccatcttcaggcctgcccggatggtgttcgggatcaagatgaccacactccagccaaggataaaagccccacaggagctcactgtcctgcaggagaggagcaggcccacgtccaagaagatggctgtatgttttcacggctcttctctgagaagtgaagccacaccacgatacagtcttgaagaggaagccgggaatgggagatggcaacaagccctgtcatggtggcctctctgaacaagttacccttttggcacccctccccttatgcccgtggcggtggcacagtgctgtatcctgcctgggctctggcccctgctctgtcctccctcttactctgtctcccttgtttctgaggggcctagatgcttctaggtctggctgaatgtcttcaaaaaagatcacttcccagtccatcagggagacagttggtggaaaaaaaaaaaaaaaaaaaaaaaaaaaaaaaaaaaaaaaaaaaaaaaaaaaaaaaaaaaaaaaaaaaaaaaaaaaaaaa

SEQ ID NO: 1760 - protein, 71 aa, Homo sapiens
MVFGIKMTTLQPRIKAPQELTVLQERSRPTSKKMAVCFHGSSLRSEATPRYSLEEEAGNGRWQQALSWWPL

SEQ ID NO: 1761 - DNA, 2283 bp, Homo sapiens
cggccgcgagttgtgactggagccacgatgcacggccaggcgcggtgagaagccagcccgtagtgcctcccgaaggagcccgggcgcagggagggtcgccctgaggacacggaggccgccaggcaggccaagggccgaggtgactgggctggggcggtagggaaggagcgagtgcgcctggctgcctccgcacggagttgtccctctctgttttcgattgacacaaacacttctccaaaagcggggaaacctaagcaacaacagcaatcaacaccaagatcttcctcctaccctcccctctttcccttctcccgcggtcggccctcgccccctcccccaggcccagcgcgggcgctcggcgcgtccagacccgcggcgcgatgccggcagtttaggatccaaagcttctctgctccttttgttctttccttcccttttttaaaaaaagaggggggaaatcccagtggtgggcagcctggcacgcacacagtcgccctcataccccgacaaaagcagatgcactttgacttctgacagctctacctcaagccccggagaactcagcggcgctttcctcgcaacccgagctcggcgagtcgtcgtcttcttcttctccgtttttatttatttatttccgttcccgccgccgttctcgctgaccttcactcctccgcgggctctgagcagaagggtcgcattctctcccgcctgagacttcttttcctcgccccgggagctcaggcggcgccgctccagcccggggccccgggactccccggctgcacacttcactgagacgcccccccaggccccgatcagcctcgtttcctccaccctactttgatttcctggtgcgagttttggcttgcacggccgagtgtgtgtcctctttttggagagactggggagctcgtgccgattgtcttcaggagtcatcccctgggctctactttgcccctctctctctctgggcctcatcagaccaaaccaaagaccatggttcactgtgccggctgcaaaaggcccatcctggaccgctttctcttgaacgtgctggacagggcctggcacgtcaagtgcgtccagtgctgtgaatgtaaatgcaacctgaccgagaagtgcttctccagggaaggcaaactctactgcaagaacgacttcttccggtgtttcggtaccaaatgcgcaggctgcgctcagggcatctcccctagcgacctggtgcggagagcgcggagcaaagtgtttcacctgaactgcttcacctgcatgatgtgtaacaagcagctctccactggcgaggaactctacatcatcgacgagaataagttcgtctgcaaagaggattacctaagtaacagcagtgttgccaaagagaacagccttcactcggccaccacgggcagtgaccccagtttgtctccggattcccaagacccgtcgcaggacgacgccaaggactcggagagcgccaacgtgtcggacaaggaagcgggtagcaacgagaatgacgaccagaacctgggcgccaagcggcggggaccgcgcaccaccatcaaagccaagcagctggagacgctgaaggccgccttcgctgctacacccaagcccacccgccacatccgcgagcagctggcgcaggagaccggcctcaacatgcgcgtcattcaggtctggttccagaaccggcgctccaaggagcggaggatgaagcagctgagcgccctgggcgcccggcgccacgccttcttccgcagtccgcgccggatgcggccgctggtggaccgcctggagccgggcgagctcatccccaatggtcccttctccttctacggagattaccagagcgagtactacgggcccgggggcaactacgacttcttcccgcaaggccccccgtcctcgcaggcccagacaccagtggacctacccttcgtgccgtcatctgggccgtccgggacgcccctgggtggcctggagcacccgctgccgggccaccacccgtcgagcgaggcgcagcggtttaccgacatcctggcgcacccacccggggactcgcccagccccgagcccagcctgcccgggcctctgcactccatgtcggccgaggtcttcggacccagcccgcccttctcgtcgctgtcggtcaacggtggggcgagctacggaaaccacctgtcccacccccccgaaatgaacgaggcggccgtgtggtagcggggtctcgcacggtctgcggagttcgtggttgtacagaaatgaacctttatttaagaaaaatag

SEQ ID NO: 1762 - protein, 406 aa, Homo sapiens
MVHCAGCKRPILDRFLLNVLDRAWHVKCVQCCECKCNLTEKCFSREGKLYCKNDFFRCFGTKCAGCAQGISPSDLVRRARSKVFHLNCFTCMMCNKQLSTGEELYIIDENKFVCKEDYLSNSSVAKENSLHSATTGSDPSLSPDSQDPSQDDAKDSESANVSDKEAGSNENDDQNLGAKRRGPRTTIKAKQLETLKAAFAATPKPTRHIREQLAQETGLNMRVIQVWFQNRRSKERRMKQLSALGARRHAFFRSPRRMRPLVDRLEPGELIPNGPFSFYGDYQSEYYGPGGNYDFFPQGPPSSQAQTPVDLPFVPSSGPSGTPLGGLEHPLPGHHPSSEAQRFTDILAHPPGDSPSPEPSLPGPLHSMSAEVFGPSPPFSSLSVNGGASYGNHLSHPPEMNEAAVW

SEQ ID NO: 1763 - DNA, 2172 bp, Homo sapiens
aatcccttcaaccttctgcgcgcttccgccttcatgctagcaacgcccgcagtgacgcgcaggccccgccccctcccgcgcgcctcccggaagtggccggtccagagctgtggggtggcctccgcgcggtctctggcggagtcggggaatcggatcaaggcgagaggatccggcagggaaggagcttcggggccgggggttgggccgcacatttacgtgcgcgaagcggagtggaccgggagctggtgacgatggcggggccgcagcccctggcgctgcaactggaacagttgttgaacccgcgaccaagcgaggcggaccctgaagcggaccccgaggaagccactgctgccagggtgattgacaggtttgatgaaggggaagatggggaaggtgatttcctagtagtgggtagcattagaaaactggcatcagcctccctcttggacacggacaaaaggtattgcggcaaaaccacctctagaaaagcatggaatgaagaccattgggagcagactctgccaggatcgtctgatgaggaaatatctgatgaggaagggtctggagatgaagattcagagggactgggtctggaggaatatgatgaggacgacctgggtgctgctgaggaacaggagtgtggtgatcacagggagagcaagaagagcagaagccactctgcaaaaacaccgggcttcagtgtccagagtatcagtgactttgagaaatttaccaagggaatggatgaccttgggagcagtgaggaggaggaagacgaagagagtggcatggaagaaggggatgacgcggaagactcccaaggcgagagtgaggaagacagggctggagatagaaacagtgaggatgatggtgtggtgatgaccttctctagtgtcaaagtttctgaggaagtggagaaaggaagagccgtgaagaaccagatagcactgtgggaccagctcttggaaggaaggatcaaactacaaaaagctctgttgaccaccaaccagcttcctcaaccagatgttttcccattgttcaaggacaaaggtggcccagaattttccagtgccctgaaaaatagtcacaaggcacttaaagcattgttgaggtcattggtaggtcttcaggaagagttgcttttccagtacccagacactagatatctagtagatgggacaaagcccaatgcgggaagtgaggagatttctagtgaagatgatgagctggtagaagagaagaagcagcaacgaagaagggtccctgcaaagaggaagctggagatggaggactatcccagcttcatggcaaagcgctttgccgactttacagtctacaggaaccgcacacttcagaaatggcacgataagaccaaactggcttctggaaaactggggaagggttttggtgcctttgaacgctcaatcttgactcagatcgaccatattctgatggacaaagagagattacttcgaaggacacagaccaagcgctctgtctatcgagttcttggcaaacctgagccagcagctcagcctgtcccagagagtttgccaggggaaccggagatccttcctcaagcccctgctaatgctcatctgaaggacttggatgaagaaatctttgatgatgatgacttttaccaccagctccttcgagaactcatagaacggaagaccagctccttggatcccaacgatcaggtggccatgggaaggcagtggcttgcaatccagaagttacgaagcaaaatccacaaaaaagtagataggaaagccagcaaaggcaggaaacttcggtttcatgtccttagcaagctactgagtttcatggcacctattgaccatactacaatgaatgatgatgccaggacagaactgtaccgctctctttttggccagctccaccctcccgacgaaggccacggggattgacatcgcccacctccgacacccagtgggcgccttggctggtgcggctgctggtccagatggaggaaaccagtgactttatggggctgagctagtagggaagcccctggaaagatgctgcgttccgaacctgtgcctaatacacgcaagggcgctgtcccgcccaaccccgcctttaaacgccacaaataaagagcattgttaccgccaaaaaaaaaaaaaaaaaaaaaaaaaaaaaaaa

SEQ ID NO: 1764 - protein, 560 aa, Homo sapiens
MAGPQPLALQLEQLLNPRPSEADPEADPEEATAARVIDRFDEGEDGEGDFLVVGSIRKLASASLLDTDKRYCGKTTSRKAWNEDHWEQTLPGSSDEEISDEEGSGDEDSEGLGLEEYDEDDLGAAEEQECGDHRESKKSRSHSAKTPGFSVQSISDFEKFTKGMDDLGSSEEEEDEESGMEEGDDAEDSQGESEEDRAGDRNSEDDGVVMTFSSVKVSEEVEKGRAVKNQIALWDQLLEGRIKLQKALLTTNQLPQPDVFPLFKDKGGPEFSSALKNSHKALKALLRSLVGLQEELLFQYPDTRYLVDGTKPNAGSEEISSEDDELVEEKKQQRRRVPAKRKLEMEDYPSFMAKRFADFTVYRNRTLQKWHDKTKLASGKLGKGFGAFERSILTQIDHILMDKERLLRRTQTKRSVYRVLGKPEPAAQPVPESLPGEPEILPQAPANAHLKDLDEEIFDDDDFYHQLLRELIERKTSSLDPNDQVAMGRQWLAIQKLRSKIHKKVDRKASKGRKLRFHVLSKLLSFMAPIDHTTMNDDARTELYRSLFGQLHPPDEGHGD

SEQ ID NO: 1765 - DNA, 10018 bp, Homo sapiens
ggcccccgccgggtgctgagcgcccgccaccgccctcttggccttttcccggtccccgccgcgcgcctgctgctgtccccgtgcccgaggactgggaggatggggctgagccgcttgcctgacttttgatccgaccagtaatcactttgcccgtgtggcgcgtggcccgttgcctgaggcttcctggcgcgtggggctgtttggtcccctccggagtgcggtgaggcgggccgagccgggactgcctgggtttggggataacgttcccatctccacccctgttgcagcaagggaaattgaggctgagggaactgggcccagggacggcgagccgtggctgcctctccagtccgggccccgaagggctgctcgtggatgaaccagactgattttaaggggtgaagagggtgcgtttcaatcagatgcttctggaacgtcgaaattgtcttctttggaaagaaccatcccctctttgggcttcagaggcccaaattgaggcgcaatgatgagaggatgtggtggtctactctgatgtcaatcttgagggctaggtctttctggaagtggatatctactcagacagtaagaattataagagctgtaagagctcattttggaggaataatggatgaaccatctcccttggcccaacctctggagctgaaccagcactctcgattcataataggttctgtgtctgaagataactcagaggatgagatcagcaacctggtgaagttggacctactggaggagaaggagggctccttgtcacctgcttctgttggctcagatacactctctgatttggggatctctagcctacaggatggcttggccttgcacataaggtccagcatgtctggcttgcacctagtaaagcagggccgagacagaaagaaaatagattctcaacgagatttcactgtggcttctccagcagaatttgttactcgctttgggggaaataaagtgattgagaaggttcttattgctaacaatggcattgcagcagtgaaatgcatgcggtctatccgtaggtggtcttatgaaatgtttcgaaatgaacgtgcaattagattcgttgtcatggtcacacctgaagaccttaaagccaatgcagaatacattaagatggcagatcactatgtgccagtgcctggaggaccaaacaacaacaactatgcaaatgtggaattaattcttgatattgctaaaaggatcccagtacaagcagtgtgggctggctggggtcatgcttctgagaatcccaaactaccggaacttctcttgaaaaatggcattgccttcatgggtcctccaagccaggccatgtgggctttaggggataagattgcatcttccatagtggctcaaactgcaggtatcccaactcttccctggagcggcagtggtcttcgtgtggactggcaggaaaatgatttttcaaaacgtatcttaaatgttccccaggagctatatgaaaaaggttatgtgaaagatgtggatgatgggctacaggcagctgaggaagttggatatccagtaatgatcaaggcctcagagggaggaggagggaagggaattagaaaagtcaacaatgcagatgacttccctaatctcttcagacaggttcaagctgaagttcctggatctcccatatttgtgatgagactagccaaacaatctcgtcatctggaggtgcagatcttagcggaccaatatggcaatgctatctctttgtttggtcgtgattgctctgtacaacgcaggcatcagaagattattgaagaagcacctgctactattgctactccagcagtatttgaacacatggaacagtgtgcggtgaaacttgccaaaatggtgggttatgtgagtgctgggactgtggaatacctgtacagccaggatggcagcttctactttctggaattgaatcctcggctgcaggtagagcacccttgtacagagatggtggctgatgtcaatctccctgcagcacagctccagattgccatggggattcctctatatagaatcaaggatatccgtatgatgtatggggtatctccctggggtgattctcccattgattttgaagattctgcacacgttccttgtccaaggggccatgttattgctgctcggatcactagtgaaaatccagatgagggttttaagcccagctcaggaacagttcaggagctaaatttccgcagcaataagaatgtttggggatatttcagtgttgctgctgcagggggacttcatgaatttgctgattctcagtttggtcactgcttttcttggggagaaaacagagaagaggcaatttcaaacatggtggtggctttgaaggagctgtctattcggggtgactttcgaactacagttgaatacctgatcaaattgttagagactgaaagctttcagatgaacagaattgatactggctggctggacagactgatagcagaaaaagtacaggctgagcgacctgacaccatgttgggggttgtgtgtggtgccctccacgtggcagatgtgagcctgcggaatagcgtctctaacttccttcactccttagaaaggggtcaagtccttcctgctcatacacttctgaatacagtagatgttgaacttatctatgagggagtcaagtatgtacttaaggtgactcgacagtcccccaactcctatgtggtgatcatgaatggctcatgtgtagaagtagatgtacatcggctgagtgacggtggactgctcttgtcctatgatggcagcagttatactacgtatatgaaagaggaagtggatagatatcgcatcacaattggcaataaaacctgtgtgtttgagaaggaaaatgacccatcggtgatgcgctcaccttctgctgggaagttaatccagtacattgtagaagatggaggtcatgtgtttgccggccagtgctatgctgagattgaggtaatgaagatggtaatgaccttaacagctgtggagtctggctgtatccattacgtcaagcgacctggagcagctcttgaccctggctgtgtactagccaaaatgcaactggacaaccccagcaaggttcagcaggctgaacttcacacaggtagtctgccacggatccagagcacggcactcagaggcgagaaactccatcgagtgttccattatgtcctggataatctggtcaatgtaatgaatggatactgccttccagatcctttctttagcagcaaggtaaaagactgggtagagcgattgatgaaaaccctcagagatccctccctgcctctcctagaattgcaagatattatgaccagtgtgtctggccgcattccccccaatgtggagaagtctatcaagaaggaaatggctcagtatgctagcaacatcacatcagtcctctgtcagtttcccagccagcagattgcaaacatcctagatagccatgcagctacattgaaccggaaatctgaacgggaagtcttctttatgaatactcagagcattgttcagctggtacagaggtaccgaagtggcatccgaggccacatgaaggctgtggtgatggatctgctccggcagtacctgcgagtagagacacaattccagaatggtcactatgacaaatgtgtattcgccctccgagaagagaataaaagtgacatgaacactgtactgaactacatcttctctcacgctcaagtcaccaagaagaatcttctggtcacaatgcttattgatcagttgtgtggccgggaccctactctcactgatgagctgctgaatattctcacagagctaactcaactcagtaagaccaccaatgccaaagtagcacttcgagcacgccaggttcttattgcctcccatttgccatcatatgagcttcgccataaccaagtagagtctatcttcctatcagctattgacatgtatggacatcaattttgcattgagaacctgcagaaactcatcctatcagaaacatctatttttgatgtcctaccaaacttcttctatcacagcaaccaagtagtgaggatggcagctctggaggtgtatgttcgaagggcttatattgcctatgaacttaacagcgtacaacaccgccagcttaaggacaacacctgtgtggtggaattccagttcatgctgcccacatctcatccaaacagagggaacatccctacgctaaacagaatgtccttctcctccaacctcaaccactatggcatgacccatgtagctagtgtcagcgatgtactgttggacaactcattcactccaccttgtcagcggatgggcggaatggtctcttttcggacttttgaagattttgtcaggatctttgatgaagtgatgggctgcttctctgactccccaccccagagtcccacattccctgaggcaggtcacacgtctctttatgatgaggataaggttcccagggatgaaccaattcacattctcaatgtggctatcaagactgactgtgatattgaggatgacaggctggcagctatgttcagagaatttacccagcaaaataaagctaccctggttgaccatgggatccggcgccttactttcctggttgcacaaaaggatttcagaaagcaggtcaactatgaggtggatcggagatttcatagagaattccctaaattttttacattccgagcaagggataagtttgaggaggatcgtatctatcgtcatctggagcctgctctggctttccagttagagctgaaccggatgagaaattttgacctcactgccattccatgtgctaatcacaagatgcacctgtatctcggggcagccaaggtggaagtgggcacagaagtgacagactacaggttctttgttcgtgcaatcatcaggcattctgatctggtcaccaaggaagcttcttttgaatatctgcaaaatgaaggggagcggctactcctggaagccatggatgagttggaagttgcttttaacaatacaaatgtccgcactgactgtaaccacatcttcctcaactttgtgcccacggttatcatggacccatcaaagattgaggaatccgtgcggagcatggtaatgcggtatggaagtcgcctgtggaaattgcgcgtcctccaggcagaactgaaaatcaacattcgcctgacgccaactggaaaagcaattcccatccgcctcttcctgacaaacgagtctggctattacttggatatcagcctatacaaggaagtgactgactccaggacagcacagatcatgtttcaggcatatggagacaaacagggaccactgcatggaatgttaatcaatactccatatgtgaccaaagacctgctgcaatcaaagaggttccaggcacaatccttagggacaacatacatatatgatatcccagagatgtttcggcagtccctgatcaaactctgggagtctatgtccactcaagcatttcttccatctccccctctgccttctgacatgctgacttacactgaactggtactggatgatcaaggtcagctggtccacatgaacaggcttccaggaggaaatgagattggcatggtagcttggaaaatgacctttaaaagtcctgaatatccagaaggccgagatatcattgttattggcaatgacatcacataccgaattgggtcctttgggcctcaagaggatttgttatttctcagagcttccgaacttgctagggcagaaggtattccacgcatctatgtatcagccaacagtggagcaagaatcggactggcagaagaaattcgccatatgtttcatgtggcctgggtagatcctgaggatccttacaagggatacaggtatttatatctgactcctcaagattataagagagtcagtgctctcaactctgtccattgtgaacacgtggaagatgaaggagaatccaggtacaagataacagatattattgggaaagaagagggaattggacccgagaaccttcgaggttctggaatgattgctggagaatcctcattggcctataatgagatcattaccatcagcctggtgacgtgccgggccattgggattggggcttaccttgtccggctgggacagagaaccatccaggttgagaattctcacttaattctaacaggagctggagccctcaacaaagtcctcgggcgggaagtgtacacctccaataaccagctggggggcatccagattatgcacaacaatggggtgacccactgcactgtgtgtgatgactttgaaggggttttcactgtcctgcactggctgtcttacatgcccaagagcgtgcacagttcagttcctcttctgaactcaaaggatcctatagacagaatcatcgagtttgttcccacaaagaccccatacgatcctcgatggatgctagcaggccgtcctcacccaacccaaaaaggtcagtggttgagtggcttttttgactatggatctttctcagagattatgcagccctgggcacagactgtggtggttggtagagccaggctaggaggaatacctgtgggagttgttgctgtagaaacccgaacagtagaactaagtatcccagctgatccagcaaacctggattctgaagccaagataatccagcaggctggccaggtttggttcccagattctgcgtttaagacgtatcaggccatcaaggacttcaaccgggaagggctgcctctgatggtctttgccaactggagaggcttctctggtggaatgaaagatatgtacgaccaagtgctgaagtttggtgcttacattgtggatggcttgagggagtgctgccagcctgtgctggtttacattcctccccaggctgagctgcggggtggctcctgggtggtgattgactcctccatcaacccccggcacatggagatgtatgctgaccgagaaagcaggggatctgttctggagccagaagggacagtagaaatcaaattccgcagaaaggatctggtgaaaaccatgcgtcgggtggacccagtctacatccacttggctgagcgattggggaccccagagctaagcacagctgagcggaaggagttggagaacaagttgaaggagcgggaggaattcctaattcccatttaccatcaggtagccgtgcagtttgctgacttgcacgacacaccaggccggatgcaggagaagggtgttattagcgatatcctggattggaaaacatcccgtaccttcttctactggcggctgaggcgtcttctgctggaggacctggtcaagaagaaaatccacaatgccaaccctgagctgactgatggccagattcaagccatgttaaggcgctggtttgtggaagtggaaggaacagtgaaggcttatgtttgggacaataataaggatctggcggagtggctagagaaacagctgacagaggaggatggtgttcactcggtaatagaggaaaacatcaaatgcatcagcagagactacgtcctcaagcaaatccgcagcttggtccaggccaatccagaggttgccatggattccatcatccatatgacgcagcacatatcacccactcagcgagcagaagtcatacggatcctctccacaatggattccccttccacgtaggaagagcttcctgcctgtccctgccctgtctctggagaaaagggctagagctgccttttacaactgtaaccactgtaatgagaaggcacaggagacccagcactggagtcaaatggcattttacttcctctcgtttcaggttatgcatgacatcctgggatgtaagatcacagaatccccctccagcccaccagtcacacctaccccattcagtatttattaccctggccaggcctagtcctccactccctgcacaggactgagaaggcaatgaaaggtacaaacatgtaccatgaggtcttactaaccaaagtagggctgcccctcctgtcctgacagccccttggcctcccagcatggggaagcgtgaggagttgcccagcagtgagcagcccccctcactcctggccccatgagccgcagccacaggcagcagaggagggctaaggagaggaggaagcctcaagtccattgtttattaccccgactcttagcccagcacacagtaggcactggagaggaatgattcccagtttaaccacactacggtaccttttatgaagaaaaattagagcataaaatctactacaagctccataggaactcaaagatgagggcaaaactgtgagccaagaagcagagaaagaaaatagaaccagttattcttgatttaggggacctcaaccttgggttcagtctctgaggacaaagggaaaggtagttgttggcctgcctctcgcctgcacgtcactgctggactagctgtcgcatgtggctgggagctgcaaggccagtgcttgaggggccccagcagttccacaggtggtgaagcctgagttggcagaggaggagccagaagagaactgccctttctgcactggtggaaactagttatttatgccatgtggagagccagtgagatagatagatagtctgtttgttttgaggacttggaaagttgttcctatgaagcctggagcttggatggttttgagaggttaatggtgcctccacactcactcttccctagttccaggattactgtcctagcagctaacggttctactctcttccccagagtgtagacaggcagcaggtctccccacagctctgaaaggaccctggtgacagctacaccctcagcaccaggagctggccttcctgatgagggaggcttccaggaaacacagaatccacatgaccttaagattatttacaactcagtcatggtgctgctgtcctccaggcttactggcccctcctgactggcatcaggggcttcctcaggtggtggagagagtttactttcaacaactagtttattcaagaaaagaacttactgattcctctgttcctaaagcaagagtggcaggtgatcagggctggtgtagcatccggttcctttagtgcagctaactgcatttgtcactgatgaccaaggaggaaatcactaagacatttgagaagcagtggtatgaacgttcttggacaagccacagttctgagccttaaccctgtagtttgcacacaagaacgagctccacctccccttcttcaggaggaatctgtgcggatagattggctggacttttcaatggttctgggttgcaggtgggcactgtatggctgggtatggagcggacagcccccaggagtcagagcctcagcccggctgccctggtggaaggtacaggtgttcagcaccttcagaaaagggcataaagtggtgggggacaattctcagtccaggaaaatgcattgaccattgctggctatttgcttacctagtaagaattggattcatttttgaccagattattcttctatgcttttttgcaataaatcaaatcccacatatctacaagtggtatgaagtcctgcaccccccaggaggcctgtccaggcatgtcttcagaggcagggtgggttacactcatttacctcccctctccccaccaaattatgacacaaacgagtatgtttcctctctagaaccctgtaatgcctcctcccccatccccagagctccttactgtaggtcttaccctggacaaggattttttcaagttggaggcacagaacatgagcaatctgacattcccacagcccctcaaacatgcaaggctactaaggcaggaggagtataaatgatggatattgaccaagacctgcttggacggagaccgccatattatctgttctcttcgttcacaaaacagccttcacttgtctcagaatttgatggacacatactgtgatgagcaggagcttcagatgcactctttacacattttgttgaaataaacctctacatttgtagaagaaaaaaaaaaaaaaaaaaaaaaaaaaaaaa

SEQ ID NO: 1766 - protein, 2383 aa, Homo sapiens
MWWSTLMSILRARSFWKWISTQTVRIIRAVRAHFGGIMDEPSPLAQPLELNQHSRFIIGSVSEDNSEDEISNLVKLDLLEEKEGSLSPASVGSDTLSDLGISSLQDGLALHIRSSMSGLHLVKQGRDRKKIDSQRDFTVASPAEFVTRFGGNKVIEKVLIANNGIAAVKCMRSIRRWSYEMFRNERAIRFVVMVTPEDLKANAEYIKMADHYVPVPGGPNNNNYANVELILDIAKRIPVQAVWAGWGHASENPKLPELLLKNGIAFMGPPSQAMWALGDKIASSIVAQTAGIPTLPWSGSGLRVDWQENDFSKRILNVPQELYEKGYVKDVDDGLQAAEEVGYPVMIKASEGGGGKGIRKVNNADDFPNLFRQVQAEVPGSPIFVMRLAKQSRHLEVQILADQYGNAISLFGRDCSVQRRHQKIIEEAPATIATPAVFEHMEQCAVKLAKMVGYVSAGTVEYLYSQDGSFYFLELNPRLQVEHPCTEMVADVNLPAAQLQIAMGIPLYRIKDIRMMYGVSPWGDSPIDFEDSAHVPCPRGHVIAARITSENPDEGFKPSSGTVQELNFRSNKNVWGYFSVAAAGGLHEFADSQFGHCFSWGENREEAISNMVVALKELSIRGDFRTTVEYLIKLLETESFQMNRIDTGWLDRLIAEKVQAERPDTMLGVVCGALHVADVSLRNSVSNFLHSLERGQVLPAHTLLNTVDVELIYEGVKYVLKVTRQSPNSYVVIMNGSCVEVDVHRLSDGGLLLSYDGSSYTTYMKEEVDRYRITIGNKTCVFEKENDPSVMRSPSAGKLIQYIVEDGGHVFAGQCYAEIEVMKMVMTLTAVESGCIHYVKRPGAALDPGCVLAKMQLDNPSKVQQAELHTGSLPRIQSTALRGEKLHRVFHYVLDNLVNVMNGYCLPDPFFSSKVKDWVERLMKTLRDPSLPLLELQDIMTSVSGRIPPNVEKSIKKEMAQYASNITSVLCQFPSQQIANILDSHAATLNRKSEREVFFMNTQSIVQLVQRYRSGIRGHMKAVVMDLLRQYLRVETQFQNGHYDKCVFALREENKSDMNTVLNYIFSHAQVTKKNLLVTMLIDQLCGRDPTLTDELLNILTELTQLSKTTNAKVALRARQVLIASHLPSYELRHNQVESIFLSAIDMYGHQFCIENLQKLILSETSIFDVLPNFFYHSNQVVRMAALEVYVRRAYIAYELNSVQHRQLKDNTCVVEFQFMLPTSHPNRGNIPTLNRMSFSSNLNHYGMTHVASVSDVLLDNSFTPPCQRMGGMVSFRTFEDFVRIFDEVMGCFSDSPPQSPTFPEAGHTSLYDEDKVPRDEPIHILNVAIKTDCDIEDDRLAAMFREFTQQNKATLVDHGIRRLTFLVAQKDFRKQVNYEVDRRFHREFPKFFTFRARDKFEEDRIYRHLEPALAFQLELNRMRNFDLTAIPCANHKMHLYLGAAKVEVGTEVTDYRFFVRAIIRHSDLVTKEASFEYLQNEGERLLLEAMDELEVAFNNTNVRTDCNHIFLNFVPTVIMDPSKIEESVRSMVMRYGSRLWKLRVLQAELKINIRLTPTGKAIPIRLFLTNESGYYLDISLYKEVTDSRTAQIMFQAYGDKQGPLHGMLINTPYVTKDLLQSKRFQAQSLGTTYIYDIPEMFRQSLIKLWESMSTQAFLPSPPLPSDMLTYTELVLDDQGQLVHMNRLPGGNEIGMVAWKMTFKSPEYPEGRDIIVIGNDITYRIGSFGPQEDLLFLRASELARAEGIPRIYVSANSGARIGLAEEIRHMFHVAWVDPEDPYKGYRYLYLTPQDYKRVSALNSVHCEHVEDEGESRYKITDIIGKEEGIGPENLRGSGMIAGESSLAYNEIITISLVTCRAIGIGAYLVRLGQRTIQVENSHLILTGAGALNKVLGREVYTSNNQLGGIQIMHNNGVTHCTVCDDFEGVFTVLHWLSYMPKSVHSSVPLLNSKDPIDRIIEFVPTKTPYDPRWMLAGRPHPTQKGQWLSGFFDYGSFSEIMQPWAQTVVVGRARLGGIPVGVVAVETRTVELSIPADPANLDSEAKIIQQAGQVWFPDSAFKTYQAIKDFNREGLPLMVFANWRGFSGGMKDMYDQVLKFGAYIVDGLRECCQPVLVYIPPQAELRGGSWVVIDSSINPRHMEMYADRESRGSVLEPEGTVEIKFRRKDLVKTMRRVDPVYIHLAERLGTPELSTAERKELENKLKEREEFLIPIYHQVAVQFADLHDTPGRMQEKGVISDILDWKTSRTFFYWRLRRLLLEDLVKKKIHNANPELTDGQIQAMLRRWFVEVEGTVKAYVWDNNKDLAEWLEKQLTEEDGVHSVIEENIKCISRDYVLKQIRSLVQANPEVAMDSIIHMTQHISPTQRAEVIRILSTMDSPST

SEQ ID NO: 1767 - DNA, 9585 bp, Homo sapiens
cggcctggtgctgcacgcctgtcagccatcgcccgagccgccggcgtctcctcccgcccagcagttcctccacgcaggggctccggaatcgcccgaccgcacacgttgccaccctgaggtctttctggaagtggatatctactcagacagtaagaattataagagctgtaagagctcattttggaggaataatggatgaaccatctcccttggcccaacctctggagctgaaccagcactctcgattcataataggttctgtgtctgaagataactcagaggatgagatcagcaacctggtgaagttggacctactggaggagaaggagggctccttgtcacctgcttctgttggctcagatacactctctgatttggggatctctagcctacaggatggcttggccttgcacataaggtccagcatgtctggcttgcacctagtaaagcagggccgagacagaaagaaaatagattctcaacgagatttcactgtggcttctccagcagaatttgttactcgctttgggggaaataaagtgattgagaaggttcttattgctaacaatggcattgcagcagtgaaatgcatgcggtctatccgtaggtggtcttatgaaatgtttcgaaatgaacgtgcaattagattcgttgtcatggtcacacctgaagaccttaaagccaatgcagaatacattaagatggcagatcactatgtgccagtgcctggaggaccaaacaacaacaactatgcaaatgtggaattaattcttgatattgctaaaaggatcccagtacaagcagtgtgggctggctggggtcatgcttctgagaatcccaaactaccggaacttctcttgaaaaatggcattgccttcatgggtcctccaagccaggccatgtgggctttaggggataagattgcatcttccatagtggctcaaactgcaggtatcccaactcttccctggagcggcagtggtcttcgtgtggactggcaggaaaatgatttttcaaaacgtatcttaaatgttccccaggagctatatgaaaaaggttatgtgaaagatgtggatgatgggctacaggcagctgaggaagttggatatccagtaatgatcaaggcctcagagggaggaggagggaagggaattagaaaagtcaacaatgcagatgacttccctaatctcttcagacaggttcaagctgaagttcctggatctcccatatttgtgatgagactagccaaacaatctcgtcatctggaggtgcagatcttagcggaccaatatggcaatgctatctctttgtttggtcgtgattgctctgtacaacgcaggcatcagaagattattgaagaagcacctgctactattgctactccagcagtatttgaacacatggaacagtgtgcggtgaaacttgccaaaatggtgggttatgtgagtgctgggactgtggaatacctgtacagccaggatggcagcttctactttctggaattgaatcctcggctgcaggtagagcacccttgtacagagatggtggctgatgtcaatctccctgcagcacagctccagattgccatggggattcctctatatagaatcaaggatatccgtatgatgtatggggtatctccctggggtgattctcccattgattttgaagattctgcacacgttccttgtccaaggggccatgttattgctgctcggatcactagtgaaaatccagatgagggttttaagcccagctcaggaacagttcaggagctaaatttccgcagcaataagaatgtttggggatatttcagtgttgctgctgcagggggacttcatgaatttgctgattctcagtttggtcactgcttttcttggggagaaaacagagaagaggcaatttcaaacatggtggtggctttgaaggagctgtctattcggggtgactttcgaactacagttgaatacctgatcaaattgttagagactgaaagctttcagatgaacagaattgatactggctggctggacagactgatagcagaaaaagtacaggctgagcgacctgacaccatgttgggggttgtgtgtggtgccctccacgtggcagatgtgagcctgcggaatagcgtctctaacttccttcactccttagaaaggggtcaagtccttcctgctcatacacttctgaatacagtagatgttgaacttatctatgagggagtcaagtatgtacttaaggtgactcgacagtcccccaactcctatgtggtgatcatgaatggctcatgtgtagaagtagatgtacatcggctgagtgacggtggactgctcttgtcctatgatggcagcagttatactacgtatatgaaagaggaagtggatagatatcgcatcacaattggcaataaaacctgtgtgtttgagaaggaaaatgacccatcggtgatgcgctcaccttctgctgggaagttaatccagtacattgtagaagatggaggtcatgtgtttgccggccagtgctatgctgagattgaggtaatgaagatggtaatgaccttaacagctgtggagtctggctgtatccattacgtcaagcgacctggagcagctcttgaccctggctgtgtactagccaaaatgcaactggacaaccccagcaaggttcagcaggctgaacttcacacaggtagtctgccacggatccagagcacggcactcagaggcgagaaactccatcgagtgttccattatgtcctggataatctggtcaatgtaatgaatggatactgccttccagatcctttctttagcagcaaggtaaaagactgggtagagcgattgatgaaaaccctcagagatccctccctgcctctcctagaattgcaagatattatgaccagtgtgtctggccgcattccccccaatgtggagaagtctatcaagaaggaaatggctcagtatgctagcaacatcacatcagtcctctgtcagtttcccagccagcagattgcaaacatcctagatagccatgcagctacattgaaccggaaatctgaacgggaagtcttctttatgaatactcagagcattgttcagctggtacagaggtaccgaagtggcatccgaggccacatgaaggctgtggtgatggatctgctccggcagtacctgcgagtagagacacaattccagaatggtcactatgacaaatgtgtattcgccctccgagaagagaataaaagtgacatgaacactgtactgaactacatcttctctcacgctcaagtcaccaagaagaatcttctggtcacaatgcttattgatcagttgtgtggccgggaccctactctcactgatgagctgctgaatattctcacagagctaactcaactcagtaagaccaccaatgccaaagtagcacttcgagcacgccaggttcttattgcctcccatttgccatcatatgagcttcgccataaccaagtagagtctatcttcctatcagctattgacatgtatggacatcaattttgcattgagaacctgcagaaactcatcctatcagaaacatctatttttgatgtcctaccaaacttcttctatcacagcaaccaagtagtgaggatggcagctctggaggtgtatgttcgaagggcttatattgcctatgaacttaacagcgtacaacaccgccagcttaaggacaacacctgtgtggtggaattccagttcatgctgcccacatctcatccaaacagagggaacatccctacgctaaacagaatgtccttctcctccaacctcaaccactatggcatgacccatgtagctagtgtcagcgatgtactgttggacaactcattcactccaccttgtcagcggatgggcggaatggtctcttttcggacttttgaagattttgtcaggatctttgatgaagtgatgggctgcttctctgactccccaccccagagtcccacattccctgaggcaggtcacacgtctctttatgatgaggataaggttcccagggatgaaccaattcacattctcaatgtggctatcaagactgactgtgatattgaggatgacaggctggcagctatgttcagagaatttacccagcaaaataaagctaccctggttgaccatgggatccggcgccttactttcctggttgcacaaaaggatttcagaaagcaggtcaactatgaggtggatcggagatttcatagagaattccctaaattttttacattccgagcaagggataagtttgaggaggatcgtatctatcgtcatctggagcctgctctggctttccagttagagctgaaccggatgagaaattttgacctcactgccattccatgtgctaatcacaagatgcacctgtatctcggggcagccaaggtggaagtgggcacagaagtgacagactacaggttctttgttcgtgcaatcatcaggcattctgatctggtcaccaaggaagcttcttttgaatatctgcaaaatgaaggggagcggctactcctggaagccatggatgagttggaagttgcttttaacaatacaaatgtccgcactgactgtaaccacatcttcctcaactttgtgcccacggttatcatggacccatcaaagattgaggaatccgtgcggagcatggtaatgcggtatggaagtcgcctgtggaaattgcgcgtcctccaggcagaactgaaaatcaacattcgcctgacgccaactggaaaagcaattcccatccgcctcttcctgacaaacgagtctggctattacttggatatcagcctatacaaggaagtgactgactccaggacagcacagatcatgtttcaggcatatggagacaaacagggaccactgcatggaatgttaatcaatactccatatgtgaccaaagacctgctgcaatcaaagaggttccaggcacaatccttagggacaacatacatatatgatatcccagagatgtttcggcagtccctgatcaaactctgggagtctatgtccactcaagcatttcttccatctccccctctgccttctgacatgctgacttacactgaactggtactggatgatcaaggtcagctggtccacatgaacaggcttccaggaggaaatgagattggcatggtagcttggaaaatgacctttaaaagtcctgaatatccagaaggccgagatatcattgttattggcaatgacatcacataccgaattgggtcctttgggcctcaagaggatttgttatttctcagagcttccgaacttgctagggcagaaggtattccacgcatctatgtatcagccaacagtggagcaagaatcggactggcagaagaaattcgccatatgtttcatgtggcctgggtagatcctgaggatccttacaagggatacaggtatttatatctgactcctcaagattataagagagtcagtgctctcaactctgtccattgtgaacacgtggaagatgaaggagaatccaggtacaagataacagatattattgggaaagaagagggaattggacccgagaaccttcgaggttctggaatgattgctggagaatcctcattggcctataatgagatcattaccatcagcctggtgacgtgccgggccattgggattggggcttaccttgtccggctgggacagagaaccatccaggttgagaattctcacttaattctaacaggagctggagccctcaacaaagtcctcgggcgggaagtgtacacctccaataaccagctggggggcatccagattatgcacaacaatggggtgacccactgcactgtgtgtgatgactttgaaggggttttcactgtcctgcactggctgtcttacatgcccaagagcgtgcacagttcagttcctcttctgaactcaaaggatcctatagacagaatcatcgagtttgttcccacaaagaccccatacgatcctcgatggatgctagcaggccgtcctcacccaacccaaaaaggtcagtggttgagtggcttttttgactatggatctttctcagagattatgcagccctgggcacagactgtggtggttggtagagccaggctaggaggaatacctgtgggagttgttgctgtagaaacccgaacagtagaactaagtatcccagctgatccagcaaacctggattctgaagccaagataatccagcaggctggccaggtttggttcccagattctgcgtttaagacgtatcaggccatcaaggacttcaaccgggaagggctgcctctgatggtctttgccaactggagaggcttctctggtggaatgaaagatatgtacgaccaagtgctgaagtttggtgcttacattgtggatggcttgagggagtgctgccagcctgtgctggtttacattcctccccaggctgagctgcggggtggctcctgggtggtgattgactcctccatcaacccccggcacatggagatgtatgctgaccgagaaagcaggggatctgttctggagccagaagggacagtagaaatcaaattccgcagaaaggatctggtgaaaaccatgcgtcgggtggacccagtctacatccacttggctgagcgattggggaccccagagctaagcacagctgagcggaaggagttggagaacaagttgaaggagcgggaggaattcctaattcccatttaccatcaggtagccgtgcagtttgctgacttgcacgacacaccaggccggatgcaggagaagggtgttattagcgatatcctggattggaaaacatcccgtaccttcttctactggcggctgaggcgtcttctgctggaggacctggtcaagaagaaaatccacaatgccaaccctgagctgactgatggccagattcaagccatgttaaggcgctggtttgtggaagtggaaggaacagtgaaggcttatgtttgggacaataataaggatctggcggagtggctagagaaacagctgacagaggaggatggtgttcactcggtaatagaggaaaacatcaaatgcatcagcagagactacgtcctcaagcaaatccgcagcttggtccaggccaatccagaggttgccatggattccatcatccatatgacgcagcacatatcacccactcagcgagcagaagtcatacggatcctctccacaatggattccccttccacgtaggaagagcttcctgcctgtccctgccctgtctctggagaaaagggctagagctgccttttacaactgtaaccactgtaatgagaaggcacaggagacccagcactggagtcaaatggcattttacttcctctcgtttcaggttatgcatgacatcctgggatgtaagatcacagaatccccctccagcccaccagtcacacctaccccattcagtatttattaccctggccaggcctagtcctccactccctgcacaggactgagaaggcaatgaaaggtacaaacatgtaccatgaggtcttactaaccaaagtagggctgcccctcctgtcctgacagccccttggcctcccagcatggggaagcgtgaggagttgcccagcagtgagcagcccccctcactcctggccccatgagccgcagccacaggcagcagaggagggctaaggagaggaggaagcctcaagtccattgtttattaccccgactcttagcccagcacacagtaggcactggagaggaatgattcccagtttaaccacactacggtaccttttatgaagaaaaattagagcataaaatctactacaagctccataggaactcaaagatgagggcaaaactgtgagccaagaagcagagaaagaaaatagaaccagttattcttgatttaggggacctcaaccttgggttcagtctctgaggacaaagggaaaggtagttgttggcctgcctctcgcctgcacgtcactgctggactagctgtcgcatgtggctgggagctgcaaggccagtgcttgaggggccccagcagttccacaggtggtgaagcctgagttggcagaggaggagccagaagagaactgccctttctgcactggtggaaactagttatttatgccatgtggagagccagtgagatagatagatagtctgtttgttttgaggacttggaaagttgttcctatgaagcctggagcttggatggttttgagaggttaatggtgcctccacactcactcttccctagttccaggattactgtcctagcagctaacggttctactctcttccccagagtgtagacaggcagcaggtctccccacagctctgaaaggaccctggtgacagctacaccctcagcaccaggagctggccttcctgatgagggaggcttccaggaaacacagaatccacatgaccttaagattatttacaactcagtcatggtgctgctgtcctccaggcttactggcccctcctgactggcatcaggggcttcctcaggtggtggagagagtttactttcaacaactagtttattcaagaaaagaacttactgattcctctgttcctaaagcaagagtggcaggtgatcagggctggtgtagcatccggttcctttagtgcagctaactgcatttgtcactgatgaccaaggaggaaatcactaagacatttgagaagcagtggtatgaacgttcttggacaagccacagttctgagccttaaccctgtagtttgcacacaagaacgagctccacctccccttcttcaggaggaatctgtgcggatagattggctggacttttcaatggttctgggttgcaggtgggcactgtatggctgggtatggagcggacagcccccaggagtcagagcctcagcccggctgccctggtggaaggtacaggtgttcagcaccttcagaaaagggcataaagtggtgggggacaattctcagtccaggaaaatgcattgaccattgctggctatttgcttacctagtaagaattggattcatttttgaccagattattcttctatgcttttttgcaataaatcaaatcccacatatctacaagtggtatgaagtcctgcaccccccaggaggcctgtccaggcatgtcttcagaggcagggtgggttacactcatttacctcccctctccccaccaaattatgacacaaacgagtatgtttcctctctagaaccctgtaatgcctcctcccccatccccagagctccttactgtaggtcttaccctggacaaggattttttcaagttggaggcacagaacatgagcaatctgacattcccacagcccctcaaacatgcaaggctactaaggcaggaggagtataaatgatggatattgaccaagacctgcttggacggagaccgccatattatctgttctcttcgttcacaaaacagccttcacttgtctcagaatttgatggacacatactgtgatgagcaggagcttcagatgcactctttacacattttgttgaaataaacctctacatttgtagaagaaaaaaaaaaaaaaaaaaaaaaaaaaaaaa

SEQ ID NO: 1768 - protein, 2346 aa, Homo sapiens
MDEPSPLAQPLELNQHSRFIIGSVSEDNSEDEISNLVKLDLLEEKEGSLSPASVGSDTLSDLGISSLQDGLALHIRSSMSGLHLVKQGRDRKKIDSQRDFTVASPAEFVTRFGGNKVIEKVLIANNGIAAVKCMRSIRRWSYEMFRNERAIRFVVMVTPEDLKANAEYIKMADHYVPVPGGPNNNNYANVELILDIAKRIPVQAVWAGWGHASENPKLPELLLKNGIAFMGPPSQAMWALGDKIASSIVAQTAGIPTLPWSGSGLRVDWQENDFSKRILNVPQELYEKGYVKDVDDGLQAAEEVGYPVMIKASEGGGGKGIRKVNNADDFPNLFRQVQAEVPGSPIFVMRLAKQSRHLEVQILADQYGNAISLFGRDCSVQRRHQKIIEEAPATIATPAVFEHMEQCAVKLAKMVGYVSAGTVEYLYSQDGSFYFLELNPRLQVEHPCTEMVADVNLPAAQLQIAMGIPLYRIKDIRMMYGVSPWGDSPIDFEDSAHVPCPRGHVIAARITSENPDEGFKPSSGTVQELNFRSNKNVWGYFSVAAAGGLHEFADSQFGHCFSWGENREEAISNMVVALKELSIRGDFRTTVEYLIKLLETESFQMNRIDTGWLDRLIAEKVQAERPDTMLGVVCGALHVADVSLRNSVSNFLHSLERGQVLPAHTLLNTVDVELIYEGVKYVLKVTRQSPNSYVVIMNGSCVEVDVHRLSDGGLLLSYDGSSYTTYMKEEVDRYRITIGNKTCVFEKENDPSVMRSPSAGKLIQYIVEDGGHVFAGQCYAEIEVMKMVMTLTAVESGCIHYVKRPGAALDPGCVLAKMQLDNPSKVQQAELHTGSLPRIQSTALRGEKLHRVFHYVLDNLVNVMNGYCLPDPFFSSKVKDWVERLMKTLRDPSLPLLELQDIMTSVSGRIPPNVEKSIKKEMAQYASNITSVLCQFPSQQIANILDSHAATLNRKSEREVFFMNTQSIVQLVQRYRSGIRGHMKAVVMDLLRQYLRVETQFQNGHYDKCVFALREENKSDMNTVLNYIFSHAQVTKKNLLVTMLIDQLCGRDPTLTDELLNILTELTQLSKTTNAKVALRARQVLIASHLPSYELRHNQVESIFLSAIDMYGHQFCIENLQKLILSETSIFDVLPNFFYHSNQVVRMAALEVYVRRAYIAYELNSVQHRQLKDNTCVVEFQFMLPTSHPNRGNIPTLNRMSFSSNLNHYGMTHVASVSDVLLDNSFTPPCQRMGGMVSFRTFEDFVRIFDEVMGCFSDSPPQSPTFPEAGHTSLYDEDKVPRDEPIHILNVAIKTDCDIEDDRLAAMFREFTQQNKATLVDHGIRRLTFLVAQKDFRKQVNYEVDRRFHREFPKFFTFRARDKFEEDRIYRHLEPALAFQLELNRMRNFDLTAIPCANHKMHLYLGAAKVEVGTEVTDYRFFVRAIIRHSDLVTKEASFEYLQNEGERLLLEAMDELEVAFNNTNVRTDCNHIFLNFVPTVIMDPSKIEESVRSMVMRYGSRLWKLRVLQAELKINIRLTPTGKAIPIRLFLTNESGYYLDISLYKEVTDSRTAQIMFQAYGDKQGPLHGMLINTPYVTKDLLQSKRFQAQSLGTTYIYDIPEMFRQSLIKLWESMSTQAFLPSPPLPSDMLTYTELVLDDQGQLVHMNRLPGGNEIGMVAWKMTFKSPEYPEGRDIIVIGNDITYRIGSFGPQEDLLFLRASELARAEGIPRIYVSANSGARIGLAEEIRHMFHVAWVDPEDPYKGYRYLYLTPQDYKRVSALNSVHCEHVEDEGESRYKITDIIGKEEGIGPENLRGSGMIAGESSLAYNEIITISLVTCRAIGIGAYLVRLGQRTIQVENSHLILTGAGALNKVLGREVYTSNNQLGGIQIMHNNGVTHCTVCDDFEGVFTVLHWLSYMPKSVHSSVPLLNSKDPIDRIIEFVPTKTPYDPRWMLAGRPHPTQKGQWLSGFFDYGSFSEIMQPWAQTVVVGRARLGGIPVGVVAVETRTVELSIPADPANLDSEAKIIQQAGQVWFPDSAFKTYQAIKDFNREGLPLMVFANWRGFSGGMKDMYDQVLKFGAYIVDGLRECCQPVLVYIPPQAELRGGSWVVIDSSINPRHMEMYADRESRGSVLEPEGTVEIKFRRKDLVKTMRRVDPVYIHLAERLGTPELSTAERKELENKLKEREEFLIPIYHQVAVQFADLHDTPGRMQEKGVISDILDWKTSRTFFYWRLRRLLLEDLVKKKIHNANPELTDGQIQAMLRRWFVEVEGTVKAYVWDNNKDLAEWLEKQLTEEDGVHSVIEENIKCISRDYVLKQIRSLVQANPEVAMDSIIHMTQHISPTQRAEVIRILSTMDSPST

SEQ ID NO: 1769 - DNA, 9655 bp, Homo sapiens
ggcagccaggagaggcagtggagcttttctccgttgactgtcagaagaaagtgactgttgttgaaaatgtttgctgcaactaaaggagagctgctaagatctactttctagttaaacaagcttttatatttctccccggctcctctcagttcccttgggaaatcaactaattgtgtgtgtaagctaagtgtgtggaggagagaagatgcaaaaaggaagagaaaggtggggaaagaaggaaattgggaacaattagacaaaaagactatagtttgaggccatcaggagtattctagtctgactgaagccaggcagaaggcacagtatctcttgtcctcctgggttttaagcagctgcaacaggaggaggaactgcggcttgtgtttacaaggccgaaatctgaagaaaaagcttccattcttttcccatcttgatatggagggttctccagaggaaaataaggaaatgagatattacatgcttcaaaggtccagcatgtctggcttgcacctagtaaagcagggccgagacagaaagaaaatagattctcaacgagatttcactgtggcttctccagcagaatttgttactcgctttgggggaaataaagtgattgagaaggttcttattgctaacaatggcattgcagcagtgaaatgcatgcggtctatccgtaggtggtcttatgaaatgtttcgaaatgaacgtgcaattagattcgttgtcatggtcacacctgaagaccttaaagccaatgcagaatacattaagatggcagatcactatgtgccagtgcctggaggaccaaacaacaacaactatgcaaatgtggaattaattcttgatattgctaaaaggatcccagtacaagcagtgtgggctggctggggtcatgcttctgagaatcccaaactaccggaacttctcttgaaaaatggcattgccttcatgggtcctccaagccaggccatgtgggctttaggggataagattgcatcttccatagtggctcaaactgcaggtatcccaactcttccctggagcggcagtggtcttcgtgtggactggcaggaaaatgatttttcaaaacgtatcttaaatgttccccaggagctatatgaaaaaggttatgtgaaagatgtggatgatgggctacaggcagctgaggaagttggatatccagtaatgatcaaggcctcagagggaggaggagggaagggaattagaaaagtcaacaatgcagatgacttccctaatctcttcagacaggttcaagctgaagttcctggatctcccatatttgtgatgagactagccaaacaatctcgtcatctggaggtgcagatcttagcggaccaatatggcaatgctatctctttgtttggtcgtgattgctctgtacaacgcaggcatcagaagattattgaagaagcacctgctactattgctactccagcagtatttgaacacatggaacagtgtgcggtgaaacttgccaaaatggtgggttatgtgagtgctgggactgtggaatacctgtacagccaggatggcagcttctactttctggaattgaatcctcggctgcaggtagagcacccttgtacagagatggtggctgatgtcaatctccctgcagcacagctccagattgccatggggattcctctatatagaatcaaggatatccgtatgatgtatggggtatctccctggggtgattctcccattgattttgaagattctgcacacgttccttgtccaaggggccatgttattgctgctcggatcactagtgaaaatccagatgagggttttaagcccagctcaggaacagttcaggagctaaatttccgcagcaataagaatgtttggggatatttcagtgttgctgctgcagggggacttcatgaatttgctgattctcagtttggtcactgcttttcttggggagaaaacagagaagaggcaatttcaaacatggtggtggctttgaaggagctgtctattcggggtgactttcgaactacagttgaatacctgatcaaattgttagagactgaaagctttcagatgaacagaattgatactggctggctggacagactgatagcagaaaaagtacaggctgagcgacctgacaccatgttgggggttgtgtgtggtgccctccacgtggcagatgtgagcctgcggaatagcgtctctaacttccttcactccttagaaaggggtcaagtccttcctgctcatacacttctgaatacagtagatgttgaacttatctatgagggagtcaagtatgtacttaaggtgactcgacagtcccccaactcctatgtggtgatcatgaatggctcatgtgtagaagtagatgtacatcggctgagtgacggtggactgctcttgtcctatgatggcagcagttatactacgtatatgaaagaggaagtggatagatatcgcatcacaattggcaataaaacctgtgtgtttgagaaggaaaatgacccatcggtgatgcgctcaccttctgctgggaagttaatccagtacattgtagaagatggaggtcatgtgtttgccggccagtgctatgctgagattgaggtaatgaagatggtaatgaccttaacagctgtggagtctggctgtatccattacgtcaagcgacctggagcagctcttgaccctggctgtgtactagccaaaatgcaactggacaaccccagcaaggttcagcaggctgaacttcacacaggtagtctgccacggatccagagcacggcactcagaggcgagaaactccatcgagtgttccattatgtcctggataatctggtcaatgtaatgaatggatactgccttccagatcctttctttagcagcaaggtaaaagactgggtagagcgattgatgaaaaccctcagagatccctccctgcctctcctagaattgcaagatattatgaccagtgtgtctggccgcattccccccaatgtggagaagtctatcaagaaggaaatggctcagtatgctagcaacatcacatcagtcctctgtcagtttcccagccagcagattgcaaacatcctagatagccatgcagctacattgaaccggaaatctgaacgggaagtcttctttatgaatactcagagcattgttcagctggtacagaggtaccgaagtggcatccgaggccacatgaaggctgtggtgatggatctgctccggcagtacctgcgagtagagacacaattccagaatggtcactatgacaaatgtgtattcgccctccgagaagagaataaaagtgacatgaacactgtactgaactacatcttctctcacgctcaagtcaccaagaagaatcttctggtcacaatgcttattgatcagttgtgtggccgggaccctactctcactgatgagctgctgaatattctcacagagctaactcaactcagtaagaccaccaatgccaaagtagcacttcgagcacgccaggttcttattgcctcccatttgccatcatatgagcttcgccataaccaagtagagtctatcttcctatcagctattgacatgtatggacatcaattttgcattgagaacctgcagaaactcatcctatcagaaacatctatttttgatgtcctaccaaacttcttctatcacagcaaccaagtagtgaggatggcagctctggaggtgtatgttcgaagggcttatattgcctatgaacttaacagcgtacaacaccgccagcttaaggacaacacctgtgtggtggaattccagttcatgctgcccacatctcatccaaacagagggaacatccctacgctaaacagaatgtccttctcctccaacctcaaccactatggcatgacccatgtagctagtgtcagcgatgtactgttggacaactcattcactccaccttgtcagcggatgggcggaatggtctcttttcggacttttgaagattttgtcaggatctttgatgaagtgatgggctgcttctctgactccccaccccagagtcccacattccctgaggcaggtcacacgtctctttatgatgaggataaggttcccagggatgaaccaattcacattctcaatgtggctatcaagactgactgtgatattgaggatgacaggctggcagctatgttcagagaatttacccagcaaaataaagctaccctggttgaccatgggatccggcgccttactttcctggttgcacaaaaggatttcagaaagcaggtcaactatgaggtggatcggagatttcatagagaattccctaaattttttacattccgagcaagggataagtttgaggaggatcgtatctatcgtcatctggagcctgctctggctttccagttagagctgaaccggatgagaaattttgacctcactgccattccatgtgctaatcacaagatgcacctgtatctcggggcagccaaggtggaagtgggcacagaagtgacagactacaggttctttgttcgtgcaatcatcaggcattctgatctggtcaccaaggaagcttcttttgaatatctgcaaaatgaaggggagcggctactcctggaagccatggatgagttggaagttgcttttaacaatacaaatgtccgcactgactgtaaccacatcttcctcaactttgtgcccacggttatcatggacccatcaaagattgaggaatccgtgcggagcatggtaatgcggtatggaagtcgcctgtggaaattgcgcgtcctccaggcagaactgaaaatcaacattcgcctgacgccaactggaaaagcaattcccatccgcctcttcctgacaaacgagtctggctattacttggatatcagcctatacaaggaagtgactgactccaggacagcacagatcatgtttcaggcatatggagacaaacagggaccactgcatggaatgttaatcaatactccatatgtgaccaaagacctgctgcaatcaaagaggttccaggcacaatccttagggacaacatacatatatgatatcccagagatgtttcggcagtccctgatcaaactctgggagtctatgtccactcaagcatttcttccatctccccctctgccttctgacatgctgacttacactgaactggtactggatgatcaaggtcagctggtccacatgaacaggcttccaggaggaaatgagattggcatggtagcttggaaaatgacctttaaaagtcctgaatatccagaaggccgagatatcattgttattggcaatgacatcacataccgaattgggtcctttgggcctcaagaggatttgttatttctcagagcttccgaacttgctagggcagaaggtattccacgcatctatgtatcagccaacagtggagcaagaatcggactggcagaagaaattcgccatatgtttcatgtggcctgggtagatcctgaggatccttacaagggatacaggtatttatatctgactcctcaagattataagagagtcagtgctctcaactctgtccattgtgaacacgtggaagatgaaggagaatccaggtacaagataacagatattattgggaaagaagagggaattggacccgagaaccttcgaggttctggaatgattgctggagaatcctcattggcctataatgagatcattaccatcagcctggtgacgtgccgggccattgggattggggcttaccttgtccggctgggacagagaaccatccaggttgagaattctcacttaattctaacaggagctggagccctcaacaaagtcctcgggcgggaagtgtacacctccaataaccagctggggggcatccagattatgcacaacaatggggtgacccactgcactgtgtgtgatgactttgaaggggttttcactgtcctgcactggctgtcttacatgcccaagagcgtgcacagttcagttcctcttctgaactcaaaggatcctatagacagaatcatcgagtttgttcccacaaagaccccatacgatcctcgatggatgctagcaggccgtcctcacccaacccaaaaaggtcagtggttgagtggcttttttgactatggatctttctcagagattatgcagccctgggcacagactgtggtggttggtagagccaggctaggaggaatacctgtgggagttgttgctgtagaaacccgaacagtagaactaagtatcccagctgatccagcaaacctggattctgaagccaagataatccagcaggctggccaggtttggttcccagattctgcgtttaagacgtatcaggccatcaaggacttcaaccgggaagggctgcctctgatggtctttgccaactggagaggcttctctggtggaatgaaagatatgtacgaccaagtgctgaagtttggtgcttacattgtggatggcttgagggagtgctgccagcctgtgctggtttacattcctccccaggctgagctgcggggtggctcctgggtggtgattgactcctccatcaacccccggcacatggagatgtatgctgaccgagaaagcaggggatctgttctggagccagaagggacagtagaaatcaaattccgcagaaaggatctggtgaaaaccatgcgtcgggtggacccagtctacatccacttggctgagcgattggggaccccagagctaagcacagctgagcggaaggagttggagaacaagttgaaggagcgggaggaattcctaattcccatttaccatcaggtagccgtgcagtttgctgacttgcacgacacaccaggccggatgcaggagaagggtgttattagcgatatcctggattggaaaacatcccgtaccttcttctactggcggctgaggcgtcttctgctggaggacctggtcaagaagaaaatccacaatgccaaccctgagctgactgatggccagattcaagccatgttaaggcgctggtttgtggaagtggaaggaacagtgaaggcttatgtttgggacaataataaggatctggcggagtggctagagaaacagctgacagaggaggatggtgttcactcggtaatagaggaaaacatcaaatgcatcagcagagactacgtcctcaagcaaatccgcagcttggtccaggccaatccagaggttgccatggattccatcatccatatgacgcagcacatatcacccactcagcgagcagaagtcatacggatcctctccacaatggattccccttccacgtaggaagagcttcctgcctgtccctgccctgtctctggagaaaagggctagagctgccttttacaactgtaaccactgtaatgagaaggcacaggagacccagcactggagtcaaatggcattttacttcctctcgtttcaggttatgcatgacatcctgggatgtaagatcacagaatccccctccagcccaccagtcacacctaccccattcagtatttattaccctggccaggcctagtcctccactccctgcacaggactgagaaggcaatgaaaggtacaaacatgtaccatgaggtcttactaaccaaagtagggctgcccctcctgtcctgacagccccttggcctcccagcatggggaagcgtgaggagttgcccagcagtgagcagcccccctcactcctggccccatgagccgcagccacaggcagcagaggagggctaaggagaggaggaagcctcaagtccattgtttattaccccgactcttagcccagcacacagtaggcactggagaggaatgattcccagtttaaccacactacggtaccttttatgaagaaaaattagagcataaaatctactacaagctccataggaactcaaagatgagggcaaaactgtgagccaagaagcagagaaagaaaatagaaccagttattcttgatttaggggacctcaaccttgggttcagtctctgaggacaaagggaaaggtagttgttggcctgcctctcgcctgcacgtcactgctggactagctgtcgcatgtggctgggagctgcaaggccagtgcttgaggggccccagcagttccacaggtggtgaagcctgagttggcagaggaggagccagaagagaactgccctttctgcactggtggaaactagttatttatgccatgtggagagccagtgagatagatagatagtctgtttgttttgaggacttggaaagttgttcctatgaagcctggagcttggatggttttgagaggttaatggtgcctccacactcactcttccctagttccaggattactgtcctagcagctaacggttctactctcttccccagagtgtagacaggcagcaggtctccccacagctctgaaaggaccctggtgacagctacaccctcagcaccaggagctggccttcctgatgagggaggcttccaggaaacacagaatccacatgaccttaagattatttacaactcagtcatggtgctgctgtcctccaggcttactggcccctcctgactggcatcaggggcttcctcaggtggtggagagagtttactttcaacaactagtttattcaagaaaagaacttactgattcctctgttcctaaagcaagagtggcaggtgatcagggctggtgtagcatccggttcctttagtgcagctaactgcatttgtcactgatgaccaaggaggaaatcactaagacatttgagaagcagtggtatgaacgttcttggacaagccacagttctgagccttaaccctgtagtttgcacacaagaacgagctccacctccccttcttcaggaggaatctgtgcggatagattggctggacttttcaatggttctgggttgcaggtgggcactgtatggctgggtatggagcggacagcccccaggagtcagagcctcagcccggctgccctggtggaaggtacaggtgttcagcaccttcagaaaagggcataaagtggtgggggacaattctcagtccaggaaaatgcattgaccattgctggctatttgcttacctagtaagaattggattcatttttgaccagattattcttctatgcttttttgcaataaatcaaatcccacatatctacaagtggtatgaagtcctgcaccccccaggaggcctgtccaggcatgtcttcagaggcagggtgggttacactcatttacctcccctctccccaccaaattatgacacaaacgagtatgtttcctctctagaaccctgtaatgcctcctcccccatccccagagctccttactgtaggtcttaccctggacaaggattttttcaagttggaggcacagaacatgagcaatctgacattcccacagcccctcaaacatgcaaggctactaaggcaggaggagtataaatgatggatattgaccaagacctgcttggacggagaccgccatattatctgttctcttcgttcacaaaacagccttcacttgtctcagaatttgatggacacatactgtgatgagcaggagcttcagatgcactctttacacattttgttgaaataaacctctacatttgtagaagaaaaaaaaaaaaaaaaaaaaaaaaaaaaaa

SEQ ID NO: 1770 - protein, 2288 aa, Homo sapiens
MEGSPEENKEMRYYMLQRSSMSGLHLVKQGRDRKKIDSQRDFTVASPAEFVTRFGGNKVIEKVLIANNGIAAVKCMRSIRRWSYEMFRNERAIRFVVMVTPEDLKANAEYIKMADHYVPVPGGPNNNNYANVELILDIAKRIPVQAVWAGWGHASENPKLPELLLKNGIAFMGPPSQAMWALGDKIASSIVAQTAGIPTLPWSGSGLRVDWQENDFSKRILNVPQELYEKGYVKDVDDGLQAAEEVGYPVMIKASEGGGGKGIRKVNNADDFPNLFRQVQAEVPGSPIFVMRLAKQSRHLEVQILADQYGNAISLFGRDCSVQRRHQKIIEEAPATIATPAVFEHMEQCAVKLAKMVGYVSAGTVEYLYSQDGSFYFLELNPRLQVEHPCTEMVADVNLPAAQLQIAMGIPLYRIKDIRMMYGVSPWGDSPIDFEDSAHVPCPRGHVIAARITSENPDEGFKPSSGTVQELNFRSNKNVWGYFSVAAAGGLHEFADSQFGHCFSWGENREEAISNMVVALKELSIRGDFRTTVEYLIKLLETESFQMNRIDTGWLDRLIAEKVQAERPDTMLGVVCGALHVADVSLRNSVSNFLHSLERGQVLPAHTLLNTVDVELIYEGVKYVLKVTRQSPNSYVVIMNGSCVEVDVHRLSDGGLLLSYDGSSYTTYMKEEVDRYRITIGNKTCVFEKENDPSVMRSPSAGKLIQYIVEDGGHVFAGQCYAEIEVMKMVMTLTAVESGCIHYVKRPGAALDPGCVLAKMQLDNPSKVQQAELHTGSLPRIQSTALRGEKLHRVFHYVLDNLVNVMNGYCLPDPFFSSKVKDWVERLMKTLRDPSLPLLELQDIMTSVSGRIPPNVEKSIKKEMAQYASNITSVLCQFPSQQIANILDSHAATLNRKSEREVFFMNTQSIVQLVQRYRSGIRGHMKAVVMDLLRQYLRVETQFQNGHYDKCVFALREENKSDMNTVLNYIFSHAQVTKKNLLVTMLIDQLCGRDPTLTDELLNILTELTQLSKTTNAKVALRARQVLIASHLPSYELRHNQVESIFLSAIDMYGHQFCIENLQKLILSETSIFDVLPNFFYHSNQVVRMAALEVYVRRAYIAYELNSVQHRQLKDNTCVVEFQFMLPTSHPNRGNIPTLNRMSFSSNLNHYGMTHVASVSDVLLDNSFTPPCQRMGGMVSFRTFEDFVRIFDEVMGCFSDSPPQSPTFPEAGHTSLYDEDKVPRDEPIHILNVAIKTDCDIEDDRLAAMFREFTQQNKATLVDHGIRRLTFLVAQKDFRKQVNYEVDRRFHREFPKFFTFRARDKFEEDRIYRHLEPALAFQLELNRMRNFDLTAIPCANHKMHLYLGAAKVEVGTEVTDYRFFVRAIIRHSDLVTKEASFEYLQNEGERLLLEAMDELEVAFNNTNVRTDCNHIFLNFVPTVIMDPSKIEESVRSMVMRYGSRLWKLRVLQAELKINIRLTPTGKAIPIRLFLTNESGYYLDISLYKEVTDSRTAQIMFQAYGDKQGPLHGMLINTPYVTKDLLQSKRFQAQSLGTTYIYDIPEMFRQSLIKLWESMSTQAFLPSPPLPSDMLTYTELVLDDQGQLVHMNRLPGGNEIGMVAWKMTFKSPEYPEGRDIIVIGNDITYRIGSFGPQEDLLFLRASELARAEGIPRIYVSANSGARIGLAEEIRHMFHVAWVDPEDPYKGYRYLYLTPQDYKRVSALNSVHCEHVEDEGESRYKITDIIGKEEGIGPENLRGSGMIAGESSLAYNEIITISLVTCRAIGIGAYLVRLGQRTIQVENSHLILTGAGALNKVLGREVYTSNNQLGGIQIMHNNGVTHCTVCDDFEGVFTVLHWLSYMPKSVHSSVPLLNSKDPIDRIIEFVPTKTPYDPRWMLAGRPHPTQKGQWLSGFFDYGSFSEIMQPWAQTVVVGRARLGGIPVGVVAVETRTVELSIPADPANLDSEAKIIQQAGQVWFPDSAFKTYQAIKDFNREGLPLMVFANWRGFSGGMKDMYDQVLKFGAYIVDGLRECCQPVLVYIPPQAELRGGSWVVIDSSINPRHMEMYADRESRGSVLEPEGTVEIKFRRKDLVKTMRRVDPVYIHLAERLGTPELSTAERKELENKLKEREEFLIPIYHQVAVQFADLHDTPGRMQEKGVISDILDWKTSRTFFYWRLRRLLLEDLVKKKIHNANPELTDGQIQAMLRRWFVEVEGTVKAYVWDNNKDLAEWLEKQLTEEDGVHSVIEENIKCISRDYVLKQIRSLVQANPEVAMDSIIHMTQHISPTQRAEVIRILSTMDSPST

SEQ ID NO: 1771 - DNA, 9766 bp, Homo sapiens
ggcagccaggagaggcagtggagcttttctccgttgactgtcagaagaaagtgactgttgttgaaaatgtttgctgcaactaaaggagagctgctaagatctactttctagttaaacaagcttttatatttctccccggctcctctcagttcccttgggaaatcaactaattgtgtgtgtaagctaagtgtgtggaggagagaagatgcaaaaaggaagagaaaggtggggaaagaaggaaattgggaacaattagacaaaaagactatagtttgaggccatcaggagtattctagtctgactgaagccaggcagaaggcacagtatctcttgtcctcctgggttttaagcagctgcaacaggaggaggaactgcggcttgtgtttacaaggccgaaatctgaagaaaaagcttccattcttttcccatcttgatatggagggttctccagaggaaaataaggaaatgagatattacatgcttcaaagactttgaaatactcgtgggatatgaagtggaggtgcctagagggttgaagataatgaggacagatgaagaaatgtttgattgtgccatacttacagttgctgattttcaaggtccagcatgtctggcttgcacctagtaaagcagggccgagacagaaagaaaatagattctcaacgagatttcactgtggcttctccagcagaatttgttactcgctttgggggaaataaagtgattgagaaggttcttattgctaacaatggcattgcagcagtgaaatgcatgcggtctatccgtaggtggtcttatgaaatgtttcgaaatgaacgtgcaattagattcgttgtcatggtcacacctgaagaccttaaagccaatgcagaatacattaagatggcagatcactatgtgccagtgcctggaggaccaaacaacaacaactatgcaaatgtggaattaattcttgatattgctaaaaggatcccagtacaagcagtgtgggctggctggggtcatgcttctgagaatcccaaactaccggaacttctcttgaaaaatggcattgccttcatgggtcctccaagccaggccatgtgggctttaggggataagattgcatcttccatagtggctcaaactgcaggtatcccaactcttccctggagcggcagtggtcttcgtgtggactggcaggaaaatgatttttcaaaacgtatcttaaatgttccccaggagctatatgaaaaaggttatgtgaaagatgtggatgatgggctacaggcagctgaggaagttggatatccagtaatgatcaaggcctcagagggaggaggagggaagggaattagaaaagtcaacaatgcagatgacttccctaatctcttcagacaggttcaagctgaagttcctggatctcccatatttgtgatgagactagccaaacaatctcgtcatctggaggtgcagatcttagcggaccaatatggcaatgctatctctttgtttggtcgtgattgctctgtacaacgcaggcatcagaagattattgaagaagcacctgctactattgctactccagcagtatttgaacacatggaacagtgtgcggtgaaacttgccaaaatggtgggttatgtgagtgctgggactgtggaatacctgtacagccaggatggcagcttctactttctggaattgaatcctcggctgcaggtagagcacccttgtacagagatggtggctgatgtcaatctccctgcagcacagctccagattgccatggggattcctctatatagaatcaaggatatccgtatgatgtatggggtatctccctggggtgattctcccattgattttgaagattctgcacacgttccttgtccaaggggccatgttattgctgctcggatcactagtgaaaatccagatgagggttttaagcccagctcaggaacagttcaggagctaaatttccgcagcaataagaatgtttggggatatttcagtgttgctgctgcagggggacttcatgaatttgctgattctcagtttggtcactgcttttcttggggagaaaacagagaagaggcaatttcaaacatggtggtggctttgaaggagctgtctattcggggtgactttcgaactacagttgaatacctgatcaaattgttagagactgaaagctttcagatgaacagaattgatactggctggctggacagactgatagcagaaaaagtacaggctgagcgacctgacaccatgttgggggttgtgtgtggtgccctccacgtggcagatgtgagcctgcggaatagcgtctctaacttccttcactccttagaaaggggtcaagtccttcctgctcatacacttctgaatacagtagatgttgaacttatctatgagggagtcaagtatgtacttaaggtgactcgacagtcccccaactcctatgtggtgatcatgaatggctcatgtgtagaagtagatgtacatcggctgagtgacggtggactgctcttgtcctatgatggcagcagttatactacgtatatgaaagaggaagtggatagatatcgcatcacaattggcaataaaacctgtgtgtttgagaaggaaaatgacccatcggtgatgcgctcaccttctgctgggaagttaatccagtacattgtagaagatggaggtcatgtgtttgccggccagtgctatgctgagattgaggtaatgaagatggtaatgaccttaacagctgtggagtctggctgtatccattacgtcaagcgacctggagcagctcttgaccctggctgtgtactagccaaaatgcaactggacaaccccagcaaggttcagcaggctgaacttcacacaggtagtctgccacggatccagagcacggcactcagaggcgagaaactccatcgagtgttccattatgtcctggataatctggtcaatgtaatgaatggatactgccttccagatcctttctttagcagcaaggtaaaagactgggtagagcgattgatgaaaaccctcagagatccctccctgcctctcctagaattgcaagatattatgaccagtgtgtctggccgcattccccccaatgtggagaagtctatcaagaaggaaatggctcagtatgctagcaacatcacatcagtcctctgtcagtttcccagccagcagattgcaaacatcctagatagccatgcagctacattgaaccggaaatctgaacgggaagtcttctttatgaatactcagagcattgttcagctggtacagaggtaccgaagtggcatccgaggccacatgaaggctgtggtgatggatctgctccggcagtacctgcgagtagagacacaattccagaatggtcactatgacaaatgtgtattcgccctccgagaagagaataaaagtgacatgaacactgtactgaactacatcttctctcacgctcaagtcaccaagaagaatcttctggtcacaatgcttattgatcagttgtgtggccgggaccctactctcactgatgagctgctgaatattctcacagagctaactcaactcagtaagaccaccaatgccaaagtagcacttcgagcacgccaggttcttattgcctcccatttgccatcatatgagcttcgccataaccaagtagagtctatcttcctatcagctattgacatgtatggacatcaattttgcattgagaacctgcagaaactcatcctatcagaaacatctatttttgatgtcctaccaaacttcttctatcacagcaaccaagtagtgaggatggcagctctggaggtgtatgttcgaagggcttatattgcctatgaacttaacagcgtacaacaccgccagcttaaggacaacacctgtgtggtggaattccagttcatgctgcccacatctcatccaaacagagggaacatccctacgctaaacagaatgtccttctcctccaacctcaaccactatggcatgacccatgtagctagtgtcagcgatgtactgttggacaactcattcactccaccttgtcagcggatgggcggaatggtctcttttcggacttttgaagattttgtcaggatctttgatgaagtgatgggctgcttctctgactccccaccccagagtcccacattccctgaggcaggtcacacgtctctttatgatgaggataaggttcccagggatgaaccaattcacattctcaatgtggctatcaagactgactgtgatattgaggatgacaggctggcagctatgttcagagaatttacccagcaaaataaagctaccctggttgaccatgggatccggcgccttactttcctggttgcacaaaaggatttcagaaagcaggtcaactatgaggtggatcggagatttcatagagaattccctaaattttttacattccgagcaagggataagtttgaggaggatcgtatctatcgtcatctggagcctgctctggctttccagttagagctgaaccggatgagaaattttgacctcactgccattccatgtgctaatcacaagatgcacctgtatctcggggcagccaaggtggaagtgggcacagaagtgacagactacaggttctttgttcgtgcaatcatcaggcattctgatctggtcaccaaggaagcttcttttgaatatctgcaaaatgaaggggagcggctactcctggaagccatggatgagttggaagttgcttttaacaatacaaatgtccgcactgactgtaaccacatcttcctcaactttgtgcccacggttatcatggacccatcaaagattgaggaatccgtgcggagcatggtaatgcggtatggaagtcgcctgtggaaattgcgcgtcctccaggcagaactgaaaatcaacattcgcctgacgccaactggaaaagcaattcccatccgcctcttcctgacaaacgagtctggctattacttggatatcagcctatacaaggaagtgactgactccaggacagcacagatcatgtttcaggcatatggagacaaacagggaccactgcatggaatgttaatcaatactccatatgtgaccaaagacctgctgcaatcaaagaggttccaggcacaatccttagggacaacatacatatatgatatcccagagatgtttcggcagtccctgatcaaactctgggagtctatgtccactcaagcatttcttccatctccccctctgccttctgacatgctgacttacactgaactggtactggatgatcaaggtcagctggtccacatgaacaggcttccaggaggaaatgagattggcatggtagcttggaaaatgacctttaaaagtcctgaatatccagaaggccgagatatcattgttattggcaatgacatcacataccgaattgggtcctttgggcctcaagaggatttgttatttctcagagcttccgaacttgctagggcagaaggtattccacgcatctatgtatcagccaacagtggagcaagaatcggactggcagaagaaattcgccatatgtttcatgtggcctgggtagatcctgaggatccttacaagggatacaggtatttatatctgactcctcaagattataagagagtcagtgctctcaactctgtccattgtgaacacgtggaagatgaaggagaatccaggtacaagataacagatattattgggaaagaagagggaattggacccgagaaccttcgaggttctggaatgattgctggagaatcctcattggcctataatgagatcattaccatcagcctggtgacgtgccgggccattgggattggggcttaccttgtccggctgggacagagaaccatccaggttgagaattctcacttaattctaacaggagctggagccctcaacaaagtcctcgggcgggaagtgtacacctccaataaccagctggggggcatccagattatgcacaacaatggggtgacccactgcactgtgtgtgatgactttgaaggggttttcactgtcctgcactggctgtcttacatgcccaagagcgtgcacagttcagttcctcttctgaactcaaaggatcctatagacagaatcatcgagtttgttcccacaaagaccccatacgatcctcgatggatgctagcaggccgtcctcacccaacccaaaaaggtcagtggttgagtggcttttttgactatggatctttctcagagattatgcagccctgggcacagactgtggtggttggtagagccaggctaggaggaatacctgtgggagttgttgctgtagaaacccgaacagtagaactaagtatcccagctgatccagcaaacctggattctgaagccaagataatccagcaggctggccaggtttggttcccagattctgcgtttaagacgtatcaggccatcaaggacttcaaccgggaagggctgcctctgatggtctttgccaactggagaggcttctctggtggaatgaaagatatgtacgaccaagtgctgaagtttggtgcttacattgtggatggcttgagggagtgctgccagcctgtgctggtttacattcctccccaggctgagctgcggggtggctcctgggtggtgattgactcctccatcaacccccggcacatggagatgtatgctgaccgagaaagcaggggatctgttctggagccagaagggacagtagaaatcaaattccgcagaaaggatctggtgaaaaccatgcgtcgggtggacccagtctacatccacttggctgagcgattggggaccccagagctaagcacagctgagcggaaggagttggagaacaagttgaaggagcgggaggaattcctaattcccatttaccatcaggtagccgtgcagtttgctgacttgcacgacacaccaggccggatgcaggagaagggtgttattagcgatatcctggattggaaaacatcccgtaccttcttctactggcggctgaggcgtcttctgctggaggacctggtcaagaagaaaatccacaatgccaaccctgagctgactgatggccagattcaagccatgttaaggcgctggtttgtggaagtggaaggaacagtgaaggcttatgtttgggacaataataaggatctggcggagtggctagagaaacagctgacagaggaggatggtgttcactcggtaatagaggaaaacatcaaatgcatcagcagagactacgtcctcaagcaaatccgcagcttggtccaggccaatccagaggttgccatggattccatcatccatatgacgcagcacatatcacccactcagcgagcagaagtcatacggatcctctccacaatggattccccttccacgtaggaagagcttcctgcctgtccctgccctgtctctggagaaaagggctagagctgccttttacaactgtaaccactgtaatgagaaggcacaggagacccagcactggagtcaaatggcattttacttcctctcgtttcaggttatgcatgacatcctgggatgtaagatcacagaatccccctccagcccaccagtcacacctaccccattcagtatttattaccctggccaggcctagtcctccactccctgcacaggactgagaaggcaatgaaaggtacaaacatgtaccatgaggtcttactaaccaaagtagggctgcccctcctgtcctgacagccccttggcctcccagcatggggaagcgtgaggagttgcccagcagtgagcagcccccctcactcctggccccatgagccgcagccacaggcagcagaggagggctaaggagaggaggaagcctcaagtccattgtttattaccccgactcttagcccagcacacagtaggcactggagaggaatgattcccagtttaaccacactacggtaccttttatgaagaaaaattagagcataaaatctactacaagctccataggaactcaaagatgagggcaaaactgtgagccaagaagcagagaaagaaaatagaaccagttattcttgatttaggggacctcaaccttgggttcagtctctgaggacaaagggaaaggtagttgttggcctgcctctcgcctgcacgtcactgctggactagctgtcgcatgtggctgggagctgcaaggccagtgcttgaggggccccagcagttccacaggtggtgaagcctgagttggcagaggaggagccagaagagaactgccctttctgcactggtggaaactagttatttatgccatgtggagagccagtgagatagatagatagtctgtttgttttgaggacttggaaagttgttcctatgaagcctggagcttggatggttttgagaggttaatggtgcctccacactcactcttccctagttccaggattactgtcctagcagctaacggttctactctcttccccagagtgtagacaggcagcaggtctccccacagctctgaaaggaccctggtgacagctacaccctcagcaccaggagctggccttcctgatgagggaggcttccaggaaacacagaatccacatgaccttaagattatttacaactcagtcatggtgctgctgtcctccaggcttactggcccctcctgactggcatcaggggcttcctcaggtggtggagagagtttactttcaacaactagtttattcaagaaaagaacttactgattcctctgttcctaaagcaagagtggcaggtgatcagggctggtgtagcatccggttcctttagtgcagctaactgcatttgtcactgatgaccaaggaggaaatcactaagacatttgagaagcagtggtatgaacgttcttggacaagccacagttctgagccttaaccctgtagtttgcacacaagaacgagctccacctccccttcttcaggaggaatctgtgcggatagattggctggacttttcaatggttctgggttgcaggtgggcactgtatggctgggtatggagcggacagcccccaggagtcagagcctcagcccggctgccctggtggaaggtacaggtgttcagcaccttcagaaaagggcataaagtggtgggggacaattctcagtccaggaaaatgcattgaccattgctggctatttgcttacctagtaagaattggattcatttttgaccagattattcttctatgcttttttgcaataaatcaaatcccacatatctacaagtggtatgaagtcctgcaccccccaggaggcctgtccaggcatgtcttcagaggcagggtgggttacactcatttacctcccctctccccaccaaattatgacacaaacgagtatgtttcctctctagaaccctgtaatgcctcctcccccatccccagagctccttactgtaggtcttaccctggacaaggattttttcaagttggaggcacagaacatgagcaatctgacattcccacagcccctcaaacatgcaaggctactaaggcaggaggagtataaatgatggatattgaccaagacctgcttggacggagaccgccatattatctgttctcttcgttcacaaaacagccttcacttgtctcagaatttgatggacacatactgtgatgagcaggagcttcagatgcactctttacacattttgttgaaataaacctctacatttgtagaagaaaaaaaaaaaaaaaaaaaaaaaaaaaaaa

SEQ ID NO: 1772 - protein, 2268 aa, Homo sapiens
MSGLHLVKQGRDRKKIDSQRDFTVASPAEFVTRFGGNKVIEKVLIANNGIAAVKCMRSIRRWSYEMFRNERAIRFVVMVTPEDLKANAEYIKMADHYVPVPGGPNNNNYANVELILDIAKRIPVQAVWAGWGHASENPKLPELLLKNGIAFMGPPSQAMWALGDKIASSIVAQTAGIPTLPWSGSGLRVDWQENDFSKRILNVPQELYEKGYVKDVDDGLQAAEEVGYPVMIKASEGGGGKGIRKVNNADDFPNLFRQVQAEVPGSPIFVMRLAKQSRHLEVQILADQYGNAISLFGRDCSVQRRHQKIIEEAPATIATPAVFEHMEQCAVKLAKMVGYVSAGTVEYLYSQDGSFYFLELNPRLQVEHPCTEMVADVNLPAAQLQIAMGIPLYRIKDIRMMYGVSPWGDSPIDFEDSAHVPCPRGHVIAARITSENPDEGFKPSSGTVQELNFRSNKNVWGYFSVAAAGGLHEFADSQFGHCFSWGENREEAISNMVVALKELSIRGDFRTTVEYLIKLLETESFQMNRIDTGWLDRLIAEKVQAERPDTMLGVVCGALHVADVSLRNSVSNFLHSLERGQVLPAHTLLNTVDVELIYEGVKYVLKVTRQSPNSYVVIMNGSCVEVDVHRLSDGGLLLSYDGSSYTTYMKEEVDRYRITIGNKTCVFEKENDPSVMRSPSAGKLIQYIVEDGGHVFAGQCYAEIEVMKMVMTLTAVESGCIHYVKRPGAALDPGCVLAKMQLDNPSKVQQAELHTGSLPRIQSTALRGEKLHRVFHYVLDNLVNVMNGYCLPDPFFSSKVKDWVERLMKTLRDPSLPLLELQDIMTSVSGRIPPNVEKSIKKEMAQYASNITSVLCQFPSQQIANILDSHAATLNRKSEREVFFMNTQSIVQLVQRYRSGIRGHMKAVVMDLLRQYLRVETQFQNGHYDKCVFALREENKSDMNTVLNYIFSHAQVTKKNLLVTMLIDQLCGRDPTLTDELLNILTELTQLSKTTNAKVALRARQVLIASHLPSYELRHNQVESIFLSAIDMYGHQFCIENLQKLILSETSIFDVLPNFFYHSNQVVRMAALEVYVRRAYIAYELNSVQHRQLKDNTCVVEFQFMLPTSHPNRGNIPTLNRMSFSSNLNHYGMTHVASVSDVLLDNSFTPPCQRMGGMVSFRTFEDFVRIFDEVMGCFSDSPPQSPTFPEAGHTSLYDEDKVPRDEPIHILNVAIKTDCDIEDDRLAAMFREFTQQNKATLVDHGIRRLTFLVAQKDFRKQVNYEVDRRFHREFPKFFTFRARDKFEEDRIYRHLEPALAFQLELNRMRNFDLTAIPCANHKMHLYLGAAKVEVGTEVTDYRFFVRAIIRHSDLVTKEASFEYLQNEGERLLLEAMDELEVAFNNTNVRTDCNHIFLNFVPTVIMDPSKIEESVRSMVMRYGSRLWKLRVLQAELKINIRLTPTGKAIPIRLFLTNESGYYLDISLYKEVTDSRTAQIMFQAYGDKQGPLHGMLINTPYVTKDLLQSKRFQAQSLGTTYIYDIPEMFRQSLIKLWESMSTQAFLPSPPLPSDMLTYTELVLDDQGQLVHMNRLPGGNEIGMVAWKMTFKSPEYPEGRDIIVIGNDITYRIGSFGPQEDLLFLRASELARAEGIPRIYVSANSGARIGLAEEIRHMFHVAWVDPEDPYKGYRYLYLTPQDYKRVSALNSVHCEHVEDEGESRYKITDIIGKEEGIGPENLRGSGMIAGESSLAYNEIITISLVTCRAIGIGAYLVRLGQRTIQVENSHLILTGAGALNKVLGREVYTSNNQLGGIQIMHNNGVTHCTVCDDFEGVFTVLHWLSYMPKSVHSSVPLLNSKDPIDRIIEFVPTKTPYDPRWMLAGRPHPTQKGQWLSGFFDYGSFSEIMQPWAQTVVVGRARLGGIPVGVVAVETRTVELSIPADPANLDSEAKIIQQAGQVWFPDSAFKTYQAIKDFNREGLPLMVFANWRGFSGGMKDMYDQVLKFGAYIVDGLRECCQPVLVYIPPQAELRGGSWVVIDSSINPRHMEMYADRESRGSVLEPEGTVEIKFRRKDLVKTMRRVDPVYIHLAERLGTPELSTAERKELENKLKEREEFLIPIYHQVAVQFADLHDTPGRMQEKGVISDILDWKTSRTFFYWRLRRLLLEDLVKKKIHNANPELTDGQIQAMLRRWFVEVEGTVKAYVWDNNKDLAEWLEKQLTEEDGVHSVIEENIKCISRDYVLKQIRSLVQANPEVAMDSIIHMTQHISPTQRAEVIRILSTMDSPST

SEQ ID NO: 1773 - DNA, 10692 bp, Homo sapiens
ggcccccgccgggtgctgagcgcccgccaccgccctcttggccttttcccggtccccgccgcgcgcctgctgctgtccccgtgcccgaggactgggaggatggggctgagccgcttgcctgacttttgatccgaccagtaatcactttgcccgtgtggcgcgtggcccgttgcctgaggcttcctggcgcgtggggctgtttggtcccctccggagtgcggtgaggcgggccgagccgggactgcctgggtttggggataacgttcccatctccacccctgttgcagcaagggaaattgaggctgagggaactgggcccagggacggcgagccgtggctgcctctccagtccgggccccgaagggctgctcgtggatgaaccagactgattttaaggggtgaagagggtgcgtttcaatcagatgcttctggaacgtcgaaattgtcttctttggaaagaaccatcccctctttgggcttcagaggcccaaattgaggcgcaatgatgagaggatgtggtggtctactctgatgtcaatcttgagggctagggtcttgctatgtcacccagcctggagtggaattgtgtgatcaagactcactgaagcctccaactcctgggctcaagcaatcctcccacctcagccacccaagtagctgggactacaggctggagtgcaatggcatgatcttggctcactgcaacctccgcctcccggattcaacggattctcctgcctcagcctcctgagtagctgggattataggtgcctgccacaacacccaggaccagacttatgaagtggccttcctgaggagattttctgaccttatggtatgaagttccttcaggctcttaattctggataaactggagtgattaacaagagcaaagagacatagtattcagataaggactttgtgtcttatttttcttttatatcacaactggagccacagttgtgggcaaggcactgactttcttgatgaattctgtccatctgtaaagcagctatatatcccactggaggctttgcctctcagagacaacgtgaagacggataagcaggcatcaggagcagagtggcctctcagctggtcagattctccgaagaaggatcctctaggctgggcacggtggctcacacctataatcccagcactttgggaggccgaggcaggtggatcacgaggtcaggagttcgaggccagcctggccaatatggtctttctggaagtggatatctactcagacagtaagaattataagagctgtaagagctcattttggaggaataatggatgaaccatctcccttggcccaacctctggagctgaaccagcactctcgattcataataggttctgtgtctgaagataactcagaggatgagatcagcaacctggtgaagttggacctactggaggagaaggagggctccttgtcacctgcttctgttggctcagatacactctctgatttggggatctctagcctacaggatggcttggccttgcacataaggtccagcatgtctggcttgcacctagtaaagcagggccgagacagaaagaaaatagattctcaacgagatttcactgtggcttctccagcagaatttgttactcgctttgggggaaataaagtgattgagaaggttcttattgctaacaatggcattgcagcagtgaaatgcatgcggtctatccgtaggtggtcttatgaaatgtttcgaaatgaacgtgcaattagattcgttgtcatggtcacacctgaagaccttaaagccaatgcagaatacattaagatggcagatcactatgtgccagtgcctggaggaccaaacaacaacaactatgcaaatgtggaattaattcttgatattgctaaaaggatcccagtacaagcagtgtgggctggctggggtcatgcttctgagaatcccaaactaccggaacttctcttgaaaaatggcattgccttcatgggtcctccaagccaggccatgtgggctttaggggataagattgcatcttccatagtggctcaaactgcaggtatcccaactcttccctggagcggcagtggtcttcgtgtggactggcaggaaaatgatttttcaaaacgtatcttaaatgttccccaggagctatatgaaaaaggttatgtgaaagatgtggatgatgggctacaggcagctgaggaagttggatatccagtaatgatcaaggcctcagagggaggaggagggaagggaattagaaaagtcaacaatgcagatgacttccctaatctcttcagacaggttcaagctgaagttcctggatctcccatatttgtgatgagactagccaaacaatctcgtcatctggaggtgcagatcttagcggaccaatatggcaatgctatctctttgtttggtcgtgattgctctgtacaacgcaggcatcagaagattattgaagaagcacctgctactattgctactccagcagtatttgaacacatggaacagtgtgcggtgaaacttgccaaaatggtgggttatgtgagtgctgggactgtggaatacctgtacagccaggatggcagcttctactttctggaattgaatcctcggctgcaggtagagcacccttgtacagagatggtggctgatgtcaatctccctgcagcacagctccagattgccatggggattcctctatatagaatcaaggatatccgtatgatgtatggggtatctccctggggtgattctcccattgattttgaagattctgcacacgttccttgtccaaggggccatgttattgctgctcggatcactagtgaaaatccagatgagggttttaagcccagctcaggaacagttcaggagctaaatttccgcagcaataagaatgtttggggatatttcagtgttgctgctgcagggggacttcatgaatttgctgattctcagtttggtcactgcttttcttggggagaaaacagagaagaggcaatttcaaacatggtggtggctttgaaggagctgtctattcggggtgactttcgaactacagttgaatacctgatcaaattgttagagactgaaagctttcagatgaacagaattgatactggctggctggacagactgatagcagaaaaagtacaggctgagcgacctgacaccatgttgggggttgtgtgtggtgccctccacgtggcagatgtgagcctgcggaatagcgtctctaacttccttcactccttagaaaggggtcaagtccttcctgctcatacacttctgaatacagtagatgttgaacttatctatgagggagtcaagtatgtacttaaggtgactcgacagtcccccaactcctatgtggtgatcatgaatggctcatgtgtagaagtagatgtacatcggctgagtgacggtggactgctcttgtcctatgatggcagcagttatactacgtatatgaaagaggaagtggatagatatcgcatcacaattggcaataaaacctgtgtgtttgagaaggaaaatgacccatcggtgatgcgctcaccttctgctgggaagttaatccagtacattgtagaagatggaggtcatgtgtttgccggccagtgctatgctgagattgaggtaatgaagatggtaatgaccttaacagctgtggagtctggctgtatccattacgtcaagcgacctggagcagctcttgaccctggctgtgtactagccaaaatgcaactggacaaccccagcaaggttcagcaggctgaacttcacacaggtagtctgccacggatccagagcacggcactcagaggcgagaaactccatcgagtgttccattatgtcctggataatctggtcaatgtaatgaatggatactgccttccagatcctttctttagcagcaaggtaaaagactgggtagagcgattgatgaaaaccctcagagatccctccctgcctctcctagaattgcaagatattatgaccagtgtgtctggccgcattccccccaatgtggagaagtctatcaagaaggaaatggctcagtatgctagcaacatcacatcagtcctctgtcagtttcccagccagcagattgcaaacatcctagatagccatgcagctacattgaaccggaaatctgaacgggaagtcttctttatgaatactcagagcattgttcagctggtacagaggtaccgaagtggcatccgaggccacatgaaggctgtggtgatggatctgctccggcagtacctgcgagtagagacacaattccagaatggtcactatgacaaatgtgtattcgccctccgagaagagaataaaagtgacatgaacactgtactgaactacatcttctctcacgctcaagtcaccaagaagaatcttctggtcacaatgcttattgatcagttgtgtggccgggaccctactctcactgatgagctgctgaatattctcacagagctaactcaactcagtaagaccaccaatgccaaagtagcacttcgagcacgccaggttcttattgcctcccatttgccatcatatgagcttcgccataaccaagtagagtctatcttcctatcagctattgacatgtatggacatcaattttgcattgagaacctgcagaaactcatcctatcagaaacatctatttttgatgtcctaccaaacttcttctatcacagcaaccaagtagtgaggatggcagctctggaggtgtatgttcgaagggcttatattgcctatgaacttaacagcgtacaacaccgccagcttaaggacaacacctgtgtggtggaattccagttcatgctgcccacatctcatccaaacagagggaacatccctacgctaaacagaatgtccttctcctccaacctcaaccactatggcatgacccatgtagctagtgtcagcgatgtactgttggacaactcattcactccaccttgtcagcggatgggcggaatggtctcttttcggacttttgaagattttgtcaggatctttgatgaagtgatgggctgcttctctgactccccaccccagagtcccacattccctgaggcaggtcacacgtctctttatgatgaggataaggttcccagggatgaaccaattcacattctcaatgtggctatcaagactgactgtgatattgaggatgacaggctggcagctatgttcagagaatttacccagcaaaataaagctaccctggttgaccatgggatccggcgccttactttcctggttgcacaaaaggatttcagaaagcaggtcaactatgaggtggatcggagatttcatagagaattccctaaattttttacattccgagcaagggataagtttgaggaggatcgtatctatcgtcatctggagcctgctctggctttccagttagagctgaaccggatgagaaattttgacctcactgccattccatgtgctaatcacaagatgcacctgtatctcggggcagccaaggtggaagtgggcacagaagtgacagactacaggttctttgttcgtgcaatcatcaggcattctgatctggtcaccaaggaagcttcttttgaatatctgcaaaatgaaggggagcggctactcctggaagccatggatgagttggaagttgcttttaacaatacaaatgtccgcactgactgtaaccacatcttcctcaactttgtgcccacggttatcatggacccatcaaagattgaggaatccgtgcggagcatggtaatgcggtatggaagtcgcctgtggaaattgcgcgtcctccaggcagaactgaaaatcaacattcgcctgacgccaactggaaaagcaattcccatccgcctcttcctgacaaacgagtctggctattacttggatatcagcctatacaaggaagtgactgactccaggacagcacagatcatgtttcaggcatatggagacaaacagggaccactgcatggaatgttaatcaatactccatatgtgaccaaagacctgctgcaatcaaagaggttccaggcacaatccttagggacaacatacatatatgatatcccagagatgtttcggcagtccctgatcaaactctgggagtctatgtccactcaagcatttcttccatctccccctctgccttctgacatgctgacttacactgaactggtactggatgatcaaggtcagctggtccacatgaacaggcttccaggaggaaatgagattggcatggtagcttggaaaatgacctttaaaagtcctgaatatccagaaggccgagatatcattgttattggcaatgacatcacataccgaattgggtcctttgggcctcaagaggatttgttatttctcagagcttccgaacttgctagggcagaaggtattccacgcatctatgtatcagccaacagtggagcaagaatcggactggcagaagaaattcgccatatgtttcatgtggcctgggtagatcctgaggatccttacaagggatacaggtatttatatctgactcctcaagattataagagagtcagtgctctcaactctgtccattgtgaacacgtggaagatgaaggagaatccaggtacaagataacagatattattgggaaagaagagggaattggacccgagaaccttcgaggttctggaatgattgctggagaatcctcattggcctataatgagatcattaccatcagcctggtgacgtgccgggccattgggattggggcttaccttgtccggctgggacagagaaccatccaggttgagaattctcacttaattctaacaggagctggagccctcaacaaagtcctcgggcgggaagtgtacacctccaataaccagctggggggcatccagattatgcacaacaatggggtgacccactgcactgtgtgtgatgactttgaaggggttttcactgtcctgcactggctgtcttacatgcccaagagcgtgcacagttcagttcctcttctgaactcaaaggatcctatagacagaatcatcgagtttgttcccacaaagaccccatacgatcctcgatggatgctagcaggccgtcctcacccaacccaaaaaggtcagtggttgagtggcttttttgactatggatctttctcagagattatgcagccctgggcacagactgtggtggttggtagagccaggctaggaggaatacctgtgggagttgttgctgtagaaacccgaacagtagaactaagtatcccagctgatccagcaaacctggattctgaagccaagataatccagcaggctggccaggtttggttcccagattctgcgtttaagacgtatcaggccatcaaggacttcaaccgggaagggctgcctctgatggtctttgccaactggagaggcttctctggtggaatgaaagatatgtacgaccaagtgctgaagtttggtgcttacattgtggatggcttgagggagtgctgccagcctgtgctggtttacattcctccccaggctgagctgcggggtggctcctgggtggtgattgactcctccatcaacccccggcacatggagatgtatgctgaccgagaaagcaggggatctgttctggagccagaagggacagtagaaatcaaattccgcagaaaggatctggtgaaaaccatgcgtcgggtggacccagtctacatccacttggctgagcgattggggaccccagagctaagcacagctgagcggaaggagttggagaacaagttgaaggagcgggaggaattcctaattcccatttaccatcaggtagccgtgcagtttgctgacttgcacgacacaccaggccggatgcaggagaagggtgttattagcgatatcctggattggaaaacatcccgtaccttcttctactggcggctgaggcgtcttctgctggaggacctggtcaagaagaaaatccacaatgccaaccctgagctgactgatggccagattcaagccatgttaaggcgctggtttgtggaagtggaaggaacagtgaaggcttatgtttgggacaataataaggatctggcggagtggctagagaaacagctgacagaggaggatggtgttcactcggtaatagaggaaaacatcaaatgcatcagcagagactacgtcctcaagcaaatccgcagcttggtccaggccaatccagaggttgccatggattccatcatccatatgacgcagcacatatcacccactcagcgagcagaagtcatacggatcctctccacaatggattccccttccacgtaggaagagcttcctgcctgtccctgccctgtctctggagaaaagggctagagctgccttttacaactgtaaccactgtaatgagaaggcacaggagacccagcactggagtcaaatggcattttacttcctctcgtttcaggttatgcatgacatcctgggatgtaagatcacagaatccccctccagcccaccagtcacacctaccccattcagtatttattaccctggccaggcctagtcctccactccctgcacaggactgagaaggcaatgaaaggtacaaacatgtaccatgaggtcttactaaccaaagtagggctgcccctcctgtcctgacagccccttggcctcccagcatggggaagcgtgaggagttgcccagcagtgagcagcccccctcactcctggccccatgagccgcagccacaggcagcagaggagggctaaggagaggaggaagcctcaagtccattgtttattaccccgactcttagcccagcacacagtaggcactggagaggaatgattcccagtttaaccacactacggtaccttttatgaagaaaaattagagcataaaatctactacaagctccataggaactcaaagatgagggcaaaactgtgagccaagaagcagagaaagaaaatagaaccagttattcttgatttaggggacctcaaccttgggttcagtctctgaggacaaagggaaaggtagttgttggcctgcctctcgcctgcacgtcactgctggactagctgtcgcatgtggctgggagctgcaaggccagtgcttgaggggccccagcagttccacaggtggtgaagcctgagttggcagaggaggagccagaagagaactgccctttctgcactggtggaaactagttatttatgccatgtggagagccagtgagatagatagatagtctgtttgttttgaggacttggaaagttgttcctatgaagcctggagcttggatggttttgagaggttaatggtgcctccacactcactcttccctagttccaggattactgtcctagcagctaacggttctactctcttccccagagtgtagacaggcagcaggtctccccacagctctgaaaggaccctggtgacagctacaccctcagcaccaggagctggccttcctgatgagggaggcttccaggaaacacagaatccacatgaccttaagattatttacaactcagtcatggtgctgctgtcctccaggcttactggcccctcctgactggcatcaggggcttcctcaggtggtggagagagtttactttcaacaactagtttattcaagaaaagaacttactgattcctctgttcctaaagcaagagtggcaggtgatcagggctggtgtagcatccggttcctttagtgcagctaactgcatttgtcactgatgaccaaggaggaaatcactaagacatttgagaagcagtggtatgaacgttcttggacaagccacagttctgagccttaaccctgtagtttgcacacaagaacgagctccacctccccttcttcaggaggaatctgtgcggatagattggctggacttttcaatggttctgggttgcaggtgggcactgtatggctgggtatggagcggacagcccccaggagtcagagcctcagcccggctgccctggtggaaggtacaggtgttcagcaccttcagaaaagggcataaagtggtgggggacaattctcagtccaggaaaatgcattgaccattgctggctatttgcttacctagtaagaattggattcatttttgaccagattattcttctatgcttttttgcaataaatcaaatcccacatatctacaagtggtatgaagtcctgcaccccccaggaggcctgtccaggcatgtcttcagaggcagggtgggttacactcatttacctcccctctccccaccaaattatgacacaaacgagtatgtttcctctctagaaccctgtaatgcctcctcccccatccccagagctccttactgtaggtcttaccctggacaaggattttttcaagttggaggcacagaacatgagcaatctgacattcccacagcccctcaaacatgcaaggctactaaggcaggaggagtataaatgatggatattgaccaagacctgcttggacggagaccgccatattatctgttctcttcgttcacaaaacagccttcacttgtctcagaatttgatggacacatactgtgatgagcaggagcttcagatgcactctttacacattttgttgaaataaacctctacatttgtagaagaaaaaaaaaaaaaaaaaaaaaaaaaaaaaa

SEQ ID NO: 1774 - protein, 2346 aa, Homo sapiens; identical to SEQ ID NO: 1768

SEQ ID NO: 1775 - DNA, 2269 bp, Homo sapiens
gggagggctgcagctccggagcctacgggagtgtgaccctctcgcctcctggcgagaagctcttgaggagatattttcttttctaaacactaagaaatttgaggatggtggggcaaaacgactaactcccactttcctgtgactctgtagccggaaaaactgtcaaaatctgtggataaatttgtgagacaagaagaagaatggcatccagaataaatacaaatttcactttgattcccaaccagaaacttagacgtagtaatcgtcaaaccagctgttattccaagacccttggctcaggctttcaacccatatcaacatttggaaattttaaagccttaccattggaaatattccagataattttaaaatatttgtcagtgaaggatatcagcatgctaagcatggtgtccaaaacagtcagccaacacattattaattatatctcaacctcatcaggaagcaaaagacttttactacaggactttcataaccttgagctgcctgacaggagacaagactctgctatactggagcactacagatctctaggtctactgtttaaaagatgcacattgctgctacccaccaaggaaaggctaaaatacattcacaagatactcacagaagtttcctgctttaaattcaatggctgtgcagctcctatgcagtgtttaggattaacatgttatggcatgtttttacagaccttaacagcaggttgggatgaacttgagtgccatcgcgtttataatttcttatgcgaactgactaatctctgccgcaagatacaaatggctgtctgcagcaaaccaggaagtgcccgaaaactggagttaagaatcagactcttctgtaggaatgtcctccttgatcattggacacatcgaagtgattctgctttttggttgacgcgaatattaaaaccatggccaatggtgaatcaggcaagattactgtatatcatctttgggccaatatctcctcaagatggacaggtggtttggcaggaaatgatagaagaacctacagatgaattcagtctgaaaggtttggctgatgccattaagttactatatgacgctagcactaaagagtggacagcagatgatgttatcagtcttgtagatgaactatcagtggttccccgtgagtggcttctagagaataatgcacgtctcctaatgctaagtggaaacaacatctgtttcagtttcatggctagtaaagctgtgaatggacgcaccattgaactggcaaggctcgtagtctttttggctttggtgtgtgagaaagaactgtactgcatggattggacagttaaaatgatgcaaaaagtctgcaaagtctttagcactccagtggaaagaaagaacttcctgcagaatgtggcaaatgcatttgcatgtgttataatggaaatgctgcaatcaattatgtctggagaccgtgatgaagatgacagaagctttttgaatttgttccatcttgtacatgctcaggctaacttccataaggaggtcctgtatttgaccatgaatactcctctgtctacctaaatcctcagaaagccttgcctttagagaacgtcactgaacgaatgattagaggagtgctactttttcactcaaaaaatagcatccatgggactttttatcatctaagtaacctaagaattcaaaagctggatagaattttagaagcaactacgtacatcattattaatataaaaataacaggcagcctcaagaatgtgctgagatttctctggaaaacaagctctgcctctccgggttttagtcaacctaacaccaaaccaaaatagaatgttagctgttcaagaatctgggaccagccaacctgtatgtatgcatttttgaagcaagagaaaattccattttatagttagacccaaattcactaaatagtgtgtatgttcactttgtttaagttgtatagacatagcccagaatgttttgtgaagatttgcaatatggtgttttggaatgtgtagaatacaaatcacagtttttactaccttcttggcatatgcttacaaagaacattatattttgttcatgttttacatgaactaatggataaaaaacaaagtatacatatatgtctatatatatatatagacacacacacacagacatatatttccttctttaaggtaatcatacaaaaggtctatacatacaggaaggtatatattgtctcaatgcaatcaaatcatcttttactggggattcaaataaaatgtagc

SEQ ID NO: 1776 - protein, 452 aa, Homo sapiens
MASRINTNFTLIPNQKLRRSNRQTSCYSKTLGSGFQPISTFGNFKALPLEIFQIILKYLSVKDISMLSMVSKTVSQHIINYISTSSGSKRLLLQDFHNLELPDRRQDSAILEHYRSLGLLFKRCTLLLPTKERLKYIHKILTEVSCFKFNGCAAPMQCLGLTCYGMFLQTLTAGWDELECHRVYNFLCELTNLCRKIQMAVCSKPGSARKLELRIRLFCRNVLLDHWTHRSDSAFWLTRILKPWPMVNQARLLYIIFGPISPQDGQVVWQEMIEEPTDEFSLKGLADAIKLLYDASTKEWTADDVISLVDELSVVPREWLLENNARLLMLSGNNICFSFMASKAVNGRTIELARLVVFLALVCEKELYCMDWTVKMMQKVCKVFSTPVERKNFLQNVANAFACVIMEMLQSIMSGDRDEDDRSFLNLFHLVHAQANFHKEVLYLTMNTPLST

SEQ ID NO: 1777 - DNA, 3229 bp, Homo sapiens
atggctccggctcagggcgcggcgccagcgcctgtcatgtcccagctgcgcctctgggtcccacggcacctcctcaggttggcaactacttctcccacccgaatctccctttgcgcttacccccgacccccgcccccaccggcagaccccggggactttgattacctggggtcctctgcttcctcccagatgtcagctccgcctcaggaatcgactgagactttgaccgagactttggttccattcctggacacagattcagctggagagctggccccggggccagagcagttagcggctgcacaccaggacctgaatgacaagctgacttggcaagaaaggctcccagagggggtctcagtgctggactgggatcagaaacagacctttgctcggcctcctcgcctcaaaagaggccccagctcagcctccagaggagtggaaccttctgcgagccaggaggaggccccgactgagcctccaggtcctcctgtggaacctgaacgttcccccggtgagcaggagcagccagctcagccttctatttcttctgggaaggctgaatcttctccagcccagcagaaggccccagctcagcctccagaacatcatgaagtgacagtttcacctccaggtcactgtcaagctcagcattcagatttgcccaatgtcactattaggcctccagacatgcagctcactatagcaacagagcctactgcagaggtgggaagttctccaatccaccaggaggctacagctcaggtctcagggccaggaagtgatgtagaaccttctgccacccagcatggtggtgcacctctgcgtccagagtcatcagaagatgctggacctttagcaggtcaacaggagacttcagttcaatctccagaacctgttaataatgagaacccctctccaacccagcaggaagctgcagctgagcatccacagacccctgaggaggctgagtcttctccagcccagcaagaggcccaacctcagactccagatccccctaaggaggtagaaccttctccagtccagcaagagttcccagctgagccaccagagccccctaaggaggttgaaccatctgcaacccagcagcaagcctcaggtcagcctccaaagtccactgaagaggtcagtcctccaccacagcaggagataccagctcagccatcagagccacctgagaaggtcaaaccatctccagtcctacagcagaccccaactcagcttttagagccacctaaagaggtagaatcctctccagttcagcaggcaggccctgctcagtcctcagaggcccctgtggtcatagaaccctctcggacccagcagatggccccatcttcacctccagagctccctcaggaagtggaaccatctcttaactcagcagggggttccagctcagactccagagccccctatggaggcagaaccttctccaatccagcaggaggccacagttcagactccagagccccctatggaggtagaaccttcaagccagcagctggtcccagctcagcatccagagtcacctaaggaggttgcagctcaacctccagtgcatgagatgacaattccaatagcaggccaggaccaagcccagattccagtatcacccagtgtcacatttcaacctttagacctgggacttaccgtcactccaaaatccactatggaggctgagtattctacaaccccaaggaagactacagctcctccaaaacaccctgaggtgatgcttccacctcctgaccaggttcaggctcagcacacaaacctaacaggtcaggatcaagctcagcattcaacactgtccagtgtcacagttcagcctttgggcctggggcttaccatcactccagaatccatgacagaggttgaactttctccaaccattcaggagaccccaacttagcctcctaaggaagttgtaccccaacctccagcatatcaaggggtaacagttccaacaccaggtcaggatcaagctcagcatccaatgtcacccagcgttacagctcaacctttggacctgggacttaccatcactccagaacccactacagaggttgaacattctacacccctgaagaagattcctcccaagcaccctaaagtgacacttccacatccagaccaggttcagactctccattcgaacctgactcaacatccaacatcacccagagtcacagttcaacctttggatctggggcttaccatcactccagaatccattacaaaggttgaaccgtctacagccctgatgactacagctcctcctccagagcaccttgaggtgacacttccaccgccagacaagggtcaggctcagcattcaaacctgactcaagtcacagttcaacctctggacctggagcttaccataactatagaacctactatagatgttaaaccgtctccaaccacggaggagacctcaactcagtctccagacctggggcttgccatcactccagaacccactacagagattggatattctacagccctggagaagactatagctccacgtccagaccaggttcagactcagcatcgaaacctgactgaagtcacaggtccacctactgaactagaacctactcaggattcactggtgcagtctgaaaattacgcccaaaataaggctttaactgcaccagaggaacagaaggcctccacaagcaccaacatatgtgatctctgtacctgcggagatgagacgctgtcgtgtatcgatctcagcccaaagcagaggctccgctgagtgcctgtgccagagcccaacacctacaatggcaccttcaccatcttaaatttccaaggaaactatatttcttacattggtgaagatgtatggaaagcatacagttggactgagaaactaattttgaggtcggcctgcggatccaccagggggctccgttccttctgggccaaagctgaagaagcggctgctgcaccagagaagtgcatctggatgaaggtggaagcacacgcgggcccgcagaaccgcctaagatatcttcagatgtgtcagaccaccaaatcccatgtctactgctgccctccagaagaaagggtttatacagagccaaacaccaaggcagaaaccaatttccagcatgtggtcctgggctatggaaacctctccttctgcctgggactctcactctccagagacgagttcattcaggtcatctga

SEQ ID NO: 1778 - DNA, 6140 bp, Homo sapiens
gcggccgcagcctgagccagggccccctccctcgtcaggaccggggcagcaagcaggccgggggcaggtccgggcacccaccatgcgaggcgagctctggctcctggtgctggtgctcagggaggctgcccgggcgctgagcccccagcccggagcaggtcacgatgagggcccaggctctggatgggctgccaaagggaccgtgcggggctggaaccggagagcccgagagagccctgggcatgtgtcagagccggacaggacccagctgagccaggacctgggtgggggcaccctggccatggacacgctgccagataacaggaccagggtggtggaggacaaccacagctattatgtgtcccgtctctatggccccagcgagccccacagccgggaactgtgggtagatgtggccgaggccaaccggagccaagtgaagatccacacaatactctccaacacccaccggcaggcttcgagagtggtcttgtcctttgatttccctttctacgggcatcctctgcggcagatcaccatagcaactggaggcttcatcttcatgggggacgtgatccatcggatgctcacagctactcagtatgtggcgcccctgatggccaacttcaaccctggctactccgacaactccacagttgtttactttgacaatgggacagtctttgtggttcagtgggaccacgtttatctccaaggctgggaagacaagggcagtttcaccttccaggcagctctgcaccatgacggccgcattgtctttgcctataaagagatccctatgtctgtcccggaaatcagctcctcccagcatcctgtcaaaaccggcctatcggatgccttcatgattctcaatccatccccggatgtgccagaatctcggcgaaggagcatctttgaataccaccgcatagagctggaccccagcaaggtcaccagcatgtcggccgtggagttcaccccattgccgacctgcctgcagcataggagctgtgacgcctgcatgtcctcagacctgaccttcaactgcagctggtgccatgtcctccagagatgctccagtggctttgaccgctatcgccaggagtggatggactatggctgtgcacaggaggcagagggcaggatgtgcgaggacttccaggatgaggaccacgactcagcctcccctgacacttccttcagcccctatgatggagacctcaccactacctcctcctccctcttcatcgacagcctcaccacagaagatgacaccaagttgaatccctatgcaggaggagacggccttcagaacaacctgtcccccaagacaaagggcactcctgtgcacctgggcaccatcgtgggcatcgtgctggcagtcctcctcgtggcggccatcatcctggctggaatttacatcaatggccaccccacatccaatgctgcgctcttcttcatcgagcgtagacctcaccactggccagccatgaagtttcgcagccaccctgaccattccacctatgcggaggtggagccctcgggccatgagaaggagggcttcatggaggctgagcagtgctgagaacaccaagtctcccctttgaagactttgaggccacagaaaagacagttaaagcaaagaagagaagtgacttttcctggcctctcccagcatgccctgggctgagatgagatggtggtttatggctccagagctgctgttcgcttcgtcagcacaccccgaatattgaagagggggccaaaaaacaaccacatggattttttataggaacaacaacctaatctcatcctgttttgatgcaagggttctcttctgtgtcttgtaaccatgaaacagcagaagaactaacataactaactccatttttgtttaaggggcctttacctattcctgcacctaggctaggataactttagagcactgacataaaacgcaaaaacaggaatcatgccgtttgcaaaactaactctgggattaaaggggaagcatgtaaacagctaactgtttttgttaaagatttataggaatgaggaggtttggctattgtcacatgacagactgttagccaaggacaaagaagttctgcaaacctcccctggacccttgctggtgtccagatgtctgcggttgtcagccccttcctttcccccgacctaaacataaaagacaaggcaaagcccgcataattttaagacggttctttaggacattagtccaccatcttcttggtttgctggctctccgaaataaagtccctttccttgctccaactccttgtctctcaacgtattggctatgacgcagcaagcagaatgaatttggactcagttacaggctgtcaatggtctgctctgtagcagtctcagagcctccccgacccactacctggagatagccagatagccagatgccctgctcctggccacctttaaagcccctgcatatgacacaggttaactaaagtcaagattggggctgctgcattccaggttccctagactcacaagctggtccttggccaggtgcagtggctcacgcctgtaatcccagcactttgggaggctgaggcaggcggatcacctgaagtcagaagtttgagaccagcctggccaacataattaaaatgtctctactaaaaatacaaaaaattagctgggtgtggtgacgcttgcctgtatcccagctactcaggaagctgagacacgagaatcacttgaacctgggaggcagaggttgcagtgagctcagatagtgccactgcactccagcctgggtgacagagcgagactccgtctcaaaaaaaaaaaaagaaagcagaacctcatggctatagagttggcattttagccccagcttctgtagctctgaaagcctaaagaaggtattctctccatctgttaaacacagtatagtggctctcagcccttggggcatgttatcatgggagggaagtcaaataagaggagagaaaagaactcaagggggaaactgcatttttaggctttgctctcttaccttgccctttctactcagaaccaataacttctgcatcaaaacatgttacagcctgcatcaagggctttaccccaacctgcagcccagccttccctgggtgagcttgctatgcgcagccacatttaccatgtggggctccctattctgatggcctgttcggtgccgggtttactcactgccctgttctgatgtcagtgcctgtacatacctccaaaggcaggacttgcctgataaatatttttcctcctctgaactggattttataggcattaaagacaagtcgggtggctagagggctccttgagacatacctagcagggaactgcaggtggattctgttgagaggcaaagcacctgagtggttgggacacaggcagctggcatgggagggactttttttgagacagggtctcactgtgtcgcccagggcaaggatgcccaaagacaccaggttggagaggcacctgccaactacttgctttccctggagcctgcatgtgcctgtggggtggggaggcgtaggggtctacggctgcctgagatgggtgtgcacagtgtgtgaagtacctacctccttgccttgctggactgtcagccagtcgcagggccggccacaagacccatgtctccatctggtcatactccatagctaccaagttaacctgctctaaactttggagaactggatctgtccaataaacgcttatttggccaagcctgatggctcgtgcctgtactcccagcactttgggaggctgaggtgggagggttgcttgagcccaggggtttgagaccagcttgggcaacaacaacaaaaatgccaggtgtggtggggtgcacctgtagtcccagctactagggaggctgagccaggaggatcacttgagcccgggaggttgaggctgcagtggggggtcataatcatgccactgtactccagcctgggtgacagagtgagaccctgtctccgaaaaaaaaaaaaaaaaaagaacggaaaaagaaatgcttacattgtcagggatcctgtagacaatcattaactctatgagatgcttggttctatttttttgggagactttgtccaagtgttttggcttaagaaatccataggcctctcttggtgacacatctctagtactttttgtcataaacaaacaggccatctgccgccaaatacatccactccccatgccactgacatcctatgggtcagccaggcttgctttgactgaggccgaggcatctggaactttctctgcctgcaggggctagcagcagaggcttcaccgcatcaccaccccttcctccactcctgacattctttcccttcagggatccaaaatggttggccgagctcccagtgggaaaacgtgtgctagagttggggagtgagatgagtggtgctgtccatggaatcaggccacagcaggaactgccccactggccatttgagacacacacaggtggtaaatgctctgctggtgggctgtgcttccctcattcagagagctctgttacagcccactgtgtcctttagaagcttgaaaggaacccaactctttgctgcactgtcctttttcttcctcaaattcagaccctccttccaccggcacccccctactccaccctcagctcttccttgcctggtttatcaagcagagctgaggccccacgtttccaactctgattgtcacttgcatcttcacaaaggataaaccacggagcaactggaaaaccatcagccaagcgttcggatgagtctggttattggtccacccccgaccagattcccttacacttaactcacttctttctttggcaatgaccctcatgacatgtataaatgggtatgactaagaagaggctgtgatctaacatttatttgctgccattttttactctggggagaagcagccccaactcatcactgggaaagaactccccctgcaaaccagctaaatttgataatttaaaccccctgcccctaaaacttctcacagagctggggagttggtggcaactttccaagtcaaggtcttgcttagaaagtccttcactacatggccaggtgcagtggctcacgcctgtagtcccaggtacttgggagcctgaggcaggaggattgcttgagctcaggagttcaaggctgcagagagctatgatcatcccactgcatttgtttaaaaataaatttttaaaatttgtgtgttttatcaggggtctcctgtacagtgtatctgtgtatgtttgtgtgtgtgtttgtatacagccttgtttaatgttttgagcaataagatatgcacacacaggtattttgttgctaaagagattggacaaggttgtagctgtgctcaggcttcagcttggtttgttaaattgagagataaacaatgacaagagctgccagccaaccacactattcaaaaagcaaagtgttcaccactaaagctaaccattcatctggttgcaggcaaggctaaggctctctctcctctagttcctggaacagactcacagattggcatgaagcactgatcaggggctgcactcagactccctggccaagcaaacctacaccagaagagtcagtgtcacagatatgatgcggccaatctctgtctccaaaaacctacctgaacttaatggtagaattcaaagatctggggactgagggcacccagccttctaaaacacaatgtattcatgtgtttagtgtaaactctctgcatggattctcagtgttaataataaaaggaagcattcttttacaactcctgctgtgtgcaaaagaaagtgcaaaggatttggagtggcattccgaagatcaccacacataccttggttctgatggctgctgaactccgacttcttcgctgagacatgactgtgggaacagcctccagctatctgctcatcagaggtgctttcctcaacctcctgcaccacctccaagagaaacagcctaaaaagaaaccccagctgtttacttatattggtctgtaaatccctggaagtaaaccccatgcatttttatctactgtctgaggacatacaataaatctgagaaagtctatgctgtcaaaaaaaaaaaaaaaaaaaa

SEQ ID NO: 1779 - protein, 500 aa, Homo sapiens
MRGELWLLVLVLREAARALSPQPGAGHDEGPGSGWAAKGTVRGWNRRARESPGHVSEPDRTQLSQDLGGGTLAMDTLPDNRTRVVEDNHSYYVSRLYGPSEPHSRELWVDVAEANRSQVKIHTILSNTHRQASRVVLSFDFPFYGHPLRQITIATGGFIFMGDVIHRMLTATQYVAPLMANFNPGYSDNSTVVYFDNGTVFVVQWDHVYLQGWEDKGSFTFQAALHHDGRIVFAYKEIPMSVPEISSSQHPVKTGLSDAFMILNPSPDVPESRRRSIFEYHRIELDPSKVTSMSAVEFTPLPTCLQHRSCDACMSSDLTFNCSWCHVLQRCSSGFDRYRQEWMDYGCAQEAEGRMCEDFQDEDHDSASPDTSFSPYDGDLTTTSSSLFIDSLTTEDDTKLNPYAGGDGLQNNLSPKTKGTPVHLGTIVGIVLAVLLVAAIILAGIYINGHPTSNAALFFIERRPHHWPAMKFRSHPDHSTYAEVEPSGHEKEGFMEAEQC

SEQ ID NO: 1780 - DNA, 3687 bp, Homo sapiens
gagggaaggcaggaaggaggcagccgaaggccgagctgggtggctggaccgggtgctggctgcgccgcgctgctttcggctcccacggcctctcccatgcgctgagggagcccggctgggccgggccggcggcgggaggggaggctcctctccatggtccagaagaccagcatgtcccggggcccttacccaccctcccaggagatccccatggaggtcttcgaccccagcccgcagggcaaatacagcaagaggaaagggcgattcaaacggtcagatgggagcacgtcctcggataccacatccaacagctttgtccgccagggctcagcggagtcctacaccagccgtccatcagactctgatgtatctctggaggaggaccgggaagccttaaggaaggaagcagagcgccaggcattagcgcagctcgagaaggccaagaccaagccagtggcatttgctgtgcggacaaatgttggctacaatccgtctccaggggatgaggtgcctgtgcagggagtggccatcaccttcgagcccaaagacttcctgcacatcaaggagaaatacaataatgactggtggatcgggcggctggtgaaggagggctgtgaggttggcttcattcccagccccgtcaaactggacagccttcgcctgctgcaggaacagaagctgcgccagaaccgcctcggctccagcaaatcaggcgataactccagttccagtctgggagatgtggtgactggcacccgccgccccacaccccctgccagtgccaaacagaagcagaagtcgacagagcatgtgcccccctatgacgtggtgccttccatgaggcccatcatcctggtgggaccgtcgctcaagggctacgaggttacagacatgatgcagaaagctttatttgacttcttgaagcatcggtttgatggcaggatctccatcactcgtgtgacggcagatatttccctggctaagcgctcagttctcaacaaccccagcaaacacatcatcattgagcgctccaacacacgctccagcctggctgaggtgcagagtgaaatcgagcgaatcttcgagctggcccggacccttcagttggtcgctctggatgctgacaccatcaatcacccagcccagctgtccaagacctcgctggcccccatcattgtttacatcaagatcacctctcccaaggtacttcaaaggctcatcaagtcccgaggaaagtctcagtccaaacacctcaatgtccaaatagcggcctcggaaaagctggcacagtgcccccctgaaatgtttgacatcatcctggatgagaaccaattggaggatgcctgcgagcatctggcggagtacttggaagcctattggaaggccacacacccgcccagcagcacgccacccaatccgctgctgaaccgcaccatggctaccgcagccctggctgccagccctgcccctgtctccaacctccagggaccctaccttgcttccggggaccagccactggaacgggccaccggggagcacgccagcatgcacgagtacccaggggagctgggccagcccccaggcctttaccccagcagccacccaccaggccgggcaggcacgctacgggcactgtcccgccaagacacttttgatgccgacacccccggcagccgaaactctgcctacacggagctgggagactcatgtgtggacatggagactgacccctcagaggggccagggcttggagaccctgcagggggcggcacgcccccagcccgacagggatcctgggaggacgaggaagaagactatgaggaagagctgaccgacaaccggaaccggggccggaataaggcccgctactgcgctgagggtgggggtccagttttggggcgcaacaagaatgagctggagggctggggacgaggcgtctacattcgctgagaggcaggggccacacggcgggaggaagggctctgagcccaggggaggggagggagcgaggggctcacacctgacatgtattcgcctccagggggcgctgtctccctcctttcagatgcctttgctcaaagcttggggtttctttggtgttaccatcccagctcccgggaggcccttaagccccagctgtcggtttttacctgcctgttgtggatggatgggggatacccacctttctgaagtgtcccctttctcccatcttaaggggctctcctccctcaccctcctagagaaaaggtgcacttccttaactctttctactcggggccctaagtgacggtcctaagtgggatggctctccttctcccaagctgcagtactggggaagggctgggcgcttttcctggaaagggaggccacagattctttcccatgggggctctcttccccagaccccagatccaaggtccctcaccctgcctgccccttcctcccagcttcctggcagcatcgtctggtcggtgaaagccatagcatggacaccccatggggagcttgtcttggggagggttctgggtggaagctggcaggcatacagcaccctctaccctccgtggccatggcaacgtccagggcccagaaccctgaggagtgagcggccgagacgctgctccccaccccccacctccatgcctcagcctttgcctaccccaggaatgagcttggcctccaacatcccttgcctgctgccattagtagagggggcccctctgcatctgagccccccatccctgtgccacctgggtgtggagcccatggaacactctggtccgcctcattttaaaccaaaaaactgctccttcaccctcaccctgaggccccaggggagaggacccgtgggatggtgcccaggggttgccttgggacctcggatctcctctggggggcttggctgctgctgttgctgctctgtatttgcctctcgtgattctgtttgttacccatgttcacttcccccaggagaggccttggtaccccctctcccctggggcatccctttgccttggcatccctgtagcccagcaaccctgcccctccccagcatcccagctgggccagagagagccgagtgtgccaacaaggactggggcctgcccggctgcccgcctcagggatgggcacctcatgcctgtctcgccacctcctgtgccaatgtcccaccctccacctgggggtggggtgcagcttccacttactgattagaagacaccactgccctcccttcccccctccctgtctggtgtcctgtgcccccatctgtctgtctatatttgtctgtactcccctaggagaagtattttgccatatataaaaccactgtcctgtcctttgtggctgcctcccaagcctgcttctttgtcctcgccacatagtcgtcagcgtaggcacctgggagctgctgatatgcacggggagttgaaagggtgggtgcctgaagatgttgtgccctgagtcattgactcaaaagaaaagatgatcctttgattttggccctctgatgtattgtgcccaagccaggagctgcttgggcagtcccagctccacactggccctgagccccttcacttacctgtctctccacaagtagagccaaaggcaatgggaagctcaatgttgctcagtgggtgagatccagacccactggtgcaatgtcttaaatacacatgactgtttttc

SEQ ID NO: 1781 - protein, 598 aa, Homo sapiens
MVQKTSMSRGPYPPSQEIPMEVFDPSPQGKYSKRKGRFKRSDGSTSSDTTSNSFVRQGSAESYTSRPSDSDVSLEEDREALRKEAERQALAQLEKAKTKPVAFAVRTNVGYNPSPGDEVPVQGVAITFEPKDFLHIKEKYNNDWWIGRLVKEGCEVGFIPSPVKLDSLRLLQEQKLRQNRLGSSKSGDNSSSSLGDVVTGTRRPTPPASAKQKQKSTEHVPPYDVVPSMRPIILVGPSLKGYEVTDMMQKALFDFLKHRFDGRISITRVTADISLAKRSVLNNPSKHIIIERSNTRSSLAEVQSEIERIFELARTLQLVALDADTINHPAQLSKTSLAPIIVYIKITSPKVLQRLIKSRGKSQSKHLNVQIAASEKLAQCPPEMFDIILDENQLEDACEHLAEYLEAYWKATHPPSSTPPNPLLNRTMATAALAASPAPVSNLQGPYLASGDQPLERATGEHASMHEYPGELGQPPGLYPSSHPPGRAGTLRALSRQDTFDADTPGSRNSAYTELGDSCVDMETDPSEGPGLGDPAGGGTPPARQGSWEDEEEDYEEELTDNRNRGRNKARYCAEGGGPVLGRNKNELEGWGRGVYIR

SEQ ID NO: 1782 - DNA, 1847 bp, Homo sapiens
gagggaaggcaggaaggaggcagccgaaggccgagctgggtggctggaccgggtgctggctgcgccgcgctgctttcggctcccacggcctctcccatgcgctgagggagcccggctgggccgggccggcggcgggaggggaggctcctctccatggtccagaagaccagcatgtcccggggcccttacccaccctcccaggagatccccatggaggtcttcgaccccagcccgcagggcaaatacagcaagaggaaagggcgattcaaacggtcagatgggagcacgtcctcggataccacatccaacagctttgtccgccagggctcagcggagtcctacaccagccgtccatcagactctgatgtatctctggaggaggaccgggaagccttaaggaaggaagcagagcgccaggcattagcgcagctcgagaaggccaagaccaagccagtggcatttgctgtgcggacaaatgttggctacaatccgtctccaggggatgaggtgcctgtgcagggagtggccatcaccttcgagcccaaagacttcctgcacatcaaggagaaatacaataatgactggtggatcgggcggctggtgaaggagggctgtgaggttggcttcattcccagccccgtcaaactggacagccttcgcctgctgcaggaacagaagctgcgccagaaccgcctcggctccagcaaatcaggcgataactccagttccagtctgggagatgtggtgactggcacccgccgccccacaccccctgccagtggtaatgaaatgactaacttagcctttgaactagaccccctagagttagaggaggaagaggctgagcttggtgagcagagtggctctgccaagactagtgttagcagtgtcaccaccccgccaccccatggcaaacgcatccccttctttaagaagacagagcatgtgcccccctatgacgtggtgccttccatgaggcccatcatcctggtgggaccgtcgctcaagggctacgaggttacagacatgatgcagaaagctttatttgacttcttgaagcatcggtttgatggcaggatctccatcactcgtgtgacggcagatatttccctggctaagcgctcagttctcaacaaccccagcaaacacatcatcattgagcgctccaacacacgctccagcctggctgaggtgcagagtgaaatcgagcgaatcttcgagctggcccggacccttcagttggtcgctctggatgctgacaccatcaatcacccagcccagctgtccaagacctcgctggcccccatcattgtttacatcaagatcacctctcccaaggtacttcaaaggctcatcaagtcccgaggaaagtctcagtccaaacacctcaatgtccaaatagcggcctcggaaaagctggcacagtgcccccctgaaatgtttgacatcatcctggatgagaaccaattggaggatgcctgcgagcatctggcggagtacttggaagcctattggaaggccacacacccgcccagcagcacgccacccaatccgctgctgaaccgcaccatggctaccgcagccctggctgccagccctgcccctgtctccaacctccaggtacaggtgctcacctcgctcaggagaaacctcggcttctggggcgggctggagtcctcacagcggggcagtgtggtgccccaggagcaggaacatgccatgtagtgggcgccctgcccgtcttccctcctgctctggggtcggaactggagtgcagggaacatggaggaggaagggaagagctttattttgtaaaaaaataagatgagcggcaaaaaaaaaaaaaa

SEQ ID NO: 1783 - protein, 523 aa, Homo sapiens
MVQKTSMSRGPYPPSQEIPMEVFDPSPQGKYSKRKGRFKRSDGSTSSDTTSNSFVRQGSAESYTSRPSDSDVSLEEDREALRKEAERQALAQLEKAKTKPVAFAVRTNVGYNPSPGDEVPVQGVAITFEPKDFLHIKEKYNNDWWIGRLVKEGCEVGFIPSPVKLDSLRLLQEQKLRQNRLGSSKSGDNSSSSLGDVVTGTRRPTPPASGNEMTNLAFELDPLELEEEEAELGEQSGSAKTSVSSVTTPPPHGKRIPFFKKTEHVPPYDVVPSMRPIILVGPSLKGYEVTDMMQKALFDFLKHRFDGRISITRVTADISLAKRSVLNNPSKHIIIERSNTRSSLAEVQSEIERIFELARTLQLVALDADTINHPAQLSKTSLAPIIVYIKITSPKVLQRLIKSRGKSQSKHLNVQIAASEKLAQCPPEMFDIILDENQLEDACEHLAEYLEAYWKATHPPSSTPPNPLLNRTMATAALAASPAPVSNLQVQVLTSLRRNLGFWGGLESSQRGSVVPQEQEHAM

SEQ ID NO: 1784 - DNA, 1700 bp, Homo sapiens
gagggaaggcaggaaggaggcagccgaaggccgagctgggtggctggaccgggtgctggctgcgccgcgctgctttcggctcccacggcctctcccatgcgctgagggagcccggctgggccgggccggcggcgggaggggaggctcctctccatggtccagaagaccagcatgtcccggggcccttacccaccctcccaggagatccccatggaggtcttcgaccccagcccgcagggcaaatacagcaagaggaaagggcgattcaaacggtcagatgggagcacgtcctcggataccacatccaacagctttgtccgccagggctcagcggagtcctacaccagccgtccatcagactctgatgtatctctggaggaggaccgggaagccttaaggaaggaagcagagcgccaggcattagcgcagctcgagaaggccaagaccaagccagtggcatttgctgtgcggacaaatgttggctacaatccgtctccaggggatgaggtgcctgtgcagggagtggccatcaccttcgagcccaaagacttcctgcacatcaaggagaaatacaataatgactggtggatcgggcggctggtgaaggagggctgtgaggttggcttcattcccagccccgtcaaactggacagccttcgcctgctgcaggaacagaagctgcgccagaaccgcctcggctccagcaaatcaggcgataactccagttccagtctgggagatgtggtgactggcacccgccgccccacaccccctgccagtgccaaacagaagcagaagtcgacagagcatgtgcccccctatgacgtggtgccttccatgaggcccatcatcctggtgggaccgtcgctcaagggctacgaggttacagacatgatgcagaaagctttatttgacttcttgaagcatcggtttgatggcaggatctccatcactcgtgtgacggcagatatttccctggctaagcgctcagttctcaacaaccccagcaaacacatcatcattgagcgctccaacacacgctccagcctggctgaggtgcagagtgaaatcgagcgaatcttcgagctggcccggacccttcagttggtcgctctggatgctgacaccatcaatcacccagcccagctgtccaagacctcgctggcccccatcattgtttacatcaagatcacctctcccaaggtacttcaaaggctcatcaagtcccgaggaaagtctcagtccaaacacctcaatgtccaaatagcggcctcggaaaagctggcacagtgcccccctgaaatgtttgacatcatcctggatgagaaccaattggaggatgcctgcgagcatctggcggagtacttggaagcctattggaaggccacacacccgcccagcagcacgccacccaatccgctgctgaaccgcaccatggctaccgcagccctggctgccagccctgcccctgtctccaacctccaggtacaggtgctcacctcgctcaggagaaacctcggcttctggggcgggctggagtcctcacagcggggcagtgtggtgccccaggagcaggaacatgccatgtagtgggcgccctgcccgtcttccctcctgctctggggtcggaactggagtgcagggaacatggaggaggaagggaagagctttattttgtaaaaaaataagatgagcggcaa

SEQ ID NO: 1785 - protein, 478 aa, Homo sapiens
MVQKTSMSRGPYPPSQEIPMEVFDPSPQGKYSKRKGRFKRSDGSTSSDTTSNSFVRQGSAESYTSRPSDSDVSLEEDREALRKEAERQALAQLEKAKTKPVAFAVRTNVGYNPSPGDEVPVQGVAITFEPKDFLHIKEKYNNDWWIGRLVKEGCEVGFIPSPVKLDSLRLLQEQKLRQNRLGSSKSGDNSSSSLGDVVTGTRRPTPPASAKQKQKSTEHVPPYDVVPSMRPIILVGPSLKGYEVTDMMQKALFDFLKHRFDGRISITRVTADISLAKRSVLNNPSKHIIIERSNTRSSLAEVQSEIERIFELARTLQLVALDADTINHPAQLSKTSLAPIIVYIKITSPKVLQRLIKSRGKSQSKHLNVQIAASEKLAQCPPEMFDIILDENQLEDACEHLAEYLEAYWKATHPPSSTPPNPLLNRTMATAALAASPAPVSNLQVQVLTSLRRNLGFWGGLESSQRGSVVPQEQEHAM

SEQ ID NO: 1786 - DNA, 1817 bp, Homo sapiens
caaccatcctgaagctacaggtgctccctcctggaatctccaatggatttcagtcgcagaagcttccacagaagcctgagctcctccttgcaggcccctgtagtcagtacagtgggcatgcagcgcctcgggacgacacccagcgtttatgggggtgctggaggccggggcatccgcatctccaactccagacacacggtgaactatgggagcgatctcacaggcggcggggacctgtttgttggcaatgagaaaatggccatgcagaacctaaatgaccgtctagcgagctacctagaaaaggtgcggaccctggagcagtccaactccaaacttgaagtgcaaatcaagcagtggtacgaaaccaacgccccgagggctggtcgcgactacagtgcatattacagacaaattgaagagctgcgaagtcagattaaggatgctcaactgcaaaatgctcggtgtgtcctgcaaattgataatgctaaactggctgctgaggacttcagactgaagtatgagactgagagaggaatacgtctaacagtggaagctgatctccaaggcctgaataaggtctttgatgacctaaccctacataaaacagatttggagattcaaattgaagaactgaataaagacctagctctcctcaaaaaggagcatcaggaggaagtcgatggcctacacaagcatctgggcaacactgtcaatgtggaggttgatgctgctccaggcctgaaccttggcgtcatcatgaatgaaatgaggcagaagtatgaagtcatggcccagaagaaccttcaagaggccaaagaacagtttgagagacagactgcagttctgcagcaacaggtcacagtgaatactgaagaattaaaaggaactgaggttcaactaacggagctgagacgcacctcccagagccttgagatagaactccagtcccatctcagcatgaaagagtctttggagcacactctagaggagaccaaggcccgttacagcagccagttagccaacctccagtcgctgttgagctctctggaggcccaactgatgcagattcggagtaacatggaacgccagaacaacgaataccatatccttcttgacataaagactcgacttgaacaggaaattgctacttaccgccgccttctggaaggagaagacgtaaaaactacagaatatcagttaagcaccctggaagagagagatataaagaaaaccaggaagattaagacagtcgtgcaagaagtagtggatggcaaggtcgtgtcatctgaagtcaaagaggtggaagaaaatatctaaatagctaccagaaggagatgctgctgaggttttgaaagaaatttggctataatcttatctttgctccctgcaagaaatcagccataagaaagcactattaatactctgcagtgattagaaggggtggggtggcgggaatcctatttatcagactctgtaattgaatataaatgttttactcagaggagctgcaaattgcctgcaaaaatgaaatccagtgagcactagaatatttaaaacatcattactgccatctttatcatgaagcacatcaattacaagctgtagaccacctaatatcaatttgtaggtaatgttcctgaaaattgcaatacatttcaattatactaaacctcacaaagtagaggaatccatgtaaattgcaaataaaccactttctaattttttcctgtttctgaaaaaaaaaaaaaaaaaaaaaaaaaaaaaaaaaaaaaaaaaaaaaaaaaaaaaaaaaaaaaaaaaaaaaaaaaaaaaaaaaa

SEQ ID NO: 1787 - protein, 424 aa, Homo sapiens
MDFSRRSFHRSLSSSLQAPVVSTVGMQRLGTTPSVYGGAGGRGIRISNSRHTVNYGSDLTGGGDLFVGNEKMAMQNLNDRLASYLEKVRTLEQSNSKLEVQIKQWYETNAPRAGRDYSAYYRQIEELRSQIKDAQLQNARCVLQIDNAKLAAEDFRLKYETERGIRLTVEADLQGLNKVFDDLTLHKTDLEIQIEELNKDLALLKKEHQEEVDGLHKHLGNTVNVEVDAAPGLNLGVIMNEMRQKYEVMAQKNLQEAKEQFERQTAVLQQQVTVNTEELKGTEVQLTELRRTSQSLEIELQSHLSMKESLEHTLEETKARYSSQLANLQSLLSSLEAQLMQIRSNMERQNNEYHILLDIKTRLEQEIATYRRLLEGEDVKTTEYQLSTLEERDIKKTRKIKTVVQEVVDGKVVSSEVKEVEENI

SEQ ID NO: 1788 - DNA, 2163 bp, Homo sapiens
ggcagatgaaatataagattcatcaaccacatttgacagcccatggcaggtttcctgttttccatcgtccctctgcaggtcacagacacacagagcccagccgtggcaggctcagccggggtccggggctgctaacaacggctacattcctcccccagggccaagggaaatcctgagcgcaggccagggttgtttggttttgaggtgtgctgggatgaaaggcaccctggaagtggaaggtaaatgaacaatggaaaaacttcacggcaagattagaaagatacctgagcccaatacccgcctgatgtcgtgggccacacctccgggttaccaggggaagggaggaagcaaactgtcatattgatgtggctctaaacaacaacagtgtgcgaaggcccaggggcactttgggattgaccaagaggaaacacaagttgcacaatgatacaatcttgttggtacaattgtcagagaagggaactcccacagcaaaggccataaaaccatccagggcagtctggggcggctcagttctgcggtgccagggagtggagcagagctcagccccgtcccaaacacagatgggaccatgaactccggacacagcttcagccagaccccctcggcctccttccatggcgccggaggtggctggggccggcccaggagcttccccagggctcccaccgtccatggcggtgcggggggagcccgcatctccctgtccttcaccacgcggagctgcccaccccctggagggtcttggggttctggaagaagcagccccctactaggcggaaatgggaaggccaccatgcagaatctcaacgaccgcctggcctcctacctggagaaggttcgcgccctggaggaggccaacatgaagctggaaagccgcatcctgaaatggcaccagcagagagatcctggcagtaagaaagattattcccagtatgaggaaaacatcacacacctgcaggagcagatagtggatggtaagatgaccaatgctcagattattcttctcattgacaatgccaggatggcagtggatgacttcaacctcaagtatgaaaatgaacactcctttaagaaagacttggaaattgaagtcgagggcctccgaaggaccttagacaacctgaccattgtcacaacagacctagaacaggaggtggaaggaatgaggaaagagctcattctcatgaagaagcaccatgagcaggaaatggagaagcatcatgtgccaagtgacttcaatgtcaatgtgaaggtggatacaggtcccagggaagatctgattaaggtcctggaggatatgagacaagaatatgagcttataataaagaagaagcatcgagacttggacacttggtataaagaacagtctgcagccatgtcccaggaggcagccagtccagccactgtgcagagcagacaaggtgacatccacgaactgaagcgcacattccaggccctggagattgacctgcagacacagtacagcacgaaatctgctttggaaaacatgttatccgagacccagtctcggtactcctgcaagctccaggacatgcaagagatcatctcccactatgaggaggaactgacgcagctacgccatgaactggagcggcagaacaatgaataccaagtgctgctgggcatcaaaacccacctggagaaggaaatcaccacgtaccgacggctcctggagggagagagtgaagggacacgggaagaatcaaagtcgagcatgaaagtgtctgcaactccaaagatcaaggccataacccaggagaccatcaacggaagattagttctttgtcaagtgaatgaaatccaaaagcacgcatgagaccaatgaaagtttccgcctgttgtaaaatctattttcccccaaggaaagtccttgcacagacaccagtgagtgagttctaaaagatacccttggaattatcagactcagaaacttttattttttttttctgtaacagtctcaccagacttctcataatgctcttaatatattgcacttttctaatcaaagtgcgagtttatgagggtaaagctctactttcctactgcagccttcagattctcatcattttgcatctattttgtagccaataaaactccgcactagcaaaaaaaaaaaaaaaa

SEQ ID NO: 1789 - protein, 422 aa, Homo sapiens
MNSGHSFSQTPSASFHGAGGGWGRPRSFPRAPTVHGGAGGARISLSFTTRSCPPPGGSWGSGRSSPLLGGNGKATMQNLNDRLASYLEKVRALEEANMKLESRILKWHQQRDPGSKKDYSQYEENITHLQEQIVDGKMTNAQIILLIDNARMAVDDFNLKYENEHSFKKDLEIEVEGLRRTLDNLTIVTTDLEQEVEGMRKELILMKKHHEQEMEKHHVPSDFNVNVKVDTGPREDLIKVLEDMRQEYELIIKKKHRDLDTWYKEQSAAMSQEAASPATVQSRQGDIHELKRTFQALEIDLQTQYSTKSALENMLSETQSRYSCKLQDMQEIISHYEEELTQLRHELERQNNEYQVLLGIKTHLEKEITTYRRLLEGESEGTREESKSSMKVSATPKIKAITQETINGRLVLCQVNEIQKHA

SEQ ID NO: 1790 - DNA, 589 bp, Homo sapiens
atgctgcttcccgaagtccagacacctcacccccctaacctggatggaccacgcagagccaataggaatacttttctgtggacgtgccatgttggaatcccagatctccctgccctgccagcccctgccagcttcctggggacccaactgaccctgaagaaagcctctgatgggcctagaacagagaaggtgacccaggaccttgcccagcctttctggacaactggaagacagttacgcttcgtcctccacctctccctccaacaaaaggatcttagcaagtgttggagaggtgctgaagtcgtattaggaccaaccagactttttctttgaggatactcagaaggagtgaaggagaatggaacagggggtgtgaataaatgagctttctccatgtgtgattcaaagtggtttaacccatgcctcaccttctagaacacccgtggccctctctagccatgagaagtgtcaccactagccatcaaaatgctcccaaaagtccaacctttgaccaaactacatttcagattttcatttcagattttcttaaattctggagaaaaaagaaaataaagtaaaagaataaata

SEQ ID NO: 1791 - protein, 110 aa, Homo sapiens
MLLPEVQTPHPPNLDGPRRANRNTFLWTCHVGIPDLPALPAPASFLGTQLTLKKASDGPRTEKVTQDLAQPFWTTGRQLRFVLHLSLQQKDLSKCWRGAEVVLGPTRLFL

SEQ ID NO: 1792 - DNA, 1464 bp, Homo sapiens
gcgaggagatgctagagggcgcagcgccgccagcaccatgcgccccccgcccgcgctggccctggccgggctctgcctgctggcgctgcccgccgccgccgcctcctacttcggcctgaccgggcgggaagtcctgacgcccttcccaggattgggcactgcggcagccccggcacagggcggggcccacctgaagcagtgtgacctgctgaagctgtcccggcggcagaagcagctctgccggagggagcccggcctggctgagaccctgagggatgctgcgcacctcggcctgcttgagtgccagtttcagttccggcatgagcgctggaactgtagcctggagggcaggatgggcctgctcaagagaggcttcaaagagacagctttcctgtacgcggtgtcctctgccgccctcacccacaccctggcccgggcctgcagcgctgggcgcatggagcgctgcacctgtgatgactctccggggctggagagccggcaggcctggcagtggggcgtgtgcggtgacaacctcaagtacagcaccaagtttctgagcaacttcctggggtccaagagaggaaacaaggacctgcgggcacgggcagacgcccacaatacccacgtgggcatcaaggctgtgaagagtggcctcaggaccacgtgtaagtgccatggcgtatcaggctcctgtgccgtgcgcacctgctggaagcagctctccccgttccgtgagacgggccaggtgctgaaactgcgctatgactcggctgtcaaggtgtccagtgccaccaatgaggccttgggccgcctagagctgtgggcccctgccaggcagggcagcctcaccaaaggcctggccccaaggtctggggacctggtgtacatggaggactcacccagcttctgccggcccagcaagtactcacctggcacagcaggtagggtgtgctcccgggaggccagctgcagcagcctgtgctgcgggcggggctatgacacccagagccgcctggtggccttctcctgccactgccaggtgcagtggtgctgctacgtggagtgccagcaatgtgtgcaggaggagcttgtgtacacctgcaagcactaggcctactgcccagcaagccagtctggcactgccaggacctcctgtggcacccttcaagctgcccagccggccctctgggcagactgtcatcacatgcatgcataaaccggcatgtgtgccaatgcacacgagtgtgccactcaccaccattccttggccagccttttgcctccctcgatactcaacaaagagaagcaaagcctcctcccttaacccaagcatccccaaccttgttgaggacttggagaggagggcagagtgagaaagacatggagggaaataagggagaccaagagcacagcaggactgaaattttggacgggagagaggggctattccatcttgcttcctgg

SEQ ID NO: 1793 - protein, 357 aa, Homo sapiens
MRPPPALALAGLCLLALPAAAASYFGLTGREVLTPFPGLGTAAAPAQGGAHLKQCDLLKLSRRQKQLCRREPGLAETLRDAAHLGLLECQFQFRHERWNCSLEGRMGLLKRGFKETAFLYAVSSAALTHTLARACSAGRMERCTCDDSPGLESRQAWQWGVCGDNLKYSTKFLSNFLGSKRGNKDLRARADAHNTHVGIKAVKSGLRTTCKCHGVSGSCAVRTCWKQLSPFRETGQVLKLRYDSAVKVSSATNEALGRLELWAPARQGSLTKGLAPRSGDLVYMEDSPSFCRPSKYSPGTAGRVCSREASCSSLCCGRGYDTQSRLVAFSCHCQVQWCCYVECQQCVQEELVYTCKH

SEQ ID NO: 1794 - DNA, 3674 bp, Homo sapiens
gcagcagctgctgccactgctcagcgcggtgaggagggagccggtgactcggagacggtgactcagaggcagagcggcgcaagggccaaggagtactggcgtccatggaccctggggaccccgtcaggagcaggtgacatccttccccttccaccctgctccctgctctacatccccagcagggagtggcctctcccttctccatggacttccaagagagggacccgcccttcctgcctgagagcgctcagtcctcaaagcccagcagtgctcagcaggcctctgagctgtgggaggtggtggaggagcctcgggtcaggctggggacagagggtgtcatgcctgagaggcaggaaggtcacctgctcaagaagaggaagtggcctctgaagggctggcacaagagatactttgtgctcgaggacgggatccttcattatgcaacaacccggcaagacatcaccaaggggaagctccatggctccatcgatgtccggctgtcggtcatgtccatcaacaaaaaggcccagcgcattgaccttgacactgaagacaacatctaccacctcaagatcaaatcccaggacctattccagagctgggtggcgcagctgcgtgcccaccgcctagcccaccgcctggacatgccccgtggctcactgcccagtactgctcaccggaaggttcctggtgcccagcttccaacagcagctactgcctcagccctacctgggcttggaccgcgggagaaagtgtcttcctggctgagggacagtgatgggctggaccgctgctctcatgagctctctgagtgtcaggggaagctccaggaactacacaggctcctccagagcctggagtccctgcaccgaatcccctcagcccctgttatccccacacaccaggcctcagtgacaaccgaaagacccaagaaggggaaacggacaagccgcatgtggtgcacccagagctttgccaaggatgacaccattggacgggttggtcgtctccatggctctgttcccaacctgtctcgctacctggagtctcgggactcctcgggcacccgtgggctgccacccacagactatgcccacctgcagcgcagcttctgggccctggcccagaaggtgcacagctccctcagcagcgtcctggccgccctcaccatggaacgggaccaactgagggacatgcaccagggctcagagttgtcaagaatgggggtctctgaggcctccactggccagaggcgcctccactcactgtccacctcctccgacaccacggcggactctttcagctccctcaaccctgaggagcaagaagctctgtacatgaaggggcgcgagctcaccccccagctatcgcagaccagcatcctgtcccttgctgattcccacacggagttcttcgatgcctgcgaggttctcctctccgccagctcttctgagaatgagggctcagaggaggaggagtcctgtaccagtgaaatcaccaccagcctgtctgaggagatgctggacctcaggggagctgagcgctgtcagaaaggggggtgtgttccagggagacccatggggccaccccgccgtcgctgcctgccggcggccagcgggcctggggctgacgtgagcctgtggaacattctgcgcaacaacatcggcaaagacctgtccaaggtgtcaatgcctgtgcagctcaacgagccgctcaacactctgcagcggctctgcgaggagctggagtacagcagcctcctggaccaggccagccgcatcgccgacccctgcgagcgcatggtgtacatcgcagcctttgctgtctcggcctactcctccacataccaccgagccggctgcaagcccttcaaccctgtcctgggggagacctacgagtgtgagcggcctgaccgaggcttccgcttcatcagtgagcaggtctcccaccacccccctatctcggcctgccatgcagagtctgagaacttcgccttctggcaagatatgaagtggaagaacaagttctggggcaaatccctggagattgtgcctgtgggaacagtcaacgtcagcctgcccaggtttggggaccactttgagtggaacaaggtgacatcctgcattcacaatgtcctgagtggtcagcgctggatcgagcactatggggaggtgctcatccgaaacacacaggacagctcctgccactgcaagatcaccttctgcaaggccaagtactggagttccaatgtccacgaggtgcagggcgctgtgctcagtcggagtggccgtgtcctccaccgactctttgggaagtggcacgaggggctgtaccggggacccacgccaggtggccagtgcatctggaaacccaactcaatgccccccgaccatgagcgaaacttcggcttcacccagtttgccttggagctgaatgagctgacagcagagctgaaacggtcgctgccttccaccgacacgagactccggccagaccagaggtacctggaggaggggaacatacaggccgctgaggcccagaagagaaggatcgagcagctgcagcgagacaggcgcaaagtcatggaggaaaacaacatcgtacaccaggctcgcttcttcaggcggcagacggatagcagcgggaaagagtggtgggtgaccaacaatacctactggaggctgcgggccgagccaggctatgggaacatggatggggccgtgctctggtagccctggccccgggggcaggaggctctggttcctcactcctcctgcctccaccccctaccatggacacatgggtgaggccgggctccccgcctcactgcccttgagaccaaaggggcagccctggccctccctcccctctgctggccagagggtctgcatctcagcccacccccaaccccaccgtttggggtgagaagcagaatctgtgcttccccagtctccttgccccagacaaccagcatgtaagacccttcccgcttcaccattccgattcctgtcccctttggggtacttgggggagactctggctcccaggatctgttccctatttcagtgccttcctaggacacaggggactccttgacgctccccaggctttctgtgcccaggcctctgtccccagcggtgaggttgcagtgagtgaaggagaggaggtgatctgttctccctccccttctgcccatctccagcatcttcttccccttccctggccctgcagggccttctccagctccctttggttagtccctggccatccctcctgtcctggatcccttctccctaactgcaaaatgcctgcagcttccagctccttcgtccctgatcctcaagcggttccctcccgtctcagctcagcggatcccccagagtggaggaggcctctccatgaggaggggagcagcccaaggcacctgtcctctgacccaccggcagcgagtgcgcaggtgtgagtgtaagttcatgtaggagagtgtatgcgtgtgcgcctgtgccctgcttgcaggcaagcagggctccctcatgtagccccgccttccccctgctgggggtccaccacatcgctgctctttctcacagtctgcctctgatgagggcgaattgctatgacattccaagctccaataaagactgtcccagactttgaaaaaaaaaaaaaaaaaa

SEQ ID NO: 1795 - protein, 842 aa, Homo sapiens
MDFQERDPPFLPESAQSSKPSSAQQASELWEVVEEPRVRLGTEGVMPERQEGHLLKKRKWPLKGWHKRYFVLEDGILHYATTRQDITKGKLHGSIDVRLSVMSINKKAQRIDLDTEDNIYHLKIKSQDLFQSWVAQLRAHRLAHRLDMPRGSLPSTAHRKVPGAQLPTAATASALPGLGPREKVSSWLRDSDGLDRCSHELSECQGKLQELHRLLQSLESLHRIPSAPVIPTHQASVTTERPKKGKRTSRMWCTQSFAKDDTIGRVGRLHGSVPNLSRYLESRDSSGTRGLPPTDYAHLQRSFWALAQKVHSSLSSVLAALTMERDQLRDMHQGSELSRMGVSEASTGQRRLHSLSTSSDTTADSFSSLNPEEQEALYMKGRELTPQLSQTSILSLADSHTEFFDACEVLLSASSSENEGSEEEESCTSEITTSLSEEMLDLRGAERCQKGGCVPGRPMGPPRRRCLPAASGPGADVSLWNILRNNIGKDLSKVSMPVQLNEPLNTLQRLCEELEYSSLLDQASRIADPCERMVYIAAFAVSAYSSTYHRAGCKPFNPVLGETYECERPDRGFRFISEQVSHHPPISACHAESENFAFWQDMKWKNKFWGKSLEIVPVGTVNVSLPRFGDHFEWNKVTSCIHNVLSGQRWIEHYGEVLIRNTQDSSCHCKITFCKAKYWSSNVHEVQGAVLSRSGRVLHRLFGKWHEGLYRGPTPGGQCIWKPNSMPPDHERNFGFTQFALELNELTAELKRSLPSTDTRLRPDQRYLEEGNIQAAEAQKRRIEQLQRDRRKVMEENNIVHQARFFRRQTDSSGKEWWVTNNTYWRLRAEPGYGNMDGAVLW

SEQ ID NO: 1796 - DNA, 1750 bp, Homo sapiens
ggcttccgtccattcttccggtggagatggctgcggccgtggcggggatgctgcgagggggtctcctgccccaggcgggccggctgcctaccctccagactgtccgctatggctccaaggctgttacccgccaccgtcgtgtgatgcactttcagcggcagaagctgatggctgtgactgaatatatccccccgaaaccagccatccacccatcatgcctgccatctcctcccagccccccacaggaggagataggcctcatcaggcttctccgccgggagatagcagcagttttccaggacaaccgaatgatagccgtctgccagaatgtggctctgagtgcagaggacaagcttcttatgcgacaccagctgcggaaacacaagatcctgatgaaggtcttccccaaccaggtcctgaagcccttcctggaggattccaagtaccaaaatctgctgcccctttttgtggggcacaacatgctgctggtcagtgaagagcccaaggtcaaggagatggtacggatcttaaggactgtgccattcctgccgctgctaggtggctgcattgatgacaccatcctcagcaggcagggctttatcaactactccaagctccccagcctgcccctggtgcagggggagcttgtaggaggcctcacctgcctcacagcccagacccactccctgctccagcaccagcccctccagctgaccaccctgttggaccagtacatcagagagcaacgcgagaaggattctgtcatgtcggccaatgggaagccagatcctgacactgttccggactcgtagccagcctgtttagccagccctgcgcataaatacactctgcgttattggctgtgctctcctcaatgggacatgtggaagaacttggggtcggggagtgtgtttgtcacttggttttcactagtaatgatattgtcaggtatagggccacttggagatgcagaggattccatttcagatgtcagtcaccggcttcgtccttagttttcccaacttgggacgtgataggagcaaagtctctccattctccaggtccaaggcagagatcctgaaaagatagggctattgtcccctgcctccttggtcactgcctcttgctgcacgggctcctgagcccacccccttggggcacaacctgccactgccacagtagctcaaccaagcagttgtgctgagaatggcacctggtgagagcctgctgtgtgccaggctttgtgctgagtgctgtacatgtattagttcctttactgctgaccacattgtacccatttcacagagaaggagcagagaaattaagtggcttgctcaaggtcatgcagttagtaagtggcagaacagggacttgaaccaagccctctgctctgaagaccgcgtcctgaatttcttcactagagcttcctcatcaggttacccagaagtgggtcccatccaccatccaggtgtgcttggatgttagttctccaccctcgaggtgtacgctgtgaaaagtttgggagcactgctttataataaaatgaaatatattctacttcctttattttgtggtttacacggttgtcctccctctaaacttactctcaggggcttctctgtcatctgactttcctcactcttgcttcccttcctaggaaaatcctcttcccctatacctgttcccacaaatggcatcccgcgcatgcttgccctattaaaggcagctgacagctgtacccactaaaaaa

SEQ ID NO: 1797 - protein, 261 aa, Homo sapiens [sequence omitted]

SEQ ID NO: 1798 - DNA, 1848 bp, Homo sapiens
ggcttccgtccattcttccggtggagatggctgcggccgtggcggggatgctgcgagggggtctcctgccccaggcgggctagagtgcagtggcatgatctcggctcactgcaacctccacctcccgggttcaagcgattctcctgcctcagcctctcaagtagctgggattacaggccggctgcctaccctccagactgtccgctatggctccaaggctgttacccgccaccgtcgtgtgatgcactttcagcggcagaagctgatggctgtgactgaatatatccccccgaaaccagccatccacccatcatgcctgccatctcctcccagccccccacaggaggagataggcctcatcaggcttctccgccgggagatagcagcagttttccaggacaaccgaatgatagccgtctgccagaatgtggctctgagtgcagaggacaagcttcttatgcgacaccagctgcggaaacacaagatcctgatgaaggtcttccccaaccaggtcctgaagcccttcctggaggattccaagtaccaaaatctgctgcccctttttgtggggcacaacatgctgctggtcagtgaagagcccaaggtcaaggagatggtacggatcttaaggactgtgccattcctgccgctgctaggtggctgcattgatgacaccatcctcagcaggcagggctttatcaactactccaagctccccagcctgcccctggtgcagggggagcttgtaggaggcctcacctgcctcacagcccagacccactccctgctccagcaccagcccctccagctgaccaccctgttggaccagtacatcagagagcaacgcgagaaggattctgtcatgtcggccaatgggaagccagatcctgacactgttccggactcgtagccagcctgtttagccagccctgcgcataaatacactctgcgttattggctgtgctctcctcaatgggacatgtggaagaacttggggtcggggagtgtgtttgtcacttggttttcactagtaatgatattgtcaggtatagggccacttggagatgcagaggattccatttcagatgtcagtcaccggcttcgtccttagttttcccaacttgggacgtgataggagcaaagtctctccattctccaggtccaaggcagagatcctgaaaagatagggctattgtcccctgcctccttggtcactgcctcttgctgcacgggctcctgagcccacccccttggggcacaacctgccactgccacagtagctcaaccaagcagttgtgctgagaatggcacctggtgagagcctgctgtgtgccaggctttgtgctgagtgctgtacatgtattagttcctttactgctgaccacattgtacccatttcacagagaaggagcagagaaattaagtggcttgctcaaggtcatgcagttagtaagtggcagaacagggacttgaaccaagccctctgctctgaagaccgcgtcctgaatttcttcactagagcttcctcatcaggttacccagaagtgggtcccatccaccatccaggtgtgcttggatgttagttctccaccctcgaggtgtacgctgtgaaaagtttgggagcactgctttataataaaatgaaatatattctacttcctttattttgtggtttacacggttgtcctccctctaaacttactctcaggggcttctctgtcatctgactttcctcactcttgcttcccttcctaggaaaatcctcttcccctatacctgttcccacaaatggcatcccgcgcatgcttgccctattaaaggcagctgacagctgtacccactaaaaaa

SEQ ID NO: 1799 - protein, 271 aa, Homo sapiens
MISAHCNLHLPGSSDSPASASQVAGITGRLPTLQTVRYGSKAVTRHRRVMHFQRQKLMAVTEYIPPKPAIHPSCLPSPPSPPQEEIGLIRLLRREIAAVFQDNRMIAVCQNVALSAEDKLLMRHQLRKHKILMKVFPNQVLKPFLEDSKYQNLLPLFVGHNMLLVSEEPKVKEMVRILRTVPFLPLLGGCIDDTILSRQGFINYSKLPSLPLVQGELVGGLTCLTAQTHSLLQHQPLQLTTLLDQYIREQREKDSVMSANGKPDPDTVPDS

SEQ ID NO: 1800 - DNA, 1444 bp, Homo sapiens
cctgcccacaacaccccagcttgctgccagcaaagcccctccacacccctcaaactccagacccttcacatcaatttactgttgtcttcgacctcaccccagcaattttctctgaatcaaccccctttcctcctctcctaagtctctgagtttctctctcctcctgccatcctgagttctgccatccttaggggccgccaagacctctcttttcgttcctctcccgcctcagaccagcagccttttattttagatcatgtctggagggaagtcagcccagggtccagaggaagggggcgtctgcatcactgaagcccttatcactaagcggaacttgactttccctgaagatggggaactgtcagagaagatgtttcacactcttgatgaactgcagactgtccgcctggaccgggaggggattactactatcaggaacttagaaggcctccagaatcttcacagtctctatctgcaagggaataagatccagcaaattgagaacctggcttgcatcccctccttgcgcttcctgtctctggcaggaaaccaaatcaggcaggtggaaaacctcctcgacctcccatgcctccagtttctggacctttctgagaacctgatagaaacattgaagctggatgagttcccccagagccttctcatcctcaacctgtctggaaacagctgcaccaaccaggatggctaccgcgagctggtgacagaagccctgccacttctcctggacctggacgggcagcctgtggtggagcgctggatttcggatgaggaggatgaagcctcaagcgatgaggagttcccagagctgagtggcccattctgctcagaacgaggcttcctcaaggagctggagcaggagctgagcaggcacagggagcaccggcaacagacggccctgacagagcacctgctgaggatggagatgcagcccaccctcaccgacctgcccctgctacctggggtgcccatggctggggacagcagcccttctgccactcctgcgcaaggggaggagacagtccctgaggccgtctcctcaccccaggcctcctctcccaccaagaaaccatgcagtctgattcccaggggccaccaaagctctttctggggaaggaagggggcacgagcagccacagcccccaaggcctctgtggctgaggcccccagcacaaccaaaactacggccaagagaagcaagaaatgattctctgtcaacctttctctactagtggagaggagtggggcctgcccctcttctcagacctctgacctgtgacagaagcccatccccagtaaagtgtctctaggccctgagtatgcttttcatgtcacttggggtatctcaggggaagaaaccagtgaaagctccaggaaacaaaatacagagctcagtgagccacctgattctaaaaaaaaaaaaaaaaaa

SEQ ID NO: 1801 - protein, 321 aa, Homo sapiens
MSGGKSAQGPEEGGVCITEALITKRNLTFPEDGELSEKMFHTLDELQTVRLDREGITTIRNLEGLQNLHSLYLQGNKIQQIENLACIPSLRFLSLAGNQIRQVENLLDLPCLQFLDLSENLIETLKLDEFPQSLLILNLSGNSCTNQDGYRELVTEALPLLLDLDGQPVVERWISDEEDEASSDEEFPELSGPFCSERGFLKELEQELSRHREHRQQTALTEHLLRMEMQPTLTDLPLLPGVPMAGDSSPSATPAQGEETVPEAVSSPQASSPTKKPCSLIPRGHQSSFWGRKGARAATAPKASVAEAPSTTKTTAKRSKK

SEQ ID NO: 1802 - DNA, 1488 bp, Homo sapiens
ggcacccgggaccgagctggggtcttggaggaagagaggatggcgtcgtcgagccctgactccccatgttcctgcgactgctttgtctccgtgcccccggcctcagccatcccggctgtgatctttgccaagaactcggaccgaccccgggacgaggtgcaggaggtggtgtttgtccccgcaggcactcacactcctgggagccggctccagtgcacctacattgaagtggaacaggtgtcgaagacgcacgctgtgattctgagccgtccttcttggctatggggggctgagatgggcgccaacgagcatggtgtctgcattggcaacgaggctgtgtggacgagggagccagttggggagggggaagccctgctgggcatggacctactcaggctggctttggaacggagcagctctgcccaggaggccttgcatgtgatcacagggttactggagcactatgggcaggggggcaactgcctggaggatgctgcgccattctcctaccatagcaccttcctgctggctgaccgcactgaggcgtgggtgctggagacagctgggaggctctgggctgcacagaggatccaggagggggcccgcaacatctccaaccagctgagcattggcacggacatctcggcccaacacccggagctgcggactcatgcccaggccaagggctggtgggatgggcagggtgcctttgactttgctcagatcttctccctgacccagcagcctgtgcgcatggaggctgccaaggcccgcttccaggcagggcgggagctgctgcggcaacggcaagggggcatcacggcagaggtgatgatgggcatcctcagagacaaggagagtggtatctgtatggactcgggaggctttcgcaccacggccagcatggtgtctgtcctgccccaggatcccacgcagccctgcgtgcactttcttaccgccacgccagacccatccaggtctgtgttcaaacctttcatcttcggggtgggggtggcccaggccccccaggtgctgtcccccacttttggagcacaagaccctgttcggaccctgccccgattccagactcaggtagatcgtcggcataccctctaccgtggacaccaggcagccctggggctgatggagagagatcaggatcgggggcagcagctccagcagaaacagcaggatctggagcaggaaggcctcgaggccacacaggggctgctggccggcgagtgggccccacccctctgggagctgggcggcctcttccaggccttcgtgaagagggagagccaggcttatgcgtaagcttcatagcttctgctggcctggggtggacccaggacccctggggcctgggtgccctgagtggtggtaaagtggagcaatcccttcacgctccttggccatgttctgagcggccagcttggcctttgccttaataaatgtgctttattttcaaaaaaaaaaaaaaaaaaa

SEQ ID NO: 1803 - protein, 425 aa, Homo sapiens
MASSSPDSPCSCDCFVSVPPASAIPAVIFAKNSDRPRDEVQEVVFVPAGTHTPGSRLQCTYIEVEQVSKTHAVILSRPSWLWGAEMGANEHGVCIGNEAVWTREPVGEGEALLGMDLLRLALERSSSAQEALHVITGLLEHYGQGGNCLEDAAPFSYHSTFLLADRTEAWVLETAGRLWAAQRIQEGARNISNQLSIGTDISAQHPELRTHAQAKGWWDGQGAFDFAQIFSLTQQPVRMEAAKARFQAGRELLRQRQGGITAEVMMGILRDKESGICMDSGGFRTTASMVSVLPQDPTQPCVHFLTATPDPSRSVFKPFIFGVGVAQAPQVLSPTFGAQDPVRTLPRFQTQVDRRHTLYRGHQAALGLMERDQDRGQQLQQKQQDLEQEGLEATQGLLAGEWAPPLWELGGLFQAFVKRESQAYA

SEQ ID NO: 1804 - DNA, 3794 bp, Homo sapiens
gactcagatctcacctcctaccactcccctaggagagctgggggccactgtttcctggattatcctaaaagcttctgaggccgtgaggacttggcagcatccctgctccctccttcacctccccctttggcactgcctgtcacctcctttataaagcctggctcttttatcaccgccacttggccctcactgccgccgccagctctgggctccatggactggtcccgtctgaggtgcccctgaccgtccctgccctcaccccaccccggatcccggcaatgctaaccgctgtctgcggctctctgggcagccagcacacggaagcgccgcacgcctccccgccgcgcctcgacctgcagcctctccaaacttaccagggccacacgagccctgaggccggggactacccctccccgctgcagcctggagagctgcagagcctcccgctgggcccggaggtggacttctcgcagggctatgagctgccaggggcctcctcgcgggtaacctgcgaggacctggaaagcgacagtcccttggccccgggccccttttccaagctcctgcagccggacatgtcacaccattatgaatcgtggttcaggccgactcacccaggcgcggaggatggctcgtggtgggaccttcatccgggcaccagctggatggacctcccccacactcagggcgcgctgacctcacctggccacccgggggcgcttcaggcgggcttggggggctacgtcggagaccaccagctttgtgccccgccaccccacccgcatgcgcaccacctccttccagctgccggagggcagcatctcctagggccgcccgacggggctaaggccttggaagtagccgccccggagtctcaagggctggattccagcctggacggggcggcgcgtcccaaaggctcccggcggtcggtgccccgcagctcaggccagaccgtctgtcgctgccccaactgtctggaggcggagcgactgggggctccatgtgggcccgatgggggcaagaagaagcatttgcacaactgccacatcccgggctgcgggaaagcctacgccaagacgtcgcacctgaaggcgcacctgcgctggcacagcggcgaccgtcccttcgtgtgcaactggctcttctgcggcaagcgcttcacgcgctcggacgagctgcagcgccacctccagacccacaccggcaccaagaagttcccctgtgcagtctgcagccgcgtcttcatgcgcagcgaccacctggccaagcacatgaaaacccacgagggcgccaaggaggaggcggctggggcggcctcgggagagggcaaggccggcggcgcagtggagccccccgggggcaaaggcaaacgcgaggccgagggcagcgtggctccctccaactgagctcctcagtgccgcctccctgcgggtatcccggggggcactggatgcgagcccccaggtctgacgtccttgggggtggcttgaggaagaggggaaggtgcgtatttattcagggaggaggaaaagtggtgcagggacagggagatggggcgctaggggttcttagtctctggggctactaggcaggatgaatttgactgggtcggtaggagctgcgcaatgcccctctgttctcccctgcctcacagtttccctcgcccctgggctggggggttggggtgggacacccgtaccgcggctggctggcggggacaggctagaggagacagcaagtcccagtccccggagcagagagaagtggggccggcccggggcgctggtggtggctgtctggacacgtccttagcgcctgggaaccaggacataaaagcgcctccggagccgccctgcggcggggtccctttcatcccacttaaagtgcttctgcccctagggtttccggagggagagccgagatgggatgggggagcctgggggtcccccttggcaggggtgtctctttctggtttggagggttgttgctgtaaaaataactcctttgatgagcttccttattaaccctttcagacccagtctgttggagccatgaaggaagagggaaagagggctgccattcctgacagcctcccagccagggctggcgataaaggaccgagatagatggagggggcgagtagggaagtcctcttctaaaatgagagatagggatttggtggggtatggaaggaactaaccccttccctctccacctctgattcagcccttaattcttggtctatgataaataaagttcagtagtctcacattccccatctattaccctaggtgtgttttcaaggcagccagcggtagaatccatgtagttcccaccagttgccttcccctcagggatggaaggaagagggtttcttgggctggttgagggcagattgggggtgtctcatcagagggacctccactggttcccactcagagtggaggcctgcagcctacctgaccatctctttagctgtcaccaagaaaataaaccccactgtctctctagcttggcccttgtctttcccttgcccctgccatagcatgttcattaggggattccttcctccccctcatctcacaggggaagggagaggaaagagttgttctcccactggaaggggttctgccttctgaggtgacatccaggaagctgtccccattcccttctcctttagatgctagaaacacattttgattctgatcatggggtgggggagagaggaaaggagggaggggagaagcccagcagaagctgagccaggcagaggggaaagaagctgatatgaggaagggtctgacaggccacagcccttgcagccggagggctttcccacactcaagagaggggccttacagtccctctgacacccctcccccttcccctcgctccctttcttcacccggagccctctgcagagattagctgtgtattgatttttaagttataagcaaagggtattttatttaatattaggttatgtgtgtgcatgttgtgtgtacctgtgtgcatgtatgtgtgtttctctactgagcctggggtctctagccagggagaccccatcttattcaccatgtccaagatcctgggatctgggcccagcatctcttcctcctttgtagatgctggagcccagccaaggtctgggagctatatgggaagtgggggctgggatctgggtgggaatatgtgtttgtatacaaaggggccctccttaaaagggacaggatgaccttcccgaggaactcattggcctggggtagtttaagaagtaatgttctttctttctttctcttttccctacctcctgctaacccaaccagagatccccttccttgctgagagggttgggggcaggaggagatttggcagtgcctgcaggttgcctggccaggtggagagggggaaagaggaagggcaccgtgggtgtaagatgcctttctcctccacccatcgaaaccagccaccccttccctgtgccaccaagacagccttttccagtggccatcctaaggggaactcccaaatgggtgttgctggtggacacagatgctccccccaatggaagccccaagctctgaggtatgcgggtagaggctttggataggttttcttctgctcccctcttttatagatctaggctgcttggctgcctgtctttctaggcagtccccctagaggaaaaatgtaggaatttattttttctttaactgctgtgaactcactttgagggggtaggaggagggagaaacagcctgtgttttttatgcaataaagtcatcaactac

SEQ ID NO: 1805 - protein, 376 aa, Homo sapiens
MLTAVCGSLGSQHTEAPHASPPRLDLQPLQTYQGHTSPEAGDYPSPLQPGELQSLPLGPEVDFSQGYELPGASSRVTCEDLESDSPLAPGPFSKLLQPDMSHHYESWFRPTHPGAEDGSWWDLHPGTSWMDLPHTQGALTSPGHPGALQAGLGGYVGDHQLCAPPPHPHAHHLLPAAGGQHLLGPPDGAKALEVAAPESQGLDSSLDGAARPKGSRRSVPRSSGQTVCRCPNCLEAERLGAPCGPDGGKKKHLHNCHIPGCGKAYAKTSHLKAHLRWHSGDRPFVCNWLFCGKRFTRSDELQRHLQTHTGTKKFPCAVCSRVFMRSDHLAKHMKTHEGAKEEAAGAASGEGKAGGAVEPPGGKGKREAEGSVAPSN

SEQ ID NO: 1806 - DNA, 3031 bp, Homo sapiens
aggaagatgtcgtaatgagcgatccacagaccagcatggctgccactgctgctgtgagtcccagtgactacctgcagcctgccgcctccaccacccaggactcccagccatctcccttagccctgcttgctgcaacatgtagcaaaattggccctccagcagttgaagctgctgtgacacctcctgctcccccacagcccacaccgcggaaacttgtccctatcaaacctgcccctctccctctcagccccggcaagaatagctttggaatcttgtcctccaaaggaaatatacttcagattcaggggtcacaactgagcgcctcctatcctggagggcagctggtgttcgctatccagaatcccaccatgatcaacaaagggacccgatcaaatgccaatatccagtaccaggcggtccctcagattcaggcaagcaattcccaaaccatccaagtacagcccaatctcaccaaccagatccagatcatccctggcaccaaccaagccatcatcaccccctcaccgtccagtcacaagcctgtccccatcaagccagcccccatccagaagtcgagtacgaccaccacccccgtgcagagcggggccaatgtggtgaagttgacaggtgggggcggcaatgtgacgctcactctgcccgtcaacaacctcgtgaacgccagtgacaccggggcccctactcagctcctcactgaaagccccccaaccccactgtctaagactaacaagaaagcaaggaagaagagccttcctgcctcccagccccctgtggctgtggctgagcaggtggagacggtgctgatcgagaccaccgcggacaacatcatccaggcaggaaataacctgctcattgttcagagccctggtgggggccagccagctgtggtccagcaggtccaggtggtgccccccaaggccgagcagcagcaggtggtacagatcccccagcaggctctgcgggtggtgcaggcggcatctgccaccctccccactgtaccccagaagccctcccagaactttcagatccaggcagctgagccgacacctactcaggtctacatccgcacgccttccggtgaggtgcagacagtccttgtccaggacagccccccagcaacagctgcagccacctctaacaccacctgtagcagccctgcatcccgtgctccccatctgagtgggaccagcaaaaagcactcagctgcaattctccgaaaagagcgtcccctgccaaagattgccccagccgggagcatcatcagcctgaatgcagcccagttggcggcagctgcccaggcaatgcagaccatcaacatcaatggtgtccaggtccagggcgtgcctgtcaccatcaccaacacaggcgggcagcagcagctgacagtgcagaatgtttctgggaacaacctgaccatcagtgggctgagccccacccagatccagctgcaaatggaacaagccctggccggagagacccagcccggggagaagcggcgccgcatggcctgcacgtgtcccaactgcaaggatggggagaagaggtctggagagcagggcaagaagaagcacgtttgccacatccccgactgtggcaagacgttccgtaagacgtccttgctgcgtgcccatgtgcgcctgcacactggcgagcggccctttgtctgcaactggttcttctgtgggaagaggttcacacggagtgacgagctccaacggcatgctcgcacccacacaggggacaaacgcttcgagtgcgcccagtgtcagaagcgcttcatgaggagtgaccacctcaccaagcattacaagacccacctggtcacgaagaacttgtaaggccaactgcggcgggaggccctgaagatgcagtcccccacctgtgtcctccctgggcccctggtggaaaggagccctgtggctgccttgggcctgccctcagccccactcctgttctgcaactgtccccacaggaaggggctctgttccctgtattgtcctccttctgaagccccttggctctgccttggcccttcccctcaccacgagctcccggcctgcccagactgtggacactggccgtgcccaatgagacgttctaaaccaggacgcgtgggaacccttatttccaaaggaaaaacatgcatttcactccgtcgaggagcaaagtgagcccctaccccccaccccgatccccgctcccaacactgccggagtcgcgtcatgccatgccccctctcctgcacctccctggccctgccggccactgtggacgccctggggcttggcacccacctctggagaaactcggggccacctccactccatgtgcccagccccgccacaacctctcctccagcacattccagctctatttaaaaagtaaagacacccaccgactcctgatccccctctttttctatggagaacgttgccttatactctctacttcagatgatgaacactgtgtactgtgtgtgctttaaagaagttttatttaattgctcccttcttcctttccttgttattcacctccctgatgcctgctttcagttgagggttgggggcaatgatgagcatatgaattttttctcactctagcaattcccttttctaaatgacacagcatttaaactcaaatctggattcagataacagcacctgcacatcctgcacctcctccctctcccttcacctcacccctgcccggcccaagctctacttgtgtacagtgtatattgtataatagacaattgtgtctactacatgtttaaaaacacattgcttgttatttttgaggcttttaaattaaacaaaaatccaactttatttttagttgtaactgcttgaggtatgttttatgaattaagtgacagatttgttatcctttattaacgtactttgttggtcagcactgggctgacaaaaattttttcttgctaataaatttagttgcctgaggcaaaatcttcaaaaaaaaaaaaaaaaaaaaaaaaaaaaaaaaaaaaaaaaaa

SEQ ID NO: 1807 - protein, 606 aa, Homo sapiens
MAATAAVSPSDYLQPAASTTQDSQPSPLALLAATCSKIGPPAVEAAVTPPAPPQPTPRKLVPIKPAPLPLSPGKNSFGILSSKGNILQIQGSQLSASYPGGQLVFAIQNPTMINKGTRSNANIQYQAVPQIQASNSQTIQVQPNLTNQIQIIPGTNQAIITPSPSSHKPVPIKPAPIQKSSTTTTPVQSGANVVKLTGGGGNVTLTLPVNNLVNASDTGAPTQLLTESPPTPLSKTNKKARKKSLPASQPPVAVAEQVETVLIETTADNIIQAGNNLLIVQSPGGGQPAVVQQVQVVPPKAEQQQVVQIPQQALRVVQAASATLPTVPQKPSQNFQIQAAEPTPTQVYIRTPSGEVQTVLVQDSPPATAAATSNTTCSSPASRAPHLSGTSKKHSAAILRKERPLPKIAPAGSIISLNAAQLAAAAQAMQTININGVQVQGVPVTITNTGGQQQLTVQNVSGNNLTISGLSPTQIQLQMEQALAGETQPGEKRRRMACTCPNCKDGEKRSGEQGKKKHVCHIPDCGKTFRKTSLLRAHVRLHTGERPFVCNWFFCGKRFTRSDELQRHARTHTGDKRFECAQCQKRFMRSDHLTKHYKTHLVTKNL

SEQ ID NO: 1808 - DNA, 842 bp, Homo sapiens
tctttttcaggctagaaccatggagggtgtagaagagaagaagaagaaggttcctgctgtgccagaaacccttaagaaaaagagaaggaatttcgcagagccgaagatcaagcacctgagaaagaagtttgcccaaaagatgcttcaaaaggcaaggaggaagcttatctatgaaaaagcaaagcactatcacaaggaatataggcagttgtacagaactgaaattcaaatgccaaggatagcaagaaaagctggcaacttctatgtacctgcaaaacccaaattggcgtttgtcatcaggatcagaggtgtcaatggtgtaagcccaaagatccgaaaggtgttgcagcttcttcgcctttgtcaaatcttcaatgaaacctttgtgaagctcaacaaggcttcaattaacatgctgaggattgtagagccatacattgcatgggggtgcccaaatctgaagtcagtaaatgaactaatttacaagcgtggttatggcaaaatcaataagaagggagttgcttcgacagataacactttgattgctcgatctcttggtaaatatagcatcaactgcatggaggatcttattcatgagatctatactgttggaaaatgcttcaaagaagcaaataacttcctgtggcccttcaaattatcttctccacaaggcagaatgaagaaaaaaaccacccattttgtagaagtggagatgctggcaacagggaggaccagatcaacaggcttactagaagactgaactaaggtgtctaccatgattatttttctaagctggttggttaacaaacagtacctgctctcaaatggaaaaaaaaaaaaag

SEQ ID NO: 1809 - DNA, 948 bp, Homo sapiens
atggcggatgacgcaggtgcagcttggaacccggaggccctggtggccgtcggggccctgggattgggaaccgcggtggcttccgcggaggtttcggcagtggcatccggggccggggtagcagcagtggacggggccggggccgaggccgcggagctcgcggaggcaaggccgaggataaggagtggatacccgtcaccaagctgggccgcttggtcaaggaaatgaagatcaaatccctggaggagatctatcccttctccctgcccattaaggtatctgagatcattgactttttcctgggggcctctcttaaggacgaggttttgaagattatgtcggtgcagaagcagacccgtgctggccagcgcaccaggttcaaggcgtttgttgctatcggggactacaatggccacgtcggcctgggtgttaagtgctccaaggaggtggccaccgccatccgtggggccatcatcctggccaagctctccattgtccccgtgcgcagaggctactgaaggagcaagatcggcaagccccacaccgtcccttgcaaggcgacaggccgctgcggctctgtgctggtgcgcctcatccctgcacccaggggcactggcattgtctccgcacctgtgcccaagaagctgctcatgatagctggtatcgatgactgctacacctcagcccggggctgcactgccaccctgggcaacttcgccaaggccacctttgacgccatctctaagacctacagctacctgacccccgacctctggaaggagactgtatttaccaagtctccctgtcaggaattcactgaccacctcgtcaagacccacaccagagtcttcgtgcagcagacccaggctccagctgtggctacaacatagggtttttatacaagaaaaataaagtgaattaagcctgaaaaaaaaaattgcaaaaata

SEQ ID NO: 1810 - DNA, 2515 bp, Homo sapiens
ccctatcccgtcttgctctgcggcgcaggggcaagatggctgctgagaagcaggtcccaggcggcggcggcggcggcggcagtggcggcggcggtggcagtggcggcggcggtagcggcggtggacgtggtgccggaggggaagaaaataaagaaaacgaacgcccttcggccggatcgaaggcaaacaaagaatttggggatagcctgagtttggagattcttcagattattaaggaatcccagcagcagcatggtttacggcatggagattttcagaggtacaggggctactgttcccgtagacaaagacgtcttcgaaaaacactcaacttcaagatgggtaacagacacaaattcacagggaagaaagtgactgaagagcttctgaccgataatagatacttgcttctggttctgatggatgctgaaagagcctggagctacgccatgcagctgaaacaggaagccaacactgaaccccgaaaacggtttcacttgttatctcgcctacgcaaagccgtgaagcatgcagaggaattggaacgcttgtgtgagagcaatcgcgtggatgccaagaccaaattagaggctcaggcttacacagcttacctctcaggaatgctacgttttgaacatcaagaatggaaagctgccattgaggcttttaacaaatgcaaaactatctatgagaagctagccagtgctttcacagaggagcaggctgtgctgtataaccaacgtgtggaagagatttcacccaacatccgctattgtgcatataatattggggaccagtcagccatcaatgaactcatgcagatgagattgaggtctgggggcactgagggtctcttggctgaaaaattggaggctttgatcactcagactcgagccaaacaggcagctaccatgagtgaagtggagtggagagggagaacggttccagtgaagattgacaaagtgcgcattttcttattaggactggctgataacgaagcagctattgtccaggctgaaagcgaagaaactaaggagcgcctgtttgaatcaatgctcagcgagtgtcgggacgccatccaggtggttcgggaggagctcaagccagatcagaaacagagagattatatccttgaaggagagccagggaaggtgtctaatcttcaatacttgcatagctacctgacttacatcaagctatcaacggcaatcaagcgtaatgagaacatggccaaaggtctgcagagggctctgctgcagcagcagccagaggatgacagcaagcgctcaccccggccccaggacctgatccgactctatgacatcatcttacagaatctggtggaattgctccagcttcctggtttagaggaagacaaagccttccagaaagagataggcctcaagactctggtgttcaaagcttacaggtgttttttcattgctcagtcctatgtgctggtgaagaagtggagcgaagcccttgtcctgtatgacagagtcctgaaatatgcaaatgaagtaaattctgatgctggcgccttcaagaacagcctaaaggacctgcctgatgtgcaagagctcatcactcaagtgcggtcagagaagtgctccctgcaggccgcagccatccttgatgcaaacgacgctcatcaaacagagacctcctcctcccaagtcaaggacaataagcctctggttgaacggtttgagacattctgcctggacccttcccttgtcaccaagcaagccaaccttgtgcacttcccaccaggcttccagcccattccctgcaagcctttgttctttgacctggccctcaaccatgtggctttcccaccccttgaggacaagttggaacagaagaccaagagtggcctcactggatacatcaagggcatctttggattcaggagctaaccaggctcttcctcgggggcgggggagattctgactcttaatctgtattgtgagaaaatcccagcaagttccatgatattaaatccaggtctgcattggcccggggcaagagtttaacatcttcggccctgcattcctacatcttgtgtctgtacacgttcttaagcagcgtgtcaggagagcaccctgttgtcttctggtaaatgtgtgcagggtcatcctgtctcctgtacctcctgggaaaggggccgctgctgtctggtgccctgtgagctgtgattgattgcctttggtcagtaatgcgttcaggagtccacaccaggcacagatggggccttgaaacgctttgtcatgcttcttcagtaccatggatttgaaatgaactcatccttgctgtgagcatccaggagcccttgagaagtttatctatgactatgaaactggcaacgtcaccccagaattacggtcagccttattccccttcacctcccagtgaacgctaagaagtttcagacaagcagagagctctatttttagaagaaatatgttacactcagaaatgatgaaaccaaatcttatattaaaaggcaaagatg

SEQ ID NO: 1811 - protein, 627 aa, Homo sapiens
MAAEKQVPGGGGGGGSGGGGGSGGGGSGGGRGAGGEENKENERPSAGSKANKEFGDSLSLEILQIIKESQQQHGLRHGDFQRYRGYCSRRQRRLRKTLNFKMGNRHKFTGKKVTEELLTDNRYLLLVLMDAERAWSYAMQLKQEANTEPRKRFHLLSRLRKAVKHAEELERLCESNRVDAKTKLEAQAYTAYLSGMLRFEHQEWKAAIEAFNKCKTIYEKLASAFTEEQAVLYNQRVEEISPNIRYCAYNIGDQSAINELMQMRLRSGGTEGLLAEKLEALITQTRAKQAATMSEVEWRGRTVPVKIDKVRIFLLGLADNEAAIVQAESEETKERLFESMLSECRDAIQVVREELKPDQKQRDYILEGEPGKVSNLQYLHSYLTYIKLSTAIKRNENMAKGLQRALLQQQPEDDSKRSPRPQDLIRLYDIILQNLVELLQLPGLEEDKAFQKEIGLKTLVFKAYRCFFIAQSYVLVKKWSEALVLYDRVLKYANEVNSDAGAFKNSLKDLPDVQELITQVRSEKCSLQAAAILDANDAHQTETSSSQVKDNKPLVERFETFCLDPSLVTKQANLVHFPPGFQPIPCKPLFFDLALNHVAFPPLEDKLEQKTKSGLTGYIKGIFGFRS

SEQ ID NO: 1812 - DNA, 1309 bp, Homo sapiens
ggacaggtgccccgggagcttcccgctcgcgaagacccagacggctgcaggagcccgggcagcctcggggtcagcggcaccatgaacgtctcgggctgcccaggggccgggaacgcgagccaggcgggcggcgggggaggctggcaccccgaggcggtcatcgtgcccctgctcttcgcgctcatcttcctcgtgggcaccgtgggcaacacgctggtgctggcggtgctgctgcgcggcggccaggcggtcagcactaccaacctgttcatccttaacctgggcgtggccgacctgtgtttcatcctgtgctgcgtgcccttccaggccaccatctacaccctggacggctgggtgttcggctcgctgctgtgcaaggcggtgcacttcctcatcttcctcaccatgcacgccagcagcttcacgctggccgccgtctccctggacaggtatctggccatccgctacccgctgcactcccgcgagctgcgcacgcctcgaaacgcgctggcagccatcgggctcatctgggggctgtcgctgctcttctccgggccctacctgagctactaccgccagtcgcagctggccaacctgaccgtgtgccatcccgcgtggagcgcccctcgccgccgcgccatggacatctgcaccttcgtcttcagctacctgcttcctgtgctggttctcggcctgacctacgcgcgcaccttgcgctacctctggcgcgccgtcgacccggtggccgcgggctcgggtgcccggcgcgccaagcgcaaggtgacacgcatgatcctcatcgtggccgcgctcttctgcctctgctggatgccccaccacgcgctcatcctctgcgtgtggttcggccagttcccgctcacgcgcgccacttatgcgcttcgcatcctctcgcacctggtctcctacgccaactcctgcgtcaaccccatcgtttacgcgctggtctccaagcacttccgcaaaggcttccgcacgatctgcgcgggcctgctgggccgtgccccaggccgagcctcgggccgtgtgtgcgctgccgcgcggggcacccacagtggcagcgtgttggagcgcgagtccagcgacctgttgcacatgagcgaggcggcgggggcccttcgtccctgccccggcgcttcccagccatgcatcctcgagccctgtcctggcccgtcctggcagggcccaaaggcaggcgacagcatcctgacggttgatgtggcctgaaagcacttagcgggcgcgctgggatgtcacagagttggagtcattgttgggggaccgtgggccg

SEQ ID NO: 1813 - protein, 387 aa, Homo sapiens
MNVSGCPGAGNASQAGGGGGWHPEAVIVPLLFALIFLVGTVGNTLVLAVLLRGGQAVSTTNLFILNLGVADLCFILCCVPFQATIYTLDGWVFGSLLCKAVHFLIFLTMHASSFTLAAVSLDRYLAIRYPLHSRELRTPRNALAAIGLIWGLSLLFSGPYLSYYRQSQLANLTVCHPAWSAPRRRAMDICTFVFSYLLPVLVLGLTYARTLRYLWRAVDPVAAGSGARRAKRKVTRMILIVAALFCLCWMPHHALILCVWFGQFPLTRATYALRILSHLVSYANSCVNPIVYALVSKHFRKGFRTICAGLLGRAPGRASGRVCAAARGTHSGSVLERESSDLLHMSEAAGALRPCPGASQPCILEPCPGPSWQGPKAGDSILTVDVA

SEQ ID NO: 1814 - DNA, 1289 bp, Homo sapiens
aggcaccgctgctccctccagtccctccgtgcagccgatgatggccctatggtccctgctccatctcaccttcctggggttcagcattaccttgctgttggtccacgggcagggcttccaagggacagcagccatctggccatccctcttcaacgtcaacttgtccaagaaggttcaggaaagcatccagattccgaacaatgggagtgcgcccctgctcgtggatgtgcgggtgtttgtctccaacgtgtttaatgtggacatcctgcgatacacaatgtcctccatgctgctgcttaggctgtcctggctggacactcgcctggcctggaacactagtgcacacccgcggcacgccatcacgctgccctgggagtctctctggacaccaaggctcaccatcctggaggcgctctgggtggactggagggaccagagcccccaggctcgagtagaccaggacggccacgtgaagctcaacctggccctcaccacggagaccaactgcaactttgagctcctccacttcccccgggaccacagcaactgcagcctcagcttctacgctctcagcaacacggcgatggagttagagttccaggcccacgtggtgaacgagattgtgagtgtcaagagggaatacgtagtttatgatctgaagacccaagtcccaccccagcagctggtgccctgcttccaggtgacgctgaggctgaagaacacggcgctcaagtccatcatcgctctcttggtgcctgcagaggcactgctgttggctgacgtgtgcggggggttgctgcccctccgggccattgagcgcataggctacaaggtgacattgctgctgagttacctcgtcctccactcctccctggtgcaggccctgcccagctcctcctcctgcaacccactgctcatttactacttcaccatcctgctgctgctgctcttcctcagcaccatagagactgtgctgctggctgggctgctggcccggggcaaccttggggccaagagcggccccagcccagccccgagaggggaacagcgagagcacggcaacccagggcctcatcctgctgaagagccctccagaggagtaaaggggtcacagagaagctggcctgagactgctgaccgcatcttcttcctcgtgtatgtggttggggtgctgtgcacccaattcgtctttgcaggaatctggatgtgggcagcgtgcaagtctgacgcagcccctggagaggctgcaccccatggcaggcggcctagactgtaaaggggcagggcct

SEQ ID NO: 1815 - protein, 411 aa, Homo sapiens
MALWSLLHLTFLGFSITLLLVHGQGFQGTAAIWPSLFNVNLSKKVQESIQIPNNGSAPLLVDVRVFVSNVFNVDILRYTMSSMLLLRLSWLDTRLAWNTSAHPRHAITLPWESLWTPRLTILEALWVDWRDQSPQARVDQDGHVKLNLALTTETNCNFELLHFPRDHSNCSLSFYALSNTAMELEFQAHVVNEIVSVKREYVVYDLKTQVPPQQLVPCFQVTLRLKNTALKSIIALLVPAEALLLADVCGGLLPLRAIERIGYKVTLLLSYLVLHSSLVQALPSSSSCNPLLIYYFTILLLLLFLSTIETVLLAGLLARGNLGAKSGPSPAPRGEQREHGNPGPHPAEEPSRGVKGSQRSWPETADRIFFLVYVVGVLCTQFVFAGIWMWAACKSDAAPGEAAPHGRRPRL

SEQ ID NO: 1816 - DNA, 4780 bp, Homo sapiens
ggaagtgggtgtgacggggacgggggcccggtgggcccgcggaggaaagatactggggagtgggagccgcggggttcagagcgatgattcccccacaggaggcatccgctcgacggcgggagattgaggacaagctgaagcaggaggaggagactctgtccttcatccgagacagcctggagaagagcgaccagctcactaagaacatggtgtctatcttatcatcctttgagagccgccttatgaagctggagaactccatcatccctgtgcacaagcagacggagaatctgcagcggctgcaggagaatgttgagaagacgctgtcctgcctggaccatgtcatcagctactaccatgtggccagtgacactgagaagatcatcagagagggccccacaggtaggctggaagagtacctgggaagcatggccaagattcagaaggcagtggagtatttccaggacaacagcccagacagcccggaactcaacaaagtgaaactgctctttgagcgcgggaaggaggccctggagtccgaatttcgcagcctgatgacgcggcacagtaaggtcgtctcgcccgtgctcatcttggatctgatcagtggtgacgatgatctggaggcccaggaggacgtgaccctggagcacctgcccgagagcgtgctccaggatgtcattcgcatctcccgctggctggtggaatatggccgcaaccaagatttcatgaacgtctactaccagatacgctccagccagctggaccgctccatcaaaggactgaaggagcatttccataagagcagttcttcctctggggttccctactcccctgctatccccaacaagaggaaagacacacctaccaagaagccagtcaagcggccagggacgatccgtaaggctcagaaccttctgaaacagtattcccagcatggtctagatgggaaaaaggggggctctaacctcattcctctggaagggagagatgacatgctggacgtggagaccgatgcctacatccactgcgtcagtgccttcgtcaagctggcgcagagcgagtaccagctgctggccgacatcatccccgagcaccaccagaagaagaccttcgactccctgatacaggatgccctggatgggctgatgcttgaaggggagaacatcgtgtctgctgcccggaaggccattgtgcgacacgacttctccacggtgctcaccgtcttccccatcctgcgacacctcaagcagaccaagcctgagtttgaccaggtgctccagggcacggctgccagcacaaagaacaagctgcctggcctcatcacatccatggagaccatcggtgccaaagcgctggaggacttcgcagacaacatcaagaatgacccggacaaggagtacaacatgccgaaggacggcaccgtacacgagctcaccagcaatgccatcctcttcctgcagcagcttttggacttccaggagacggcaggcgccatgctggcctcccaagagaccagctcttcggccaccagctacagctctgagttcagcaagcggctgctaagcacctatatctgtaaagtgctgggcaacctgcagttgaacttgctgagcaagtccaaggtgtacgaggacccagctctgagcgccatcttcctgcacaacaactacaattacatcctcaagtccctggagaagtctgaactgatccagctggtggcagtgacacagaagactgctgagcgctcctaccgggagcacattgagcagcagatccagacctaccagcgcagctggttaaaggtgactgattacatcgcagagaagaatctacctgtgttccagccgggagtcaagctccgggacaaggagcggcagattatcaaggagcgttttaagggcttcaatgatggcctcgaagaactgtgcaaaatccagaaggcctgggctattccagacacagagcagagggacaggattcgccaggcccagaagaccattgtcaaggagacctacggggcctttctacagaagtttggcagcgtgcccttcaccaagaacccggagaagtacatcaagtacggggtggagcaggtgggcgacatgatcgatcgccttttcgacacctctgcctgagcctgctgctagccctgcctggttccaccagactggcgtgtcattggacagataaaccagtgttagcttgcctctgggctgggtgagcttgaagtcctctgggacagagacctgtctccacgcctccgggagctgtgtccctgagccccctagtcctggctcctgctttttccccacagcccgtgttcccagccgaaccagcactctcccggaagcctggggtccctccacaccttggcttttatgaccctgatggcttctgaaacaggaaaagagagaaggaagacagaggcctgtgcccactgctgctccatgtgtaccaagagcagcagggcagaagggccctccctccagcctaggtcagaggtggggacagagaactcccctacagcccagagatgtggcagggctcagagaagcagccagagctcctggaggaaaggcagtcgggactgaccccctctcttaaaacacattcccgcccgcccacaggcctgaggtctgggacctttccctcccaggagtcccctaggtggctgggggaggcaggctcactggccattttccctagagtccagcacactgcaggaggcgttcggaggaggagttccgccccaccctctacagccttcctcaggcccctgtctctggcccccagcctcagtgcctcttggcccagggccaggcagtcgtggttgcagaaggagcaattaggctgcctgcctgtgggctgggagacagggacaatggggaaaagttaaggagcaaaatgggggttggaagcaaaaaatagggccccacctatttaggacgagattgaagactgacccttgaggcacacttgcactggagatgggtttatttcacgctctgtgcttgtgtgctagcggagggagagctcagggtggcttaatccagaggccctgtcatggcccgcccccagccatgggaaagcaaacttcatcctaaggtgtgcagcccaggccctgcccctttacagtctaggccgcctgccatggggtgcagcctctccaggggctgcgtcagacttgcacgctgcccacatccagattcctgcaaagacgaattgggtgcacagcaccccaaccacatacacgaggaagaagatgcggtcagcagtctcaggccagcttctctgtgacccctttactcctctggagggctctgtggggagagatacagggaaaggagctgttcttcaaggtcccctcaacatgagcggaagagcgaaccccaggggtcatcagcctgtatcgcttcctttcttagattctcagctgatgaaaatttgggtctggcccatttcaggccatcttcagttgaagaaacaccctcttaggctgtgcaaggcatgggttatcaggggattgaggtcacctgggacttcagggaggctcagcttgctccctgccccagacctgtttcttctaagggaggaggacatggtggagaccagggacaggagagccagcagggtggatgcaaggggcctctacccacacctggacctccgtgccctcaccccagccctaggtgtgcacctaggcctcattccttaccccccagcccctgcccaccttcagcaggatgaggccctgggttgccgtgctctcgctgttcccctctcggggctgggctggggccgctcttggccccaaggttgccccgggccagcagcccagccagcagcacagtctctatggtgctgaggaagagcagcagcagcaggatggtgaagtagtaaactgggggaggcagggcacagggagatgctcaggggccagtccctgtgtctctggtgcccagcgagctgagcaccagtgggtgaccggggagaaacagggcagactgggtaagggagcagggcttactgagcagtgggttgcaggaggaggagctgggcagggcctgcaccagggaggagtggaggacgaggtaactcagcagcaatgtcaccttgtagcctatgcgctcaatggcccggaggggcagcaaccccccgcacacgtcagccaacagcagtgcctctgcaggcaccaagagagcgatgatggacttgagcgccgtgttcttcagcctcagctggaaggggaaaagtcagggccttcccggcgggggggaaggaggtgggcatcgggggcatggggcctggcctctggccgtgcatcctcactcccacccgcctccagcagccctctgtcggcctcctcccgacttgactcaccgtcacctggaagcagggcaccagctgctggggtgggacttgggtcttcagatcataaactacgtattccctcttgacactcacaatctcgttcaccacgtgggcctggaactctaactccatcgctgaggggtgggaatgagaactatgaaccaggaaggagagatcccagctgccaagtctgggggtagcagactggagcccaggggtgatggagacttttgatggcttttggcagggacagacttggacacaaaaccgatccatagaagggcttcccaaaccttgttttgcaacatcccaaattgtctccagttgaaggaaggcctttatcagattcatagatgagctttcattgtaaaaataaatgtactttgcaccacttcatgatggaggg

SEQ ID NO: 1817 - protein, 684 aa, Homo sapiens
MIPPQEASARRREIEDKLKQEEETLSFIRDSLEKSDQLTKNMVSILSSFESRLMKLENSIIPVHKQTENLQRLQENVEKTLSCLDHVISYYHVASDTEKIIREGPTGRLEEYLGSMAKIQKAVEYFQDNSPDSPELNKVKLLFERGKEALESEFRSLMTRHSKVVSPVLILDLISGDDDLEAQEDVTLEHLPESVLQDVIRISRWLVEYGRNQDFMNVYYQIRSSQLDRSIKGLKEHFHKSSSSSGVPYSPAIPNKRKDTPTKKPVKRPGTIRKAQNLLKQYSQHGLDGKKGGSNLIPLEGRDDMLDVETDAYIHCVSAFVKLAQSEYQLLADIIPEHHQKKTFDSLIQDALDGLMLEGENIVSAARKAIVRHDFSTVLTVFPILRHLKQTKPEFDQVLQGTAASTKNKLPGLITSMETIGAKALEDFADNIKNDPDKEYNMPKDGTVHELTSNAILFLQQLLDFQETAGAMLASQETSSSATSYSSEFSKRLLSTYICKVLGNLQLNLLSKSKVYEDPALSAIFLHNNYNYILKSLEKSELIQLVAVTQKTAERSYREHIEQQIQTYQRSWLKVTDYIAEKNLPVFQPGVKLRDKERQIIKERFKGFNDGLEELCKIQKAWAIPDTEQRDRIRQAQKTIVKETYGAFLQKFGSVPFTKNPEKYIKYGVEQVGDMIDRLFDTSA

SEQ ID NO: 1818 - DNA, 4687 bp, Homo sapiens
ggaagtgggtgtgacggggacgggggcccggtgggcccgcggaggaaagatactggggagtgggagccgcggggttcagagcgatgattcccccacaggaggcatccgctcgacggcgggagattgaggacaagctgaagcaggaggaggagactctgtccttcatccgagacagcctggagaagagcgaccagctcactaagaacatggtgtctatcttatcatcctttgagagccgccttatgaagctggagaactccatcatccctgtgcacaagcagacggagaatctgcagcggctgcaggagaatgttgagaagacgctgtcctgcctggaccatgtcatcagctactaccatgtggccagtgacactgagaagatcatcagagagggccccacaggtaggctggaagagtacctgggaagcatggccaagattcagaaggcagtggagtatttccaggacaacagcccagacagcccggaactcaacaaagtgaaactgctctttgagcgcgggaaggaggccctggagtccgaatttcgcagcctgatgacgcggcacagtaaggtcgtctcgcccgtgctcatcttggatctgatcagtggtgacgatgatctggaggcccaggaggacgtgaccctggagcacctgcccgagagcgtgctccaggatgtcattcgcatctcccgctggctggtggaatatggccgcaaccaagatttcatgaacgtctactaccagatacgctccagccagctggaccgctccatcaaaggactgaaggagcatttccataagagcagttcttcctctggggttccctactcccctgctatccccaacaagaggaaagacacacctaccaagaagccagtcaagcggccagggagagatgacatgctggacgtggagaccgatgcctacatccactgcgtcagtgccttcgtcaagctggcgcagagcgagtaccagctgctggccgacatcatccccgagcaccaccagaagaagaccttcgactccctgatacaggatgccctggatgggctgatgcttgaaggggagaacatcgtgtctgctgcccggaaggccattgtgcgacacgacttctccacggtgctcaccgtcttccccatcctgcgacacctcaagcagaccaagcctgagtttgaccaggtgctccagggcacggctgccagcacaaagaacaagctgcctggcctcatcacatccatggagaccatcggtgccaaagcgctggaggacttcgcagacaacatcaagaatgacccggacaaggagtacaacatgccgaaggacggcaccgtacacgagctcaccagcaatgccatcctcttcctgcagcagcttttggacttccaggagacggcaggcgccatgctggcctcccaagagaccagctcttcggccaccagctacagctctgagttcagcaagcggctgctaagcacctatatctgtaaagtgctgggcaacctgcagttgaacttgctgagcaagtccaaggtgtacgaggacccagctctgagcgccatcttcctgcacaacaactacaattacatcctcaagtccctggagaagtctgaactgatccagctggtggcagtgacacagaagactgctgagcgctcctaccgggagcacattgagcagcagatccagacctaccagcgcagctggttaaaggtgactgattacatcgcagagaagaatctacctgtgttccagccgggagtcaagctccgggacaaggagcggcagattatcaaggagcgttttaagggcttcaatgatggcctcgaagaactgtgcaaaatccagaaggcctgggctattccagacacagagcagagggacaggattcgccaggcccagaagaccattgtcaaggagacctacggggcctttctacagaagtttggcagcgtgcccttcaccaagaacccggagaagtacatcaagtacggggtggagcaggtgggcgacatgatcgatcgccttttcgacacctctgcctgagcctgctgctagccctgcctggttccaccagactggcgtgtcattggacagataaaccagtgttagcttgcctctgggctgggtgagcttgaagtcctctgggacagagacctgtctccacgcctccgggagctgtgtccctgagccccctagtcctggctcctgctttttccccacagcccgtgttcccagccgaaccagcactctcccggaagcctggggtccctccacaccttggcttttatgaccctgatggcttctgaaacaggaaaagagagaaggaagacagaggcctgtgcccactgctgctccatgtgtaccaagagcagcagggcagaagggccctccctccagcctaggtcagaggtggggacagagaactcccctacagcccagagatgtggcagggctcagagaagcagccagagctcctggaggaaaggcagtcgggactgaccccctctcttaaaacacattcccgcccgcccacaggcctgaggtctgggacctttccctcccaggagtcccctaggtggctgggggaggcaggctcactggccattttccctagagtccagcacactgcaggaggcgttcggaggaggagttccgccccaccctctacagccttcctcaggcccctgtctctggcccccagcctcagtgcctcttggcccagggccaggcagtcgtggttgcagaaggagcaattaggctgcctgcctgtgggctgggagacagggacaatggggaaaagttaaggagcaaaatgggggttggaagcaaaaaatagggccccacctatttaggacgagattgaagactgacccttgaggcacacttgcactggagatgggtttatttcacgctctgtgcttgtgtgctagcggagggagagctcagggtggcttaatccagaggccctgtcatggcccgcccccagccatgggaaagcaaacttcatcctaaggtgtgcagcccaggccctgcccctttacagtctaggccgcctgccatggggtgcagcctctccaggggctgcgtcagacttgcacgctgcccacatccagattcctgcaaagacgaattgggtgcacagcaccccaaccacatacacgaggaagaagatgcggtcagcagtctcaggccagcttctctgtgacccctttactcctctggagggctctgtggggagagatacagggaaaggagctgttcttcaaggtcccctcaacatgagcggaagagcgaaccccaggggtcatcagcctgtatcgcttcctttcttagattctcagctgatgaaaatttgggtctggcccatttcaggccatcttcagttgaagaaacaccctcttaggctgtgcaaggcatgggttatcaggggattgaggtcacctgggacttcagggaggctcagcttgctccctgccccagacctgtttcttctaagggaggaggacatggtggagaccagggacaggagagccagcagggtggatgcaaggggcctctacccacacctggacctccgtgccctcaccccagccctaggtgtgcacctaggcctcattccttaccccccagcccctgcccaccttcagcaggatgaggccctgggttgccgtgctctcgctgttcccctctcggggctgggctggggccgctcttggccccaaggttgccccgggccagcagcccagccagcagcacagtctctatggtgctgaggaagagcagcagcagcaggatggtgaagtagtaaactgggggaggcagggcacagggagatgctcaggggccagtccctgtgtctctggtgcccagcgagctgagcaccagtgggtgaccggggagaaacagggcagactgggtaagggagcagggcttactgagcagtgggttgcaggaggaggagctgggcagggcctgcaccagggaggagtggaggacgaggtaactcagcagcaatgtcaccttgtagcctatgcgctcaatggcccggaggggcagcaaccccccgcacacgtcagccaacagcagtgcctctgcaggcaccaagagagcgatgatggacttgagcgccgtgttcttcagcctcagctggaaggggaaaagtcagggccttcccggcgggggggaaggaggtgggcatcgggggcatggggcctggcctctggccgtgcatcctcactcccacccgcctccagcagccctctgtcggcctcctcccgacttgactcaccgtcacctggaagcagggcaccagctgctggggtgggacttgggtcttcagatcataaactacgtattccctcttgacactcacaatctcgttcaccacgtgggcctggaactctaactccatcgctgaggggtgggaatgagaactatgaaccaggaaggagagatcccagctgccaagtctgggggtagcagactggagcccaggggtgatggagacttttgatggcttttggcagggacagacttggacacaaaaccgatccatagaagggcttcccaaaccttgttttgcaacatcccaaattgtctccagttgaaggaaggcctttatcagattcatagatgagctttcattgtaaaaataaatgtactttgcaccacttcatgatggaggg

SEQ ID NO: 1819 - protein, 653 aa, Homo sapiens
MIPPQEASARRREIEDKLKQEEETLSFIRDSLEKSDQLTKNMVSILSSFESRLMKLENSIIPVHKQTENLQRLQENVEKTLSCLDHVISYYHVASDTEKIIREGPTGRLEEYLGSMAKIQKAVEYFQDNSPDSPELNKVKLLFERGKEALESEFRSLMTRHSKVVSPVLILDLISGDDDLEAQEDVTLEHLPESVLQDVIRISRWLVEYGRNQDFMNVYYQIRSSQLDRSIKGLKEHFHKSSSSSGVPYSPAIPNKRKDTPTKKPVKRPGRDDMLDVETDAYIHCVSAFVKLAQSEYQLLADIIPEHHQKKTFDSLIQDALDGLMLEGENIVSAARKAIVRHDFSTVLTVFPILRHLKQTKPEFDQVLQGTAASTKNKLPGLITSMETIGAKALEDFADNIKNDPDKEYNMPKDGTVHELTSNAILFLQQLLDFQETAGAMLASQETSSSATSYSSEFSKRLLSTYICKVLGNLQLNLLSKSKVYEDPALSAIFLHNNYNYILKSLEKSELIQLVAVTQKTAERSYREHIEQQIQTYQRSWLKVTDYIAEKNLPVFQPGVKLRDKERQIIKERFKGFNDGLEELCKIQKAWAIPDTEQRDRIRQAQKTIVKETYGAFLQKFGSVPFTKNPEKYIKYGVEQVGDMIDRLFDTSA

SEQ ID NO: 1820 - DNA, 681 bp, Homo sapiens
atgaacgaacctgcccgacccgggaaagatcccgcctggcgggggcctgtgcggggcccttcctggggacagcgccactcgcctccgtcccgctccccaccgcagcccggcacggagaaagcgctgagtcacgttccgggcacgcggccccaggggagccaggcctcaggggcgcacctggacccgtgggggctcctgggcctgctgggggaacgcctgggcccgcgatggggggcgcccgcacccgcacccgctgcccagcgcagcccccgcagcgtccccggttgcctggagccacgggccgggcagcagcgggtgccagaggctgacgccaccgcggcttgccagccgaaccccccttccggactggttcagaggaatggaggcgccccctcctgcccccgttctgtccccacccatgaccctggcccctgggcctctcccttcctctgcaccctgggccttctcggaggttccagctgcgcgagcgcggtggaggccaagggtggtgtggggcgccccctcgcggcccggcctggcccggcccggcccgggctcgcctcacctccccgcctgcttaagccctcccggagcgctcggggttcgacccccgagcacggcgggaggagggcgcccccctgcggcacagccacgtccacgaagcccctcccggggttctag

SEQ ID NO: 1821 - protein, 226 aa, Homo sapiens
MNEPARPGKDPAWRGPVRGPSWGQRHSPPSRSPPQPGTEKALSHVPGTRPQGSQASGAHLDPWGLLGLLGERLGPRWGAPAPAPAAQRSPRSVPGCLEPRAGQQRVPEADATAACQPNPPSGLVQRNGGAPSCPRSVPTHDPGPWASPFLCTLGLLGGSSCASAVEAKGGVGRPLAARPGPARPGLASPPRLLKPSRSARGSTPEHGGRRAPPCGTATSTKPLPGF

SEQ ID NO: 1822 - DNA, 2401 bp, Homo sapiens
ctgcgggactcagcgggccagagagcgcggcgggccacccccggctcagcccgtggatgctgaccgccccctcggagagtccccgcagacatggcggagagctggctgcgcctctcgggagccgggccggcggaggaggccgggccggagggcggcctggaggagcccgacgccctggatgacagcctgaccagcctgcagtggctgcaggaattctccattctcaacgccaaggcccccgccctgcccccggggggcaccgacccccacggctaccaccaggtgccaggttcagcggcgcccgggtcccccctggcggccgaccccgcctgcctggggcagccacacacgccgggcaagcccacgtcgtcgtgcacgtcgcggagcgcgcccccggggctgcaggccccaccccccgacgacgtggactacgccaccaatccgcacgtgaagcctccctactcgtatgccacgctcatctgcatggccatgcaggccagcaaggccaccaagatcaccctgtcggccatctacaagtggatcacggacaacttctgctacttccgccacgcagatcccacctggcagaattcaatccgccacaacctgtctctgaacaagtgcttcatcaaagtgcctcgggagaaggacgaaccaggcaaggggggcttctggcgcattgacccccagtacgcggagcggctactgagcggcgctttcaagaagcggcgactgccccctgtccacatccacccagcctttgcccgccaggccgcgcaggagcccagcgctgtcccccgggccgggccgctgacggtgaataccgaggcccagcagctgctgcgggagttcgaggaggccaccggggaggcgggctggggtgcaggcgagggcaggctggggcataagcgcaaacagccgctgcccaagcgggtggccaaggtcccgcggccccccagcaccctgctgcccaccccggaggagcagggtgagctggaacccctcaaaggcaactttgactgggaggccatcttcgacgccggcactctgggcggggagctgggtgcactggaggccctggagctgagcccgcctctgagccccgcctcacacgtggacgtggacctcaccatccacggccgccacatcgactgccctgccacctgggggccttcggtggagcaggctgccgacagcctggacttcgatgagaccttcctggccacatccttcctgcagcacccctgggacgagagcggcagtggctgcctgcccccggagcccctctttgaggctggggatgccaccctggcctccgacctgcaggactgggccagcgtgggggccttcttgtaagaggccaggccctgccccacctctggacagtgcccaagtcagggtccagaactgccccccaacacaggtccacagacaccccaccacctaggcaggggctgggccagggctccaaggcttgccccagaggccacatggccaccagccccagctgccatcagattcaagcccaggaggctgaaaacgagggcccaggaccagaatcgctgcctcctctccccagccccaccttgtacacacagtgtttcattgctccgcgtcttcccagccccagaaaccggctaaaggaccctgcaccatgagagccgaggcctggaggagcccgggtcaggctggggaggaacagaactgggccctcccagagcacctccgcttcccccctgcttccccaggtctctatccagagagagtccccaggtacaacaaatgctaattagatgacagcaaattaaccccctggaggcttctcctggcagagcctccctggggccggggcaggctgtggatggggcggagcagggcagaagatggactgggggagggggcagagagaggagaccaaaatgaggtggtggcacagggtggggcaaggagatcctctctaaggcctctggggtctttgcctggccccatccctagggggcggggaggggacgtaaatccctaatctttaagcccgacttgaggctgagagcagctggaagtttgggtttggtggtttgggggccggggcagccaagctgtatggggcaggacagacagactaatgtagtgagtgtagctgtagctgaggcttaactgggagggatgccgagcttgctggaactactgggaccaagaagcggggtaccccacgcccctgcctgcactcctcgggggcgtggggcgtgccttgctccacccggactccctgggctgcgtcccacatccaccctcctgccccgtggggcaatttaacctttttcatgaaagttatttacaatgaaaagtttttaaaaataaaatttttaaaaatctaaaaaaaaaaaaaaaaaaaaaaaaaaaa

SEQ ID NO: 1823 - protein, 421 aa, Homo sapiens
MAESWLRLSGAGPAEEAGPEGGLEEPDALDDSLTSLQWLQEFSILNAKAPALPPGGTDPHGYHQVPGSAAPGSPLAADPACLGQPHTPGKPTSSCTSRSAPPGLQAPPPDDVDYATNPHVKPPYSYATLICMAMQASKATKITLSAIYKWITDNFCYFRHADPTWQNSIRHNLSLNKCFIKVPREKDEPGKGGFWRIDPQYAERLLSGAFKKRRLPPVHIHPAFARQAAQEPSAVPRAGPLTVNTEAQQLLREFEEATGEAGWGAGEGRLGHKRKQPLPKRVAKVPRPPSTLLPTPEEQGELEPLKGNFDWEAIFDAGTLGGELGALEALELSPPLSPASHVDVDLTIHGRHIDCPATWGPSVEQAADSLDFDETFLATSFLQHPWDESGSGCLPPEPLFEAGDATLASDLQDWASVGAFL

SEQ ID NO: 1824 - DNA, 3522 bp, Homo sapiens
ctcaccccggccgtccggccgcttcattgtcaccgggcctcggggcagtgttgggggtggcggggcgccaggtcgccgacccgaggtttgggcgcgactggttccgcatcccctccccgccggccgaatctgcaggccccgcgcgccaggcaggcttcgcggctgcgcccccggcccgcgcaggacctgccttgtccaccatgaaaggcacccgggccatcggcagcgtcccggagcgcagcccagcaggtgtggacctgagtctgacaggtctccctccgcctgtgtcccggcgtcctggcagtgccgccaccaccaagcccatcgtccgctctgtctccgtggtcacaggcagcgagcagaagaggaaggtgctggaggccacagggcctgggggctcccaggccatcaacaaccttagaagatccaacagcaccacgcaggtcagccagcctcggagcggctcccccaggccaacggagcccacagacttcctgatgctcttcgagggcagccccagtgggaaaaagaggcctgccagcctgagcacagcccccagcgagaagggagccacctggaacgtcctggatgaccagccccggggcttcaccttgccatccaatgcccggagttccagtgcccttgactcaccagcgggcccgcggaggaaagaatgcaccgtggccctggcccccaacttcactgctaacaacaggagcaacaagggagcagtgggcaactgcgtcaccaccatggtgcacaaccgctacaccccctcggagagggcgcctccgctcaagagctccaaccagactgccccctccctcaacaacatcatcaaggcagccacctgtgagggcagtgagagcagcggctttgggaagctgccgaagaatgtctccagtgccacccactcagcccggaacaatactgggggcagcacgggcttgcccaggcggaaggaggtgacggaggaggaggctgagaggtttatccaccaggtgaaccaggccactgtcaccatccagcgctggtaccggcaccaggtgcagcggcgcggagcaggagctgcccgcctggagcacttgcttcaggccaagcgggaggagcagcggcagcggtcaggcgaggggaccctcttggacctgcaccagcagaaagaggcagccaggaggaaggcccgggaggagaaggcacgccaagccaggcgagcagccattcaggagctgcaacagaaacgagccctgagagcccagaaggcgagcactgccgagcgtgggccacctgagaatcccagggagaccagagtgccaggaatgcggcagcctgctcaggagctgtcccccacaccaggcggcactgcccaccaggccctcaaggccaacaatactggtggtggcctccctgctgcaggccccggagaccgctgcctgcccacctccgactcatccccagaaccacagcagcctccagaggacaggacgcaggacgttcttgcccaggatgcagctggggacaacctggagatgatggccccgagcagggggagcgccaagtccagggggccactggaggagctgctgcacacactgcagctgctggagaaggagccggacgtgctgccccgccccaggacccatcacaggggcagatacgcctgggccagcgaggaggatgacgccagctctctgacagctgacaacttggagaaatttggaaaactcagtgcgttccccgaacctcctgaggatgggacgctgctatcggaggccaagctacaaagcatcatgagcttcttggacgagatggagaagtctgggcaggaccagctggactcccagcaggaggggtgggtgccggaggcggggccggggcccctggagctggggtccgaggtgagcacgtctgtgatgcggctgaagctggaggtggaggagaagaagcaggccatgctgctgctgcagagagcgctggcgcagcagcgagacctcacggcccggcgggtcaaggagacagagaaggcgctgagccggcagctgcagcggcagagggagcactacgaggccaccatccagcggcacttggccttcattgaccagctgattgaggacaagaaggtcctgagtgaaaagtgcgaggctgtggtggccgagctgaagcaggaggaccagagatgcaccgagcgtgtggcccaggcacaggcgcagcacgagctggagattaaaaaactcaaagaattaatgagcgccaccgagaaagcccgccgggagaagtggatcagtgagaaaaccaagaagatcaaggaggtcactgtccgaggtctggagcccgagatccagaagctgattgcaaggcacaagcaggaagtgcggaggctcaagagcctgcacgaggcggagctgctgcagtcggatgagcgggcctcgcagcgctgcctgcgccaggccgaggagctgcgggagcagctggagcgggagaaggaggcgctgggccagcaggagcgcgaacgtgctcggcagcggcagcgggcggagctggaagagctgaggcagcagctggaggagagcagctctgcactgacccgagccctgagggctgagtttgagaagggcagggaggagcaggagcgccggcaccagatggagctgaataccctgaagcagcagctggagctggagaggcaggcgtgggaggccggccgcaccaggaaggaggaggcgtggctgctgaaccgggaacaggagctgagggaagaaatccggaaaggccgggacaaggagattgagctggtcattcaccggctggaggccgacatggcgctggccaaggaggagagtgagaaggctgccgagagccgcatcaagcgcttacgggacaagtacgaggccgagctctccgagctggagcagtcggagcggaagcttcaggagcggtgctcggagctgaagggccagcttggggaggccgagggcgagaatctgcgtctgcagggccttgtgcggcagaaggagcgggcgctggaggatgcgcaggcggtgaacgagcagctttctagcgagcgcagcaacctggcccaggtgatccgccaggagttcgaggaccggctggcagcctctgaggaggagacgcggcaggccaaggccgagctggccacgctgcaggcccgccagcagctggagctggaggaggtgcaccggagggtgaagacagccctcgcgaggaaggaggaggccgtgagcagcctccggacacaacatgaggctgcggtgaagcgggccgaccacctggaggagctgctggagcagcacaggaggcccacgccaagtaccaagtgaccagggatgccgggaacactgtcgaagaacggaaggcagaggacagaggctggacgtgggcccagaggcccacagggacgcccacctgccccccacagaggctggtggttgagatgcccacggctaagcacctgtggctgcattttaacagtaaaggaggccgttgttttcagcgcaaaaaaaaaaa

SEQ ID NO: 1825 - protein, 1044 aa, Homo sapiens
MKGTRAIGSVPERSPAGVDLSLTGLPPPVSRRPGSAATTKPIVRSVSVVTGSEQKRKVLEATGPGGSQAINNLRRSNSTTQVSQPRSGSPRPTEPTDFLMLFEGSPSGKKRPASLSTAPSEKGATWNVLDDQPRGFTLPSNARSSSALDSPAGPRRKECTVALAPNFTANNRSNKGAVGNCVTTMVHNRYTPSERAPPLKSSNQTAPSLNNIIKAATCEGSESSGFGKLPKNVSSATHSARNNTGGSTGLPRRKEVTEEEAERFIHQVNQATVTIQRWYRHQVQRRGAGAARLEHLLQAKREEQRQRSGEGTLLDLHQQKEAARRKAREEKARQARRAAIQELQQKRALRAQKASTAERGPPENPRETRVPGMRQPAQELSPTPGGTAHQALKANNTGGGLPAAGPGDRCLPTSDSSPEPQQPPEDRTQDVLAQDAAGDNLEMMAPSRGSAKSRGPLEELLHTLQLLEKEPDVLPRPRTHHRGRYAWASEEDDASSLTADNLEKFGKLSAFPEPPEDGTLLSEAKLQSIMSFLDEMEKSGQDQLDSQQEGWVPEAGPGPLELGSEVSTSVMRLKLEVEEKKQAMLLLQRALAQQRDLTARRVKETEKALSRQLQRQREHYEATIQRHLAFIDQLIEDKKVLSEKCEAVVAELKQEDQRCTERVAQAQAQHELEIKKLKELMSATEKARREKWISEKTKKIKEVTVRGLEPEIQKLIARHKQEVRRLKSLHEAELLQSDERASQRCLRQAEELREQLEREKEALGQQERERARQRQRAELEELRQQLEESSSALTRALRAEFEKGREEQERRHQMELNTLKQQLELERQAWEAGRTRKEEAWLLNREQELREEIRKGRDKEIELVIHRLEADMALAKEESEKAAESRIKRLRDKYEAELSELEQSERKLQERCSELKGQLGEAEGENLRLQGLVRQKERALEDAQAVNEQLSSERSNLAQVIRQEFEDRLAASEEETRQAKAELATLQARQQLELEEVHRRVKTALARKEEAVSSLRTQHEAAVKRADHLEELLEQHRRPTPSTK

SEQ ID NO: 1826 - DNA, 3630 bp, Homo sapiens
ctcaccccggccgtccggccgcttcattgtcaccgggcctcggggcagtgttgggggtggcggggcgccaggtcgccgacccgaggtttgggcgcgactggttccgcatcccctccccgccggccgaatctgcaggccccgcgcgccaggcaggcttcgcggctgcgcccccggcccgcgcaggacctgccttgtccaccatgaaaggcacccgggccatcggcagcgtcccggagcgcagcccagcaggtgtggacctgagtctgacaggtctccctccgcctgtgtcccggcgtcctggcagtgccgccaccaccaagcccatcgtccgctctgtctccgtggtcacaggcagcgagcagaagaggaaggtgctggaggccacagggcctgggggctcccaggccatcaacaaccttagaagatccaacagcaccacgcaggtcagccagcctcggagcggctcccccaggccaacggagcccacagacttcctgatgctcttcgagggcagccccagtgggaaaaagaggcctgccagcctgagcacagcccccagcgagaagggagccacctggaacgtcctggatgaccagccccggggcttcaccttgccatccaatgcccggagttccagtgcccttgactcaccagcgggcccgcggaggaaagaatgcaccgtggccctggcccccaacttcactgctaacaacaggagcaacaagggagcagtgggcaactgcgtcaccaccatggtgcacaaccgctacaccccctcggagagggcgcctccgctcaagagctccaaccagactgccccctccctcaacaacatcatcaaggcagccacctgtgagggcagtgagagcagcggctttgggaagctgccgaagaatgtctccagtgccacccactcagcccggaacaatactgggggcagcacgggcttgcccaggcggaaggaggtgacggaggaggaggctgagaggtttatccaccaggtgaaccaggccactgtcaccatccagcgctggtaccggcaccaggtgcagcggcgcggagcaggagctgcccgcctggagcacttgcttcaggccaagcgggaggagcagcggcagcggtcaggcgaggggaccctcttggacctgcaccagcagaaagaggcagccaggaggaaggcccgggaggagaaggcacgccaagccaggcgagcagccattcaggagctgcaacagaaacgagccctgagagcccagaaggcgagcactgccgagcgtgggccacctgagaatcccagggagaccagagtgccaggaatgcggcagcctgctcaggagctgtcccccacaccaggcggcactgcccaccaggccctcaaggccaacaatactggtggtggcctccctgctgcaggccccggagaccgctgcctgcccacctccgactcatccccagaaccacagcagcctccagaggacaggacgcaggacgttcttgcccaggatgcagctggggacaacctggagatgatggccccgagcagggggagcgccaagtccagggggccactggaggagctgctgcacacactgcagctgctggagaaggagccggacgtgctgccccgccccaggacccatcacaggggcagatacgcctgggccagcgaggaggatgacgccagctctctgacagctgacaacttggagaaatttggaaaactcagtgcgttccccgaacctcctgaggatgggacgctgctatcggaggccaagctacaaagcatcatgagcttcttggacgagatggagaagtctgggcaggaccagctggactcccagcaggaggggtgggtgccggaggcggggccggggcccctggagctggggtccgaggtgagcacgtctgtgatgcggctgaagctggaggtggaggagaagaagcaggccatgctgctgctgcagagagcgctggcgcagcagcgagacctcacggcccggcgggtcaaggagacagagaaggcgctgagccggcagctgcagcggcagagggagcactacgaggccaccatccagcggcacttggccttcattgaccagctgattgaggacaagaaggtcctgagtgaaaagtgcgaggctgtggtggccgagctgaagcaggaggaccagagatgcaccgagcgtgtggcccaggcacaggcgcagcacgagctggagattaaaaaactcaaagaattaatgagcgccaccgagaaagcccgccgggagaagtggatcagtgagaaaaccaagaagatcaaggaggtcactgtccgaggtctggagcccgagatccagaagctgattgcaaggcacaagcaggaagtgcggaggctcaagagcctgcacgaggcggagctgctgcagtcggatgagcgggcctcgcagcgctgcctgcgccaggccgaggagctgcgggagcagctggagcgggagaaggaggcgctgggccagcaggagcgcgaacgtgctcggcagcggttccagcagcacctggagcaggagcagtgggcgctgcagcagcaacggcagcggctgtacagtgaggtggctgaggagagggagcggctgggccagcaggcagccaggcagcgggcggagctggaagagctgaggcagcagctggaggagagcagctctgcactgacccgagccctgagggctgagtttgagaagggcagggaggagcaggagcgccggcaccagatggagctgaataccctgaagcagcagctggagctggagaggcaggcgtgggaggccggccgcaccaggaaggaggaggcgtggctgctgaaccgggaacaggagctgagggaagaaatccggaaaggccgggacaaggagattgagctggtcattcaccggctggaggccgacatggcgctggccaaggaggagagtgagaaggctgccgagagccgcatcaagcgcttacgggacaagtacgaggccgagctctccgagctggagcagtcggagcggaagcttcaggagcggtgctcggagctgaagggccagcttggggaggccgagggcgagaatctgcgtctgcagggccttgtgcggcagaaggagcgggcgctggaggatgcgcaggcggtgaacgagcagctttctagcgagcgcagcaacctggcccaggtgatccgccaggagttcgaggaccggctggcagcctctgaggaggagacgcggcaggccaaggccgagctggccacgctgcaggcccgccagcagctggagctggaggaggtgcaccggagggtgaagacagccctcgcgaggaaggaggaggccgtgagcagcctccggacacaacatgaggctgcggtgaagcgggccgaccacctggaggagctgctggagcagcacaggaggcccacgccaagtaccaagtgaccagggatgccgggaacactgtcgaagaacggaaggcagaggacagaggctggacgtgggcccagaggcccacagggacgcccacctgccccccacagaggctggtggttgagatgcccacggctaagcacctgtggctgcattttaacagtaaaggaggccgttgttttcagcgcaaaaaaaaaaa

SEQ ID NO: 1827 - protein, 1080 aa, Homo sapiens
MKGTRAIGSVPERSPAGVDLSLTGLPPPVSRRPGSAATTKPIVRSVSVVTGSEQKRKVLEATGPGGSQAINNLRRSNSTTQVSQPRSGSPRPTEPTDFLMLFEGSPSGKKRPASLSTAPSEKGATWNVLDDQPRGFTLPSNARSSSALDSPAGPRRKECTVALAPNFTANNRSNKGAVGNCVTTMVHNRYTPSERAPPLKSSNQTAPSLNNIIKAATCEGSESSGFGKLPKNVSSATHSARNNTGGSTGLPRRKEVTEEEAERFIHQVNQATVTIQRWYRHQVQRRGAGAARLEHLLQAKREEQRQRSGEGTLLDLHQQKEAARRKAREEKARQARRAAIQELQQKRALRAQKASTAERGPPENPRETRVPGMRQPAQELSPTPGGTAHQALKANNTGGGLPAAGPGDRCLPTSDSSPEPQQPPEDRTQDVLAQDAAGDNLEMMAPSRGSAKSRGPLEELLHTLQLLEKEPDVLPRPRTHHRGRYAWASEEDDASSLTADNLEKFGKLSAFPEPPEDGTLLSEAKLQSIMSFLDEMEKSGQDQLDSQQEGWVPEAGPGPLELGSEVSTSVMRLKLEVEEKKQAMLLLQRALAQQRDLTARRVKETEKALSRQLQRQREHYEATIQRHLAFIDQLIEDKKVLSEKCEAVVAELKQEDQRCTERVAQAQAQHELEIKKLKELMSATEKARREKWISEKTKKIKEVTVRGLEPEIQKLIARHKQEVRRLKSLHEAELLQSDERASQRCLRQAEELREQLEREKEALGQQERERARQRFQQHLEQEQWALQQQRQRLYSEVAEERERLGQQAARQRAELEELRQQLEESSSALTRALRAEFEKGREEQERRHQMELNTLKQQLELERQAWEAGRTRKEEAWLLNREQELREEIRKGRDKEIELVIHRLEADMALAKEESEKAAESRIKRLRDKYEAELSELEQSERKLQERCSELKGQLGEAEGENLRLQGLVRQKERALEDAQAVNEQLSSERSNLAQVIRQEFEDRLAASEEETRQAKAELATLQARQQLELEEVHRRVKTALARKEEAVSSLRTQHEAAVKRADHLEELLEQHRRPTPSTK

SEQ ID NO: 1828 - DNA, 2249 bp, Homo sapiens
agaccgggaggggacctggatcatggctgccgcgccgccgctacgggaccgcctgagctttctacaccggctcccgattctcctgaaggggacgtccgatgatgatgtcccgtgtccgggctacctgtttgaagagattgctaaaatctcccacgagtctccgggcagcagccagtgcctgctggagtacctcctgagccgcctgcacagcagctccggccacgggaagctcaaggtgctgaagatcctgctctatctgtgcagccacggctcctccttcttcctgctcatcctcaaacgcaactctgccttcatccaggaagctgcagcttttgcagggcccccagatcctctgcacgggaacagcttgtaccagaaggttcgcgcggccgcgcaggacttggggagcaccctgttctcggacaccgtgttgccgctggctccctcccagcctctggggaccccgcctgccacaggcatgggctcccaggccaggccgcacagcaccctccagggtttcggctacagcaaggaacacggccgcacggctgtgaggcatcagcctgggcaggccggagggggctgggatgagctggacagcggccccagctctcagaattcctcccagaacagtgacctgagcagggtctcggactcgggcagtcattccggcagcgacagccattcaggggccagccgggagccgggtgacctggcagaaagggtcgaggtggtggccctgagtgactgtcagcaggagttgagcttggtgaggactgtgactcggggaccacgcgccttcctgagccgcgaggaggcacagcacttcatcaaagcgtgtggactgctcaactgtgaggccgtgctgcagctgctgacctgccacctgcgtgggaccagtgaatgcacgcagctgagggcgctgtgtgccatcgcctccctggggagcagcgacctcctcccccaggagcacatcctcctccgcacccggccgtggctgcaggagctcagcatgggcagcccgggacctgtgaccaacaaggccaccaagatcctgaggcactttgaggcctcctgtgggcagctgtcccctgcccggggcacctcagctgagcctggccccacagccgccctcccaggcccatctgacctgctgaccgacgctgtgcctctccctgggagccaggtcttcctgcagcctctgagttcaaccccggtctcgtcccggagccctgctccctcatctgggatgccgtccagccctgtgcccaccccacccccagatgcctcccccattccagcccccggagaccccagcgaggccgaggccagactggcagaaagcaggcggtggagacctgaacggatcccagggggcacggacagcccaaagagaggccccagcagctgtgcgtggagccgcgactccttgtttgctggcatggagctggtggcctgtccccgcctggtgggggctggggctgctgcgggagagtcctgtcctgatgctccccgcgccccccaaacatcgtcccagaggacagcagccaaagagcctcctggctcagagccgtcagctttcgcgttcctgaacgcctgacccgatggcctggccctggagtcttcagcttcagctgctgtctggggcggtctgtgcttcctgagcagcctcaaccgtagctgctacagtctccaggcagcttgacttgagaggacgaccctagggctacctcagtttcccccatctcctctgccagaggctctggctatttggacttgaatccctacgagggatggcaggtggcagggcttcagaaatgtcgatctcagggctctcagggggcagtccctgcctgtcttgccctcagacatgaggtttcttgtatgaatgcggaagcgactaccaggttccttatttcattttgatctcagctccctccttccccaggaggtcatgagcagcaacaagccactgctcccccgtcccatcggggtgggctaggtgctgaggctgggtttggtgcatgtgggttgagggtgtcttgtccgggctgccttgtgctgtctggcctgaggccatttcaagtctcagatccctacgtgatccttccctggctctcacctgctcctttaggctgtaattgcttcctacacacgaagcctctgattggagcctctggtccatctcagaaaaaccttccaagagcgctggggtttatgctttctgaataaacactactgtttacatg

SEQ ID NO: 1829 - protein, 525 aa, Homo sapiens
MAAAPPLRDRLSFLHRLPILLKGTSDDDVPCPGYLFEEIAKISHESPGSSQCLLEYLLSRLHSSSGHGKLKVLKILLYLCSHGSSFFLLILKRNSAFIQEAAAFAGPPDPLHGNSLYQKVRAAAQDLGSTLFSDTVLPLAPSQPLGTPPATGMGSQARPHSTLQGFGYSKEHGRTAVRHQPGQAGGGWDELDSGPSSQNSSQNSDLSRVSDSGSHSGSDSHSGASREPGDLAERVEVVALSDCQQELSLVRTVTRGPRAFLSREEAQHFIKACGLLNCEAVLQLLTCHLRGTSECTQLRALCAIASLGSSDLLPQEHILLRTRPWLQELSMGSPGPVTNKATKILRHFEASCGQLSPARGTSAEPGPTAALPGPSDLLTDAVPLPGSQVFLQPLSSTPVSSRSPAPSSGMPSSPVPTPPPDASPIPAPGDPSEAEARLAESRRWRPERIPGGTDSPKRGPSSCAWSRDSLFAGMELVACPRLVGAGAAAGESCPDAPRAPQTSSQRTAAKEPPGSEPSAFAFLNA

SEQ ID NO: 1830 - DNA, 766 bp, Homo sapiens
aaagcctggccaattaagaagttcaggaaaggttatgggcggaagcgccgacctatcaagctgtttgacaccggaagaggacggacctaagatggcggcctccagggggctgggaatagccgctcatgtcggctaacggagcggtgtggggccgcgtgcgaagccgcctccgcgccttccccgagcggctggccgcctgcggggccgaggccgcggcgtacggcaggtgcgtgcaggcctccacggccccgggcggccgcctgagtaaggacttctgcgcgcgggagttcgaggccctgcggagctgcttcgccgctgcggccaagaagacgctggagggaggctgttaggagggactctgagcttcacacctgtctgctgccatgggtgcagagccctagtcctgatggcccctggtggcacatatcgaatgcctagggcagaaaggaagtgggaatggcgaagatgtgacattcctcggtgttagatcctgttttttcttaacaagttgaggcgtgggtagagcaggaattggttttccagcattgtgtccgtaaacctgagttagaataagatgtaacggaagccacgataaagactcggtcaaatcctgcagcctggggcttactgtgtgcagactgcaacatgtgggtcttggcctctctgagatggaatggggcccagagcctttcccccaaagctggcagggctgggacttggggacaccctgcctcaaggtccccgttttaaaacactctcactaagg

SEQ ID NO: 1831 - protein, 74 aa, Homo sapiens
MSANGAVWGRVRSRLRAFPERLAACGAEAAAYGRCVQASTAPGGRLSKDFCAREFEALRSCFAAAAKKTLEGGC

SEQ ID NO: 1832 - DNA, 4303 bp, Homo sapiens
cgccgcggcggcagctgagttgggctgaggtgtccctagctggctctgcggctcttccgggtctgggctcggagattcacaggcggcccgcgaggccgagcgagggacgcatggccctgaggcggccgcagggcttggcggggtccggaggttgacctcgcccccgcagccggccttcgaggctgcctcctccaggcagcctctggggcccgcgcccgcgcctgctcaggctcccgtgttcaggctgcccatcccctccccaccggcgtcccggacgttgggacctgtgaccgtggcctcgggctgggcttccaaagccggccgcagcccggcgacccccgaggcctctcgccccgggcccctagacctctcactatgaccgcggccgccgcctccaactgggggctgatcacgaacatcgtgaacagcatcgtaggggtcagtgtcctcaccatgcccttctgcttcaaacagtgcggcatcgtcctgggggcgctgctcttggtcttctgctcatggatgacgcaccagtcgtgcatgttcttggtgaagtcggccagcctgagcaagcggaggacctacgccggcctggcattccacgcctacgggaaggcaggcaagatgctggtggagaccagcatgatcgggctgatgctgggcacctgcatcgccttctacgtcgtgatcggcgacttggggtccaacttctttgcccggctgttcgggtttcaggtgggcggcaccttccgcatgttcctgctgttcgccgtgtcgctgtgcatcgtgctcccgctcagcctgcagcggaacatgatggcctccatccagtccttcagcgccatggccctcctcttctacaccgtgttcatgttcgtgatcgtgctctcctctctcaagcacggcctcttcagtgggcagtggctgcggcgggtcagctacgtccgctgggagggcgtcttccgctgcatccccatcttcggcatgtccttcgcctgccagtcccaggtgctgcccacctacgacagcctggatgagccgtcagtgaaaaccatgagctccatatttgcttcctcccttaatgtggtcaccaccttctacgtcatggtggggtttttcggctacgtcagcttcaccgaggccacggccggcaacgtgctcatgcactttccctccaacctggtgacggagatgctccgtgtgggcttcatgatgtcagtggctgtgggcttccccatgatgatcctgccatgcaggcaggccctgagcacgctgctgtgtgagcagcagcaaaaagatggcacctttgcagcagggggctacatgccccctctccggtttaaagcacttaccctctctgtggtgtttggaaccatggttggtggcatccttatccccaacgtggagaccatcctgggcctcacaggagcgaccatgggaagcctcatctgcttcatctgcccggcgctgatctacaagaaaatccacaagaacgcactttcctcccaggtggtgctgtgggtcggcctgggcgtcctggtggtgagcactgtcaccacactgtctgtgagcgaggaggtccccgaggacttggcagaggaagcccctggcggccggcttggagaggccgagggtttgatgaaggtggaggcagcgcggctctcagcccaggatccggttgtggccgtggctgaggatggccgggagaagccgaagctgccgaaggagagagaggagctggagcaggcccagatcaaggggcccgtggatgtgcctggacgggaagatggcaaggaggcaccggaggaggcacagctcgatcgccctgggcaagggattgctgtgcctgtgggcgaggcccaccgccacgagcctcctgttcctcacgacaaggtggtggtagatgaaggccaagaccgagaggtgccagaagagaacaaacctccatccagacacgcgggcggaaaggctccaggggtccagggccagatggcgccgcctctgcccgactcagaaagagagaaacaagagccggagcagggagaggttgggaagaggcctggacaggcccaggccttggaggaggcgggtgatcttcctgaagatccccagaaagttccagaagcagatggtcagccagctgtccagcctgcaaaggaggacctggggccaggagacaggggcctgcatcctcggccccaggcagtgctgtctgagcagcagaacggcctggcggtgggtggaggggaaaaggccaaggggggaccgccgccaggcaacgccgccggggacacagggcagcccgcagaggacagcgaccacggtgggaagcctcccctcccagcggagaagccggctccagggcctgggctgccgcccgagcctcgcgagcagagggacgtggagcgagcgggtggaaaccaggcggccagccagctggaggaagctggcagggcggagatgctggaccacgccgtcctgcttcaggtgatcaaagaacagcaggtgcagcaaaagcgcttgctggaccagcaggagaagctgctggcggtgatcgaggagcagcacaaggagatccaccagcagaggcaggaggacgaggaggataaacccaggcaggtggaggtgcatcaagagcccggggcagcggtgcccagaggccaggaggcccctgaaggcaaggccagggagacggtggagaatctgcctcccctgcctttggaccctgtcctcagagctcctgggggccgccctgctccatcccaggaccttaaccagcgctccctggagcactctgaggggcctgtgggcagagaccctgctggccctcctgacggcggccctgacacagagcctcgggcagcccaggccaagctgagagatggccagaaggatgccgcccccagggcagctggcactgtgaaggagctccccaagggcccggagcaggtgcccgtgccagaccccgccagggaagccgggggcccagaggagcgcctcgcagaggaattccctgggcaaagtcaggacgttactggcggttcccaagacaggaaaaaacctgggaaggaggtggcagccactggcaccagcattctgaaggaagccaactggctcgtggcagggccaggagcagagacgggggaccctcgcatgaagcccaagcaagtgagccgagacctgggccttgcagcggacctgcccggtggggcggaaggagcagctgcacagccccaggctgtgttacgccagccggaactgcgggtcatctctgatggcgagcagggtggacagcagggccaccggctggaccatggcggtcacctggagatgagaaaggcccgcgggggggaccatgtgcctgtgtcccacgagcagccgagaggcggggaggacgctgctgtccaggagcccaggcagaggccagagccagagctggggctcaaacgagctgtcccggggggccagaggccggacaatgccaagcccaaccgggacctgaaactgcaggctggctccgacctccggaggcgacggcgggaccttggccctcatgcagagggtcagctggccccgagggatggggtcatcattggccttaaccccctgcctgatgtccaggtgaacgacctccgtggcgccctggatgcccagctccgccaggctgcggggggagctctgcaggtggtccacagccggcagcttagacaggcgcctgggcctccagaggagtcctagcacctgctggccatgagggccacgccagccactgccctcctcggccagcagcaggtctgtctcagccgcatcccagccaaactctggaggtcacactcgcctctccccagggtttcatgtctgaggccctcaccaagtgtgagtgacagtataaaagattcactgtggcatcgtttccagaatgttcttgctgtcgttctgttgcagctcttagtctgaggtcctctgacctctagactctgagctcactccagcctgtgaggagaaacggcctccgctgcgagctggctggtgcactcccaggctcaggctggggagctgctgcgtctgtggtcaggcctcctgctcctgccagggagcacgcgtggtcttcgggttgagctcggccgtgcgtggaggtgcgcatggctgctcatggtcccaacacaggctactgtgagagccagcatccaaccccacgcttgcagtgactcagaatgataattattatgactgtttatcgatgcttcccacagtgtggtagaaagtcttgaataaacacttttgccttcacccagaaaaaaaaaaa

SEQ ID NO: 1833 - protein, 1119 aa, Homo sapiens
MTAAAASNWGLITNIVNSIVGVSVLTMPFCFKQCGIVLGALLLVFCSWMTHQSCMFLVKSASLSKRRTYAGLAFHAYGKAGKMLVETSMIGLMLGTCIAFYVVIGDLGSNFFARLFGFQVGGTFRMFLLFAVSLCIVLPLSLQRNMMASIQSFSAMALLFYTVFMFVIVLSSLKHGLFSGQWLRRVSYVRWEGVFRCIPIFGMSFACQSQVLPTYDSLDEPSVKTMSSIFASSLNVVTTFYVMVGFFGYVSFTEATAGNVLMHFPSNLVTEMLRVGFMMSVAVGFPMMILPCRQALSTLLCEQQQKDGTFAAGGYMPPLRFKALTLSVVFGTMVGGILIPNVETILGLTGATMGSLICFICPALIYKKIHKNALSSQVVLWVGLGVLVVSTVTTLSVSEEVPEDLAEEAPGGRLGEAEGLMKVEAARLSAQDPVVAVAEDGREKPKLPKEREELEQAQIKGPVDVPGREDGKEAPEEAQLDRPGQGIAVPVGEAHRHEPPVPHDKVVVDEGQDREVPEENKPPSRHAGGKAPGVQGQMAPPLPDSEREKQEPEQGEVGKRPGQAQALEEAGDLPEDPQKVPEADGQPAVQPAKEDLGPGDRGLHPRPQAVLSEQQNGLAVGGGEKAKGGPPPGNAAGDTGQPAEDSDHGGKPPLPAEKPAPGPGLPPEPREQRDVERAGGNQAASQLEEAGRAEMLDHAVLLQVIKEQQVQQKRLLDQQEKLLAVIEEQHKEIHQQRQEDEEDKPRQVEVHQEPGAAVPRGQEAPEGKARETVENLPPLPLDPVLRAPGGRPAPSQDLNQRSLEHSEGPVGRDPAGPPDGGPDTEPRAAQAKLRDGQKDAAPRAAGTVKELPKGPEQVPVPDPAREAGGPEERLAEEFPGQSQDVTGGSQDRKKPGKEVAATGTSILKEANWLVAGPGAETGDPRMKPKQVSRDLGLAADLPGGAEGAAAQPQAVLRQPELRVISDGEQGGQQGHRLDHGGHLEMRKARGGDHVPVSHEQPRGGEDAAVQEPRQRPEPELGLKRAVPGGQRPDNAKPNRDLKLQAGSDLRRRRRDLGPHAEGQLAPRDGVIIGLNPLPDVQVNDLRGALDAQLRQAAGGALQVVHSRQLRQAPGPPEES

SEQ ID NO: 1834 - DNA, 3078 bp, Homo sapiens
cgccgcggcggcagctgagttgggctgaggtgtccctagctggctctgcggctcttccgggtctgggctcggagattcacaggcggcccgcgaggccgagcgagggacgcatggccctgaggcggccgcagggcttggcggggtccggaggttgacctcgcccccgcagccggccttcgaggctgcctcctccaggcagcctctggggcccgcgcccgcgcctgctcaggctcccgtgttcaggctgcccatcccctccccaccggcgtcccggacgttgggacctgtgaccgtggcctcgggctgggcttccaaagccggccgcagcccggcgacccccgaggcctctcgccccgggcccctagacctctcactatgaccgcggccgccgcctccaactgggggctgatcacgaacatcgtgaacagcatcgtaggggtcagtgtcctcaccatgcccttctgcttcaaacagtgcggcatcgtcctgggggcgctgctcttggtcttctgctcatggatgacgcaccagtcgtgcatgttcttggtgaagtcggccagcctgagcaagcggaggacctacgccggcctggcattccacgcctacgggaaggcaggcaagatgctggtggagaccagcatgatcgggctgatgctgggcacctgcatcgccttctacgtcgtgatcggcgacttggggtccaacttctttgcccggctgttcgggtttcaggtgggcggcaccttccgcatgttcctgctgttcgccgtgtcgctgtgcatcgtgctcccgctcagcctgcagcggaacatgatggcctccatccagtccttcagcgccatggccctcctcttctacaccgtgttcatgttcgtgatcgtgctctcctctctcaagcacggcctcttcagtgggcagtggctgcggcgggtcagctacgtccgctgggagggcgtcttccgctgcatccccatcttcggcatgtccttcgcctgccagtcccaggtgctgcccacctacgacagcctggatgagccgtcagtgaaaaccatgagctccatatttgcttcctcccttaatgtggtcaccaccttctacgtcatggtggggtttttcggctacgtcagcttcaccgaggccacggccggcaacgtgctcatgcactttccctccaacctggtgacggagatgctccgtgtgggcttcatgatgtcagtggctgtgggcttccccatgatgatcctgccatgcaggcaggccctgagcacgctgctgtgtgagcagcagcaaaaagatggcacctttgcagcagggggctacatgccccctctccggtttaaagcacttaccctctctgtggtgtttggaaccatggttggtggcatccttatccccaacgtggagaccatcctgggcctcacaggagcgaccatgggaagcctcatctgcttcatctgcccggcgctgatctacaagaaaatccacaagaacgcactttcctcccaggtggtgctgtgggtcggcctgggcgtcctggtggtgagcactgtcaccacactgtctgtgagcgaggaggtccccgaggacttggcagaggaagcccctggcggccggcttggagaggccgagggtttgatgaaggtggaggcagcgcggctctcagcccaggatccggttgtggccgtggctgaggatggccgggagaagccgaagctgccgaaggagagagaggagctggagcaggcccagatcaaggggcccgtggatgtgcctggacgggaagatggcaaggaggcaccggaggaggcacagctcgatcgccctgggcaagggattgctgtgcctgtgggcgaggcccaccgccacgagcctcctgttcctcacgacaaggtggtggtagatgaaggccaagaccgagaggtgccagaagagaacaaacctccatccagacacgcgggcggaaaggctccaggggtccagggccagatggcgccgcctctgcccgactcagaaagagagaaacaagagccggagcagggagaggttgggaagaggcctggacaggcccaggccttggaggaggcgggtgatcttcctgaagatccccagaaagttccagaagcagatggtcagccagctgtccagcctgcaaaggaggacctggggccaggagacaggggcctgcatcctcggccccaggcagtgctgtctgagcagcagaacggcctggcggtgggtggaggggaaaaggccaaggggggaccgccgccaggcaacgccgccggggacacagggcagcccgcagaggacagcgaccacggtgggaagcctcccctcccagcggagaagccggctccagggcctgggctgccgcccgagcctcgcgagcagagggacgtggagcgagcgggtggaaaccaggcggccagccagctggagggtaaggcctccgccctacagccgcctgcctcaggcccagggagcggcagccccctcccccagccctggggtgatgcccaggtcatcctcgggagccctgccaggccccccttctctttccagccgcctgctgagcagacccctcggagagctttctgctcccttcccatcagcagcttgctttctgggaaccttttatctgccttactcccctttaaacacctgcggcatcgtcacatggcttgtgattaccgttttatctcccttgctcccctttaaaacacctgcggcattgtcacttggcttgtgattaccatttcgtctttaaagcaggtttgttaacagttttaacactcggagtatttaaagccagccaggtgtgggcgtgcctgcacccagatgtggaggtttattttaaggctgtgccccaaggggacccagtttgggggtggctgtgcccgccctggtcctagcatagccctggcccagagcactgctcccacaccctcgggcctcggagctcggctgtgttcatctacagggatctgtcacctgtccctccaggaaagctccttacgcctttgctctcctgagaataaaacttgctctgaatcctcctccaaaaaaaaaaaaaaaaaa

SEQ ID NO: 1835 - protein, 780 aa, Homo sapiens
MTAAAASNWGLITNIVNSIVGVSVLTMPFCFKQCGIVLGALLLVFCSWMTHQSCMFLVKSASLSKRRTYAGLAFHAYGKAGKMLVETSMIGLMLGTCIAFYVVIGDLGSNFFARLFGFQVGGTFRMFLLFAVSLCIVLPLSLQRNMMASIQSFSAMALLFYTVFMFVIVLSSLKHGLFSGQWLRRVSYVRWEGVFRCIPIFGMSFACQSQVLPTYDSLDEPSVKTMSSIFASSLNVVTTFYVMVGFFGYVSFTEATAGNVLMHFPSNLVTEMLRVGFMMSVAVGFPMMILPCRQALSTLLCEQQQKDGTFAAGGYMPPLRFKALTLSVVFGTMVGGILIPNVETILGLTGATMGSLICFICPALIYKKIHKNALSSQVVLWVGLGVLVVSTVTTLSVSEEVPEDLAEEAPGGRLGEAEGLMKVEAARLSAQDPVVAVAEDGREKPKLPKEREELEQAQIKGPVDVPGREDGKEAPEEAQLDRPGQGIAVPVGEAHRHEPPVPHDKVVVDEGQDREVPEENKPPSRHAGGKAPGVQGQMAPPLPDSEREKQEPEQGEVGKRPGQAQALEEAGDLPEDPQKVPEADGQPAVQPAKEDLGPGDRGLHPRPQAVLSEQQNGLAVGGGEKAKGGPPPGNAAGDTGQPAEDSDHGGKPPLPAEKPAPGPGLPPEPREQRDVERAGGNQAASQLEGKASALQPPASGPGSGSPLPQPWGDAQVILGSPARPPFSFQPPAEQTPRRAFCSLPISSLLSGNLLSALLPFKHLRHRHMACDYRFISLAPL

SEQ ID NO: 1836 - DNA, 2970 bp, Homo sapiens
acgtctgcggtgttacccacgactgcctgggacctggccaagggctccacacaccaagaccaaggcagcaggaaggagaaaggagggaaggtaaaagactactgaaaagctttcagctggggctgggcatggaggctcacacctgtaatcccaacactttgggaagccgaggctggtggatcacttgagcccaggagtctgagaccagcctggccaacatggcaaaaccctgtcgctacaaaaaatacaagaattagccatgtgcacctgtggtcccagctcccagggccgggagcctgaaaccaaggtgtccacagggccctgctgcccccagaggctctgggcagagcccttccgcctttccagctccccctggttcccgtgctcctcggcctgtggccccatcactctggcctctgccttcatctcatgccgagatccctgaagcgggcccagctccgttcactgctcccccggcctcctgctgtttcccacacgcagccatggtacagggcagctcatcccaccacctccccaaccgcagcctccagggatgtacaccctgcctcaggggctgtgcctgggccctggctggtggagggcacagccgtcagggaaggccctcagctgcaggatgccgtgcctcagagaccaaccaggccctcgaaggcactgtggccggcccagatgtcagcagctccagcaattaggctgggacagatggtgcctggtgacacaaggggactgtgggggccacaggggaccctgctcacctggacctaccgtggaggccagggagggagatggactcgaagggcggaagggcccagagaaggcacatttgcagagcagcggccgcatttccagagctcgggagcccaacaggaatcccgtctggccatgggaccaccgcccttggggctgggggatgccgcaggggacggcagagggcagacaggccaggaaaaggggagggcagagggcagacaggccaggaagagcgcctgcaagtgcccaaggaagggaccaaacccaggcccctggaccagagcggccgcctggtggggcaggctggaaggggccaaggccagcgccaagggggagcaggtgagggaccctggtgggcatctgtgggaacaaggccacgtttctccctgcgcacgctttaatcaaggacattcctgtggttctccaaaagtgtcgcacactacatgggtgtcgtgagctgggctccgtgagagtgtgcgggtggctgggggcagcaagggagcagcaaggcctcaaacccgggcggcggcctggcctgcgcgccaggatgtgcggtgtgagtttcccgagctgcaggaacaaggcccacagactggggagcttcacacaacagaaactgcctcgcagttcccgaggccagagcccatcggggtggctccctgaggccgtgagcccggactgtcctgggccgccccctcttccacaggctgagatcatccttggcgtctgttggcctgcggccgcctcgcccaacctctgccctcatgtccacacgggtcctccctgtgtgcatgttggtgtctggatctgccctttctactgtggggcaactgtcgtcgaggatagggcccaccacacaacacggcctcatcgtaactaagtatagtcagcagtgatcctatttcccaataaggtcccattctgaggtcctggacttcaacatgtgaattttgggggccacaactctaccctggcatgcagagagagaaggggggcgtggagtccccctggggggaagtcccttgggaagtcacaggcccccttggtggggcaattgggacgtgggtgtgagggtcctgggtacagggagcctgcctaccaaggctctgccgacagctatttctaaattcctcgtggaaaataccctgtggccctcctcatctggagcgagcgacgggctggagggtgtctgagccaggctggtgccggggagcagatgtgggtggcccaacccagccccttgttcttgttccccacctcccaggaaagggggagggtgggcggagccggccctcctgggctctctccttgggtcccggagccacctggggaggggaggctcaaccccctaccttggccagctggctgcaggtctctcagggctggcacagaacagctgggctttgccaggtgtcccccatcctgatgcacggcccggtggtgcggtctccaggcctcccaggattctcagctgcgccgtctccccagtccccaaaccccagtggtggccgccaggggactggaccgtcagtctgtggagctggggctgcagctggtggtgtttccaacaagggtcttttggctgcctggccccagggagaggcctctggaggcaaggggtaacctaccgggaaagcctcaaaggcacccccatccccgccccgcacagactccaccggccccccatggttcctccaggccctcttcagtcatgacaggcagtgcctgggtgcccggcctgctcagtacaccctgggcctcagccccacccaagccttggcctagcatgggagccaccacgggaacacacacacgggctggagggtgtctgagccaggctggtgccggggagcagatgcgtcagatggaggagaaaagccctggggcagcggcttctggagctctggccaaggatgggctctgagcacacccctgcccggcccagagcaccaggccggggcagggtcaggaacagcttgaagccccctgcaaagtctgtccctcctcctggagcctcagctgcccctccaacacagccctctgtgggagcctagatggcccccgtgtggccatgagacatgggcgggcgctggtggattcctctgtgtcaggtgacatggtggcaccccggccgcaggctgtgccccggctgtggcgttaagaagggctatggatctaaataaaatccagtctctttgctgg

SEQ ID NO: 1837 - protein, 264 aa, Homo sapiens
MPRSLKRAQLRSLLPRPPAVSHTQPWYRAAHPTTSPTAASRDVHPASGAVPGPWLVEGTAVREGPQLQDAVPQRPTRPSKALWPAQMSAAPAIRLGQMVPGDTRGLWGPQGTLLTWTYRGGQGGRWTRRAEGPREGTFAEQRPHFQSSGAQQESRLAMGPPPLGLGDAAGDGRGQTGQEKGRAEGRQARKSACKCPRKGPNPGPWTRAAAWWGRLEGAKASAKGEQVRDPGGHLWEQGHVSPCARFNQGHSCGSPKVSHTTWVS

SEQ ID NO: 1838 - DNA, 3317 bp, Homo sapiens
acactgcgtccccatcagctcaaagaatacgcatggggacaagcctggggggccgtctgagagtcccccaaccctggatccccacggcagcccccactgttgggtttttcagtggctggtgtgccctgggctggtcacctctgcattttgctctgctgggagtttgctcctggccctccaacagcgcctcctctgtgaggaggaactcctgttcccgtggctccgctggctctggaggctggagttcccgtgctgggccctcctgggcgggttctctcttgctgccgccagtaccctgcccctctcgtcctcctgggtagcctgggaggaatggcagaagaaagcagtgaagccaggtagcagtagcccggccaccccaccaggctctgctgtaggctgggctctcaaggcagctgctccaggaggggccccctaggaagggactgccacactcctgggagcgttcctggccccctccagtgcaaatgaccctgggccccaaggctccgaacacccgcccctctgctccaggctagcttggctgagcccgatgcttctcaaggtgaggagggcgtccttgaagcctccggccaccccacaccaaggagctttcagggcaggaaatgtgatcgggcagctgatttatctccttacctggtctttgttcacagcctggctccggccccccaccctgctgcagggcccgaggacgtctccccaggggtccccacctcggtctccttggggggactgtgctgagcccagctgcctctgtgagatgaagataagaaggcgaagacatgaagggcctgcctgggggcagtctggctttcttgcaggggggctgcacctggttccctcctccctctcgctggcagcctgcggggtggtgaggatgaaggggctgtggggccggggtgcagggattagagggaggtgactgccatctcttcctcctcatcgtgtttttcacctcttaagtcaactttagattctcggactcagagttctctcctgacggtggcagggtcctcagatcaccggtgcagacagggccagacagggccaatgtggggacccactcagcctgtggcctctgcaggagggaggtcggaggcctcagcagccacccccgccacctcctgaaacagtgaatgtccttcattttcagctggcaagctctgatcttacaacgaggtatggaactgttcagaaaactttcagcagacgttcgagggaaaacagctcagcttcccatgccccccacctctgccaggagcgaccccatatcccccaaacagaattctggtaacccgggaccacagggccttcctatgcctcccctgccagctctgcatgactttgtcacgtacttgcgtgctggctgagatgatgctaccgctaccaaacaggtgggaggccagccccagccccagccccagccccaccggggccggagctcccggtgaagaagcgtctgcctggttcgcaggtgtccaggacacaccagtcgcctgactcccggtcaggcaaacgcacacatcaagttcttgcaagccagggctctgctggcatcttcaagaggagggagggtcctggccctgaccacagggctcccttaacaggaggagttacaaactcggcttcctggggggcatcgtggggtgtgctgcctgccaggagaccccactcctggtcacggggttccgtcccacacagtggcaggagccatgcatgattcttggctgaagaagaacccgcacagctatgtggtctgccgcccagcagggaagcccccacatcagccctaagggaacttcccaaagctcagcaggtgcctcttcctgccatccgctaggtcttctcttggcccctctcccaagccttgacccatagctgacacttctagaaaagtctttaccgagaaacggaccggctgcatgggtggtgaggagggcagttgcccagggcctggcatcagaggggcctgtggctaaggctgtcctgaaattcttaatcattttacctctgaacttgcgggtttttgttgttgttttttgaggcagagtcttgctctgtcacccaggctggagtgcagtggtgcgatcttggcttactgcaacttccgactcccaggttcaagcgattctcctgcctcagcctcccgagtagctgggactacagaagtgcaccaccacacccggttaatttttgtatttttagtagagacggggtttcaccatgttggccaggctgatctcaaactcctgatacacccgcctcggcctctcaaagcactgggattacaggtgtgagccaccgcgccgggcccttttcctgcctcctaaacaagtggccaggaattctcctcctgcaccgggtccccagattgtgtggcaagccctgcagatggcacaggggactggttcttcctcgtggaaagccaggcccggacacctctcgggcatcgcctgttggggtgaccctcccacacccagcctggaaccctagccagctcagcctccgtccgctgagaaatcaaggtgaccttgtggctcagccctcagggggcactcaccacacaagagttccctttcaagaccccctgttcggggctggggcccccaggaacggttggggcaccttcctggggccctgtttttccccaggagcggggcctgggagctgagggcgtctcatctccccacaggcatctgctgctgctcctggctgccactcacccctgtgagatgctgagggcaggatacctgtctgtgcggggcgtgggaaaaagggagaaagcctggcagagggttgggggctaagaagcaaagggcgtggaagggccaccgtgcacttttgaagtctctacttgccagtggccaccccacctctccctgccctcatccaaggacggacaggcctggcaggtggaccggagccgtggggcagaagcatcccaggcctggcctcagaggagggaggccatggtgaaagtggaggctgtctgcatccacctccccagcctttgtcaccgggacctcagcctgaccccaggcccaccccaggctgctcaccgaggtgggtaccctgcccaccgccagctcagatgcggtgtgtggactcccttctctctgggggtgagcgggagttccctcccctccacatcaggagctgggggagagctggagggccctgggatccccttgaccctggtcatcagccccagccctgacaggccctgcgtgtgccatgtgtggcctgggtttggagctcagcaccctgcgggaattctattaaatctccgattttatctg

SEQ ID NO: 1839 - protein, 129 aa, Homo sapiens
MLLKVRRASLKPPATPHQGAFRAGNVIGQLIYLLTWSLFTAWLRPPTLLQGPRTSPQGSPPRSPWGDCAEPSCLCEMKIRRRRHEGPAWGQSGFLAGGLHLVPSSLSLAACGVVRMKGLWGRGAGIRGR

SEQ ID NO: 1840 - DNA, 825 bp, Homo sapiens
atgggaactcggttccttaggagagtaggaaatgcgccgtctgcgaggggcgccctgcgtggacccggggcctcggggcgcgtccacttacccgagccaggagagactgggccccacggtgttagccccgcgctcgggctcgcgcgccgcttccagctcgcgcctcctccatccccggagggctccgcgggtccccggcgacgggtccctgcccagggtccgggaaccttcccctcccctcctttctcaagcgccatttctccggagccgggccggccgtcctcggtgtacgcgggaagcgggcagcctccgcctgcacccgcggggccgggacccggaggcacccgcttccccgacacactcgctggggccgctgctcgctgctccagcctcccgaggccacggcaagagcccgggggtcggcgccacacacccccagccggcgaccgcgcccagggacctaattcaatcgcccccagcctaatgaatagccgcgcgctaatcggatctccgcgcgcttcggggatttacgcttcccggctctccccctcgtgccccgcggcccgccagacgtcgcttccgaaggcgccggcctggggcctggccaggggctcggccgcggggggtcccggccgccggagccgggagacgccggagacgggagccgggcccgcgcgaccgccactcccgagccagccggggtgggccccgcgccttgtcctgcgtccccggcccggcccgcggagcgccggtgcttacctgcgagccccgggctctccggagctcccctccgggccgagccgcccgaagcgggcgccggcgtag

SEQ ID NO: 1841 - protein, 274 aa, Homo sapiens [sequence omitted]

SEQ ID NO: 1842 - DNA, 10708 bp, Homo sapiens
atggcttcgcagatttgggtttttatcacccagcagagccagcagcctcttcgccgcggcgccctagctgcagggacccgcggggacgagaacgggaggcggcgagcagtgcggctgggttcccccggctgccccgggccaagcgtggccgggacggtgcaccatggacccgcacagcggccgctggctcggtgcgcggccgcccgccgagaagcccagtcctcccgcgtgctgaccggccccgccgccaccaccgcctgtgaccccggacgccgccgcctctgcgccgcccgcgcgccgagccgcccccgggccccggccgcgctgctccgaggaagcggcggcggaccggggccggggcccggcatggatggccgcgactttgcgccgccgccgcatctgctgtcggagcgcgggagcctgggccaccgcagcgccgctgccgccgcgcgtctcgccccggctgggcccgccgcgcagccccccgcacacttccagccgggaaagtacttcccgtcgccgttgcccatggcttcgcacacagcctgctggcgtcttcaagggaatcccgcagccgtcctctgcgtgagtccattcatcaccagttggctgggaaataacagaaaatggcactttagtgggggccggtccctgccctttcagcctgcagtgacctgtgctggccccagccccttcctgggatactacagcctgagccaacctcctccggggtaccccagattttcggggagtctggcatccaccttcctacccgtgagccacttggatcaccatggaaacagcaacgttctctatgggcagcaccgtttctatggaacccaaaaagataacttctacctgcgcaacctgccgccccagcccacgctgctgccggccaaccacaacttccccagcgtggcccgggccgcccctgcccaccccatgggctcctgcagccgggatcgagaccggggtgaggcaggctccctgcagaagggccccaaggacttcgaccgcttcctcgtgggcaaagagctgggcagagagaaggcgggcaaggccgctgagggcaaggagcggccagcggcagaggaggacggtggcaaggagcggcacaagctggtgctgcccgtgccagccgacgggcactgcagggagggcggccccgcaccccgaggggcctgcgagggccgccccaagcacctcacctcctgcctcctcaacaccaaggtgctcaacggcgagatgggcagggctgcgctagccagctgtgcagggggcatgctggggcggcctggcacgggggtggtgacctccgggcgctgtgcaaaggaggcagcaggccccccggagcccgggccggccttcagcgagtgcctggagcggcggcagatgctacaccacaccgcatcctacgccgggccacccccgcccctcagcacagccgccggctccttcccctgcctgcagctgcacgggggccctgacgggctctgcccgctgcaggacaaagccccccgggacctaaaggccagcgggcccaccttcgtgccttctgtgggacacctggccgacaagggccgccccttccaggccgccgaggcctgtgccgtggcaggggagggcaaggaccggcacctggagggaaccatggcccccgaccacgctgcaccctatggagtctcctatgcccacctgaaggccgagggcaagggcgagcggcggcctgggggctttgaggcggccctcaacccccggctaaagggcctcgactatctcagcagcgcaggccccgaggcctccttccccggactccctaaaagcggtctggacaaaagcggctacttcgagttgcccacctcttcacaggactgtgcccggcctggtcaccaggacccgctgggcgggaaggccccccaggcctgctgcactttagataagactgttggcaaggaagccccggccggccccccaggggcacagaaggtggcccgcatcaggcaccagcagcacttgatggccgccgaggtggagcaggggggcattggggctgaggccaagcgcaagtccctggagctggcatccctgggctacagtgggccccacctgcccccatggggtgtccaggcaggccagggcaccgccatggccatcagcgaggagcgcaaggctggcgcctacctggacccctttggcagtggcctgcagcaggcggctcttctgccccaggaactgcctgcgccgccggacgaggtctcagccatgaagaacctgctcaaatacagcagccaggccctggtggtgggccagaaagcacccttggtgggcctgggtggcctcaaggccagctgcatccagcaggaagcaaagttcctgtcctctaagggcccaggccagtcggagaggccggactgtgcccgcagcagggagcacgacaccacgcacggcgacggggaggtgcggcagccccctgtgggcattgcagtggccttggcccggcagaaggacacagtgagccggtctgaggcagcctacggcaccaacactgcgcggcagggccgggccgcccccgccttcaaaggtggcggtgggccccgttccacacacgcgctggacctggaggctgaggaggagaggacgaggctatgtgatgaccgcctggggcttgccagccgcgagctgctgctgcaggacagcaaagaccgcgtagagttcgcccggatccacccaccgagcagctgccctggggacctggccccccacctcatgatgcagagcggccagctgggcggggacccagccccccacacccacccccatcccccctggctgccccgcacccgcagcccctccctgtggatgggggggcactcctacggcctggggcaccctgccctgcaccagaacctgccccccggcttccccgcctccgtggctggccctgtgccctctgtcttccccctcccacaggacgcccccacacagctggtcatcctgccctcagagcccacaccccacagcgccccccacgcacttgcggatgtcatggaccaggcgtcactgtggccccccatgtacgggggccggggccccgcctctcacatgcagcacccgggccagctccctgtgtactcgaggccgcagctcctccggcagcaggagctctatgctttgcagcagcagagggccgcccagttccagcggaagcccgaagaccagcacctggatctggaggagcccgcccaggagaaggccccaaagtccacccacaagccagttgccttaacccccacggccccgggcgccccctcacccgctgcaggccccaccaagctgccaccttgctgccatccgcccgacccaaagccccccgccagctcccccaccccaccacctcggcccagcgccccgtgcactttaaatgtctgccctgccagcagccccgggcctggctcccgggtgcgcagcgccgaggaaaagaatggggagggtcagcagtccacggccgacatcatcacatccgaaccagacctgcctcccggatacctgcgccccatggctggcctgggcttctccctaccctcagacgtgcactcttctaacctcgaggaccctgaaactatgcaaaccaccgccccgggggcccagcctgagcccacaaggacattcctgcctggggagccgcctccctgcagccccaggagcctggaggagcccgggctgctctcaggggccagggaggccacccaggaccttgccgccaccccctaccctaccgagcggggaccccaggggaaggcagcggaccccagcccactagaggggctacaagaactgcaatgtgcggccctcctggaggcagggggccccgaggccaccggccaggctcattctactcagggaggggcacgagaagagaggagcagggaggagggggagcaggggccctcgtcaggggcctcctcccaagtcctggagcagcgagcagggagtccgggtgcccttgaggacgagggggagcagccggcccctgaggaggacgagctggaggaagacgagctggggcagcagagcatggaggactcagaggaggactgtggcggagctcccgacaacagccacccacccagggcgctaccaggcctggatgccttggtggccgccaccatcaacctgggggacctgcccagcgacagcccaccggaccctcagcccccagcggcctctgggccccccagcacagtccccctgcctcatagctcagggattcatgggatcgctctgctcagcgagctggctgacctggcaatccagcggcagaggagtgagaggactgtgccagaggaggaagaggacgtgctagccttcaacctgcagcacctggccacgctggccacagcctggtccctggtggaggccgctggcctggacagctccactgccccagcgcagccgcccacagccaacccctgcagcggccccaggctcaccccccgcatgcagatcctgcagcgcaaggacacctggacccccaagaccaagcctgtgtgccccctgaaggccgccatcgaccggctggacacgcaggaggtggggatgcgcgtgcggctggcggagctgcagcggcgctacaaggagaagcagcgggagctggcccgcctgcagcgcaagcacgaccatgagagagacgagagttcacggagccctgcacggcgggggcctggccggccgaggaagcgcaaacactcaagctcgctgcctgccccacgtcccacggggccgctccccaggagcgatggcaagaaagtcaaggcggtgcggacaagcctgggtctgctgtgtgcggagctgcgaggaggcagtgggggcgagcctgcgaagaagcgaagcaagctggagaggagcgtctatgcgggcctgcagactgcctccgtggagaaggcgcagtgtaagaagagcagctgtcagggcgggctggcgccctccgtggcccacagggtggcccagctgaaacccaaggtcaagagcaaagggctgcccacaggcctcagctctttccagcagaaggaggctacccccggggggcgcatccgggagaagctgtcccgagccaagagtgccaaggtgtctggggccacacggcacccacagcccaagggccacggcagccgggagacacccaggtgcccagcccagccctccgtggctgcgtcccaggaggcaggcaatggctatgacagtgaggactgcgagggtctcctggggacagaggcaccacccagggaagcagggctgctgctgcacaccggggccagtgtggccgtgctggggccctcaccctcctctgtggtcaagatggaggccaaccagaaggccaagaagaagaaggagaggcaggggttgctaggggcctgccgcctgtccagccctgagagtgaggtcaagatcaagaggcggtcggtgaaggccaaggtgggcaccaccctggagcgggccccagggcagaggcccccaggtgcgctgggcaagaagaaagccaagggcaaggccaagggcagcctgcgggcagagccgggggccacccccagcagggacgccctcttcaacccctctcgggccttcgcctgccgtgaggagggcagccagctggccagtgagcgcctcaagagggccacgcgcaagggcacagtgctgcagccagtgctgcggcggaagaacggggccctgtccatcacgctggccacacgcaacgccaaggccatcctggggaagggccggaagctgagcaaggtgaagcacaaggccggcaagcagggcaagggccgggccgtgagccgcctgctggaaagcttcgccgtggaggaagactttgagttcgacgacaacagcagcttctcggaagaggaggaggacgaggaggaagaggaggaggacagcggccctctgagcgcagagcagagcgccgccctagcgcgctcgtgtgccatccacaaggaggacctgcgggacgggctgcccgtgctcatccccaaggaggatagcctgctgtacgcgggcagcgtcaggaccctgcagccacccgacatctatagcatcgtcatcgagggcgagaggggcaaccggcagaggatctactcactggagcagctgctgcaggaagcggttctcgatgtgcggccacagtccagccggtacctcccgcccggcacgcgggtctgcgcctactggagtcagaagtctcgatgtctgtacccgggcaacgtggtccggggggcctccggtgacgaagatgaggacctggactcagtagtggtggaatttgacgatggggatacaggccacatcgccgtctccaacgtcaggctgctgccccctgacttcaagatccagtgcacagagccctctccagccctgctagtgtctagcagctgccggaggaccaagaaggtatccagtgaggcacccccgcctagtgaagccgccacccccagcctgtcccccaaagcacaggacggccccgaagctttgaagacacctgggaaaaaatccattagcaaagacaaagctggtaaagccgaactcctaacctcaggtgccaaatcccccacgggggcctccgaccacttcctgggccgccgtggcagccccttgctgagctggtccgcggtggcgcagaccaagcggaaggcggtggcagcggccagcaaggggccgggggtgctgcagaacctcttccagctcaacggcagcagcaagaagctgcgggcccgcgaggccctgttccccgtgcacagcgtggccacacccatatttggcaacggcttccgcgccgactccttcagcagcctggccagctcctacgcgcccttcgtcggggggaccgggccgggcctccccaggggagcccacaagctgctgcgggctaagaaggccgagagggtggaggccgagaagggtgggcggcggcgggcgggcggtgagttcctggtcaagctggaccacgagggtgtgacctcccccaagaacaagacctgcaaggcgttgctcatgggggacaaggacttcagccccaagctcgggcggcccctgcccagccccagctatgtgcacccggcccttgtgggcaaggacaagaaggggcgggcacccatccccccgctgcccatggggctggcgctgcgcaagtacgcgggccaggcagagttcccgctgccctacgacagcgactgccacagctccttctcggacgaggacgaggacgggccggggctggcggccggcgtgccctcccgcttcctcgcccgcctgtccgtgtcctcttcctcctctggctcgtccacctcctcctcctcaggctccgtgtccacctccagcctctgctcctccgacaacgaggactcgtcctacagctcagacgacgaggacccggctctgctgctgcagacctgcctcacccaccccgtgcccaccctcctggcccagcccgaggccctgcgctccaagggcagcggccctcacgcgcatgcccagcgctgcttcctgtccagggccacggtggctggcaccggtgcgggctcaggccccagcagcagcagcaaatccaagctcaagcgcaaagaggccctgagcttctccaaagccaaagagctctcccggaggcagcggccgccctccgtggaaaaccggccaaagatctcagccttcctgcccgcccggcagctctggaagtggtcggggaatcccacacagcggcgtggcatgaaggggaaggcccggaagctgttctacaaggccatcgtgcggggcgaggagaccctgcgtgtcggggactgtgccgtcttcctgtcagctgggcggcccaacctcccctacatcggccgcatcgagagcatgtgggagtcgtggggcagcaacatggtggtcaaggtcaagtggttctaccaccctgaggagaccaagctgggcaagaggcagtgcgacggcaagaatgcgctgtaccagtcctgccacgaggatgagaacgacgtgcagaccatctcccacaagtgccaggtcgtggcgcgcgagcagtatgagcagatggcccggagccgcaagtgccaggaccggcaggacctctactacctggcgggcacctacgaccccaccaccgggcgcctggtgacggctgatggcgtgcccatcctatgctgagccgcccaccgcagatgcctcccacgtgcgccagggaccctgtgtgcggagcctggcgtcggccaagccaccgggcaggaggcagccccggcctcccaagggcgcatctgagcaaatatgcaaaagcccacagggcaagacccaggctttcttacggttttccctggaaagagcgctccaggtgtcggaatccagtcccgtcccatcctctgcggagggtcgggctgtggccctcatgggtccccggcccgccccacccacagcgccctccgtttcccgcaccggcagttcacgggagatttgaatccaagccatattccctagtacctccgactgtctcccaccagggaaagcagaaatcaggtgtgttgtctatttatttctctatgtaaatattgtatttctgcggggaaattttatggtaaaaagtggaaaagggtttttccccatccgcgtgacaaggtgtgtgtgagcgtgtatgtgtgtgcgcgtgtgtggcgatttttgtcctggggtttcctttggaaatgcactgttctcagcccagctgggttccaacgggggcacctgggacgacagaggcatctcggggcagggggcagaggccacgggagggtcaggtgggacccttgacggcaccctctgatctcttggggggacgaccgtgtaagatgaaagtcggtcaagtttatttgctttcagtgcatctcctagaaaagaagtgttggagcagggggtggtgatgaggggcccgtggggaaaggattcaagaggcaaagcccagaccagggagtgtgacaacagccgtgagcatctcacctgtgttcaaaacaagacaaagacgaacaaatattttaaagtattgataagaaaaagcaatgtttggattgtatctgctgaatcatattccaacctatatctgatttctgtttccggggccagttggtctgaggccaaggagtctggcctccacccagagcagggaggggctggcccctcgcccccctcaccctcgccgccctggcacactcgggaagcagggcccagctctgagcccctcctcacccctggggtcctaactttcctgaaagtagtaggtgccgtgagaaggggcagtttggccaggttcctgaactgggcagggctcggggcctatgagggcaggttcacagtcccaccagattctctcctcacccccaagcagaatgcatgcaaaagacaccccttttcccacccaccttattggtgcccccaaacccctggcctgctgcgtagatggtggtgaggccaggccagcagtgctgtggccaggggagaagaaaataaaacgcaggccctgcccttggggaaggcccctttctgggcccccttttccaccagccaaatctgcctggccctcggacccctctgcctgccccaacccctttggaggtttctcggccttttctgtgccacttggtggggcagatggcctgatgggctagtgcttggggcatagaatgagggtccccctgaccacctgagcccaaatcctggccccaggtgcaagcagcacccctcgagggctctgccccagtatccccagggaattcacacccctccccttctcccacagccaaggacagacaggctgcctggacctgagcccaacagccttcagcctcagaaacgcatggggggccacacactccttatatcctcccacactaaggttcccctggccccacgggagcttcaggaaagccccccaagttagccactgctctaggacgagctctgtgtcccccacaccacaggcctcgaagcagggtgctggtgggtgccctgtaccccaatcccaggtccccttggccccctatttttctcgggcccattggggcctgtttctcacctgctggctggaccccctgaagggccgttcccagaggctccccaggaggctcaaggctgggggcttatgttgtggtcgggggtccccgcctccagccccccgctcccacccccgagcctaccctttgtctcgcatgagtgcaatatttcattcccggtggttgtctggggaggtggttggacgaggtcctgcttgaggctcggggatcagaacgatgtcaagtgaagaaaaatgcacgggggcatgctgagccactggagttccagagagggccgaggagggtgcagccacggaggttggatcctctgctccgccgcctcgtcctcgtcccgcttctgctgggttccgctttgtccctggttttttcctttctttttctgtgtgcgtgcgaatggtgcggcccctcccctctcaccgtggttaacgtgacgaaggcacgattcctgtaaatgtgtaaactaaggggatggttggattttttttcaatgtaaacactaaaaacaaaatggacaaaaaaacacacaaaggttttatgaacagcagactctatgtaaaggcattttagtatcaaattttttattgataacttgcttaagaataaatatatggactattgtacaggtt

SEQ ID NO: 1843 - protein, 2730 aa, Homo sapiens
MASQIWVFITQQSQQPLRRGALAAGTRGDENGRRRAVRLGSPGCPGPSVAGTVHHGPAQRPLARCAAARREAQSSRVLTGPAATTACDPGRRRLCAARAPSRPRAPAALLRGSGGGPGPGPGMDGRDFAPPPHLLSERGSLGHRSAAAAARLAPAGPAAQPPAHFQPGKYFPSPLPMASHTACWRLQGNPAAVLCVSPFITSWLGNNRKWHFSGGRSLPFQPAVTCAGPSPFLGYYSLSQPPPGYPRFSGSLASTFLPVSHLDHHGNSNVLYGQHRFYGTQKDNFYLRNLPPQPTLLPANHNFPSVARAAPAHPMGSCSRDRDRGEAGSLQKGPKDFDRFLVGKELGREKAGKAAEGKERPAAEEDGGKERHKLVLPVPADGHCREGGPAPRGACEGRPKHLTSCLLNTKVLNGEMGRAALASCAGGMLGRPGTGVVTSGRCAKEAAGPPEPGPAFSECLERRQMLHHTASYAGPPPPLSTAAGSFPCLQLHGGPDGLCPLQDKAPRDLKASGPTFVPSVGHLADKGRPFQAAEACAVAGEGKDRHLEGTMAPDHAAPYGVSYAHLKAEGKGERRPGGFEAALNPRLKGLDYLSSAGPEASFPGLPKSGLDKSGYFELPTSSQDCARPGHQDPLGGKAPQACCTLDKTVGKEAPAGPPGAQKVARIRHQQHLMAAEVEQGGIGAEAKRKSLELASLGYSGPHLPPWGVQAGQGTAMAISEERKAGAYLDPFGSGLQQAALLPQELPAPPDEVSAMKNLLKYSSQALVVGQKAPLVGLGGLKASCIQQEAKFLSSKGPGQSERPDCARSREHDTTHGDGEVRQPPVGIAVALARQKDTVSRSEAAYGTNTARQGRAAPAFKGGGGPRSTHALDLEAEEERTRLCDDRLGLASRELLLQDSKDRVEFARIHPPSSCPGDLAPHLMMQSGQLGGDPAPHTHPHPPWLPRTRSPSLWMGGHSYGLGHPALHQNLPPGFPASVAGPVPSVFPLPQDAPTQLVILPSEPTPHSAPHALADVMDQASLWPPMYGGRGPASHMQHPGQLPVYSRPQLLRQQELYALQQQRAAQFQRKPEDQHLDLEEPAQEKAPKSTHKPVALTPTAPGAPSPAAGPTKLPPCCHPPDPKPPASSPTPPPRPSAPCTLNVCPASSPGPGSRVRSAEEKNGEGQQSTADIITSEPDLPPGYLRPMAGLGFSLPSDVHSSNLEDPETMQTTAPGAQPEPTRTFLPGEPPPCSPRSLEEPGLLSGAREATQDLAATPYPTERGPQGKAADPSPLEGLQELQCAALLEAGGPEATGQAHSTQGGAREERSREEGEQGPSSGASSQVLEQRAGSPGALEDEGEQPAPEEDELEEDELGQQSMEDSEEDCGGAPDNSHPPRALPGLDALVAATINLGDLPSDSPPDPQPPAASGPPSTVPLPHSSGIHGIALLSELADLAIQRQRSERTVPEEEEDVLAFNLQHLATLATAWSLVEAAGLDSSTAPAQPPTANPCSGPRLTPRMQILQRKDTWTPKTKPVCPLKAAIDRLDTQEVGMRVRLAELQRRYKEKQRELARLQRKHDHERDESSRSPARRGPGRPRKRKHSSSLPAPRPTGPLPRSDGKKVKAVRTSLGLLCAELRGGSGGEPAKKRSKLERSVYAGLQTASVEKAQCKKSSCQGGLAPSVAHRVAQLKPKVKSKGLPTGLSSFQQKEATPGGRIREKLSRAKSAKVSGATRHPQPKGHGSRETPRCPAQPSVAASQEAGNGYDSEDCEGLLGTEAPPREAGLLLHTGASVAVLGPSPSSVVKMEANQKAKKKKERQGLLGACRLSSPESEVKIKRRSVKAKVGTTLERAPGQRPPGALGKKKAKGKAKGSLRAEPGATPSRDALFNPSRAFACREEGSQLASERLKRATRKGTVLQPVLRRKNGALSITLATRNAKAILGKGRKLSKVKHKAGKQGKGRAVSRLLESFAVEEDFEFDDNSSFSEEEEDEEEEEEDSGPLSAEQSAALARSCAIHKEDLRDGLPVLIPKEDSLLYAGSVRTLQPPDIYSIVIEGERGNRQRIYSLEQLLQEAVLDVRPQSSRYLPPGTRVCAYWSQKSRCLYPGNVVRGASGDEDEDLDSVVVEFDDGDTGHIAVSNVRLLPPDFKIQCTEPSPALLVSSSCRRTKKVSSEAPPPSEAATPSLSPKAQDGPEALKTPGKKSISKDKAGKAELLTSGAKSPTGASDHFLGRRGSPLLSWSAVAQTKRKAVAAASKGPGVLQNLFQLNGSSKKLRAREALFPVHSVATPIFGNGFRADSFSSLASSYAPFVGGTGPGLPRGAHKLLRAKKAERVEAEKGGRRRAGGEFLVKLDHEGVTSPKNKTCKALLMGDKDFSPKLGRPLPSPSYVHPALVGKDKKGRAPIPPLPMGLALRKYAGQAEFPLPYDSDCHSSFSDEDEDGPGLAAGVPSRFLARLSVSSSSSGSSTSSSSGSVSTSSLCSSDNEDSSYSSDDEDPALLLQTCLTHPVPTLLAQPEALRSKGSGPHAHAQRCFLSRATVAGTGAGSGPSSSSKSKLKRKEALSFSKAKELSRRQRPPSVENRPKISAFLPARQLWKWSGNPTQRRGMKGKARKLFYKAIVRGEETLRVGDCAVFLSAGRPNLPYIGRIESMWESWGSNMVVKVKWFYHPEETKLGKRQCDGKNALYQSCHEDENDVQTISHKCQVVAREQYEQMARSRKCQDRQDLYYLAGTYDPTTGRLVTADGVPILC

SEQ ID NO: 1844 - DNA, 678 bp, Homo sapiens
atgaaagcgctcgtcccagcgaaggacccgcgcttcaggcgctgggccctggcggcagtgaacaagctgggggtggggcgtcgggccgcgcccccgccctccggacccccagcgcggacccctgctccggggcgggggcgctcacagtcgcgcgaacccggaggtgcggagagaacaaaaggggtcccgccccctcccccgggccggcccgccgcagccaatcggcgcggccgctatcgcctccgctctctgattggctgtgcggcggccaatcgggtgagggggccgccagcccgtgcggccccacgtggggcggcgcgaggggctgttagaggaccgcagcgggcggggcgcgtggttcgatcgcgcgctacgcgcctcggggacgcggtccgcgccacccccagccgtccctgccgtcccgaggcccccagcgagcggcgccgtggcttcgggcgcgcggggctcggggccatcgccgggtgctgtgcggttcccggctcggaggcgctgggccggcgtcgcggctgccccctgcccacgcgggagggaagcgagcggcgctcagggaccaggagcgaaggccttgccacctggcgaggcggggaggccaagactcaggagaccattgaggggcccacccagcatgggcgtccggccagctccagtgcccggtga

SEQ ID NO: 1845 - protein, 225 aa, Homo sapiens
MKALVPAKDPRFRRWALAAVNKLGVGRRAAPPPSGPPARTPAPGRGRSQSREPGGAERTKGVPPPPPGRPAAANRRGRYRLRSLIGCAAANRVRGPPARAAPRGAARGAVRGPQRAGRVVRSRATRLGDAVRATPSRPCRPEAPSERRRGFGRAGLGAIAGCCAVPGSEALGRRRGCPLPTREGSERRSGTRSEGLATWRGGEAKTQETIEGPTQHGRPASSSAR

SEQ ID NO: 1846 - DNA, 513 bp, Homo sapiens
atggcctgccaaaactgcaacacagctgccaccagcattgctgcccataaaggagcagagtgcagcagtgggtacggcaggatacagcaagagctgaagacccttgtgatctctggcaacaaaggaatttctgccttacctgcatcagacaaccttttgaaatcagtaggaccatccctgaagcagctggcacagaagacctgagatgtaaggtttccctggagttccccagtggctacccatacaacatgcccttggttaagttcctcacgccctgctactatctcaacgtggacgcccagtgttaacacctgtctggacatcctgaaggacgagtggtctgccctgtatgatgtcaagaacaccctgcactccatccacagcctgctagtagaactcaacatcaatagccttttgaacacacatgctgctgagctctagaaaaactccacagcttttaagaaatatctgcaagaaatctactcaaagcacgtctccaggaaggagccctaa

SEQ ID NO: 1847 - DNA, 3279 bp, Homo sapiens
gacgtcgcgcgggctcccgggcggggcgggtccggccgcctccgagcccggccggcagcccccggccttaaagcgcgggctgtccggaggggtcggctttcccaccgaggatttggcactctggtgagggaaaagggcgaaagagaaaagcgagcagccgtcctttcacagcctcagaaagtgctcgcttcccttcgggggctttcgcgaatcccgaggcaatctcggaggcggtatttgacctgtccaaagacgacttgatacctctataatgtaacagaaaaggtcagaaaatattaagcaagtagaagtgtggagcatattaagcaagatgaacatctcgggaagcagctgtggaagccctaactctgcagatacatctagtgactttaaggacctttggacaaaactaaaagaatgtcatgatagagaagtacaaggtttacaagtaaaagtaaccaagctaaaacaggaacgaatcttagatgcacaaagactagaagaattcttcaccaaaaatcaacagctgagggaacagcagaaagtccttcatgaaaccattaaagttttagaagatcggttaagagcaggcttatgtgatcgctgtgcagtaactgaagaacatatgcggaaaaaacagcaagagtttgaaaatatccggcagcagaatcttaaacttattacagaacttatgaatgaaaggaatactctacaggaagaaaataaaaagctttctgaacaactccagcagaaaattgagaatgatcaacagcatcaagcagctgagcttgaatgtgaggaagacgttattccagattcaccgataacagccttctcattttctggcgttaaccggctacgaagaaaggagaacccccatgtccgatacatagaacaaacacatactaaattggagcactctgtgtgtgcaaatgaaatgagaaaagtttccaagtcttcaactcatccacaacataatcctaatgaaaatgaaattctagtagctgacacttatgaccaaagtcaatctccaatggccaaagcacatggaacaagcagctatacccctgataagtcatcttttaatttagctacagttgttgctgaaacacttggacttggtgttcaagaagaatctgaaactcaaggtcccatgagcccccttggtgatgagctctaccactgtctggaaggaaatcacaagaaacagccttttgaggaatctacaagaaatactgaagatagtttaagattttcagattctacttcaaagactcctcctcaagaagaattacctactcgagtgtcatctcctgtatttggagctacctctagtatcaaaagtggtttagatttgaatacaagtttgtccccttctcttttacagcctgggaaaaaaaaacatctgaaaacactcccttttagcaacacttgtatatctagattagaaaaaactagatcaaaatctgaagatagtgcccttttcacacatcacagtcttgggtctgaagtgaacaagatcattatccagtcatctaataaacagatacttataaataaaaatataagtgaatccctaggtgaacagaataggactgagtacggtaaagattctaacactgataaacatttggagcccctgaaatcattgggaggccgaacatccaaaaggaagaaaactgaggaagaaagtgaacatgaagtaagctgcccccaagcttcttttgataaagaaaatgctttcccttttccaatggataatcagttttccatgaatggagactgtgtgatggataaacctctggatctgtctgatcgattttcagctattcagcgtcaagagaaaagccaaggaagtgagacttctaaaaacaaatttaggcaagtgactctttatgaggctttgaagaccattccaaagggcttttcctcaagccgtaaggcctcagatggcaactgcacgttgcccaaagattccccaggggagccctgttcacaggaatgcatcatccttcagcccttgaataaatgctctccagacaataaaccatcattacaaataaaagaagaaaatgctgtctttaaaattcctctacgtccacgtgaaagtttggagactgagaatgttttagatgacataaagagtgctggttctcatgagccaataaaaatacaaaccaggtcagaccatggaggatgtgaacttgcatcagttcttcagttaaatccatgtagaactggtaaaataaagtctctacaaaacaaccaagatgtatcctttgaaaatatccagtggagtatagatccgggagcagacctttctcagtataaaatggatgttactgtaatagatacaaaggatggcagtcagtcaaaattaggaggagagacagtggacatggactgtacattggttagtgaaaccgttctcttaaaaatgaagaagcaagagcagaagggagaaaaaagttcaaatgaagaaagaaaaatgaatgatagcttggaagatatgtttgatcggacaacacatgaagagtatgaatcctgtttggcagacagtttctcccaagcagcagatgaagaggaggaattgtctactgccacaaagaaactacacactcatggtgataaacaagacaaagtcaagcagaaagcgtttgtggagccgtattttaaaggtgatgaaagagagactagcttgcaaaattttcctcatattgaggtggttcggaaaaaagaggagagaagaaaactgcttgggcacacgtgtaaggaatgtgaaatttattatgcagatatgccagcagaagaaagagaaaagaaattggcttcctgctcaagacaccgattccgctacattccacccaacacaccagagaatttttgggaagttggttttccttccactcagacttgtatggaaagaggttatattaaggaagatcttgatccttgtcctcgtccaaaaagacgtcagccttacaacgcaatattttctccaaaaggcaaggagcagaagacatagacgttgaaacagaaacagaaggatgaaggacagttttttccttcttagttatttatagttaaagttggtactaaacattgatttttttgatcttctgtaaatggatttataaatcagttttctattgaaaatgtttgtgatattttgcttttgcacctttaaaacaataaggcgctttcattttgcactctaacttaagagtttttactttatgtagtgatacctaatacaattttgaaaatacaaaaaaaaaa

SEQ ID NO: 1848 - protein, 897 aa, Homo sapiens
MNISGSSCGSPNSADTSSDFKDLWTKLKECHDREVQGLQVKVTKLKQERILDAQRLEEFFTKNQQLREQQKVLHETIKVLEDRLRAGLCDRCAVTEEHMRKKQQEFENIRQQNLKLITELMNERNTLQEENKKLSEQLQQKIENDQQHQAAELECEEDVIPDSPITAFSFSGVNRLRRKENPHVRYIEQTHTKLEHSVCANEMRKVSKSSTHPQHNPNENEILVADTYDQSQSPMAKAHGTSSYTPDKSSFNLATVVAETLGLGVQEESETQGPMSPLGDELYHCLEGNHKKQPFEESTRNTEDSLRFSDSTSKTPPQEELPTRVSSPVFGATSSIKSGLDLNTSLSPSLLQPGKKKHLKTLPFSNTCISRLEKTRSKSEDSALFTHHSLGSEVNKIIIQSSNKQILINKNISESLGEQNRTEYGKDSNTDKHLEPLKSLGGRTSKRKKTEEESEHEVSCPQASFDKENAFPFPMDNQFSMNGDCVMDKPLDLSDRFSAIQRQEKSQGSETSKNKFRQVTLYEALKTIPKGFSSSRKASDGNCTLPKDSPGEPCSQECIILQPLNKCSPDNKPSLQIKEENAVFKIPLRPRESLETENVLDDIKSAGSHEPIKIQTRSDHGGCELASVLQLNPCRTGKIKSLQNNQDVSFENIQWSIDPGADLSQYKMDVTVIDTKDGSQSKLGGETVDMDCTLVSETVLLKMKKQEQKGEKSSNEERKMNDSLEDMFDRTTHEEYESCLADSFSQAADEEEELSTATKKLHTHGDKQDKVKQKAFVEPYFKGDERETSLQNFPHIEVVRKKEERRKLLGHTCKECEIYYADMPAEEREKKLASCSRHRFRYIPPNTPENFWEVGFPSTQTCMERGYIKEDLDPCPRPKRRQPYNAIFSPKGKEQKT

SEQ ID NO: 1849 - DNA, 3249 bp, Homo sapiens
cgcacgcggaaccggcgcgggcacctggggagaaatggatggagaagggacctggctggaaagcctttgccccgctgctctgctccgcccataagaggacccctgaaatgtcccgtgcagtttgttcaagtcccctgtgtgatgaaatgtgcctctcgccttacccgtgtgagaatacctgtggtgtggcagcgagtattttggtatttgacctgtccaaagacgacttgatacctctataatgtaacagaaaaggtcagaaaatattaagcaagtagaagtgtggagcatattaagcaagatgaacatctcgggaagcagctgtggaagccctaactctgcagatacatctagtgactttaaggacctttggacaaaactaaaagaatgtcatgatagagaagtacaaggtttacaagtaaaagtaaccaagctaaaacaggaacgaatcttagatgcacaaagactagaagaattcttcaccaaaaatcaacagctgagggaacagcagaaagtccttcatgaaaccattaaagttttagaagatcggttaagagcaggcttatgtgatcgctgtgcagtaactgaagaacatatgcggaaaaaacagcaagagtttgaaaatatccggcagcagaatcttaaacttattacagaacttatgaatgaaaggaatactctacaggaagaaaataaaaagctttctgaacaactccagcagaaaattgagaatgatcaacagcatcaagcagctgagcttgaatgtgaggaagacgttattccagattcaccgataacagccttctcattttctggcgttaaccggctacgaagaaaggagaacccccatgtccgatacatagaacaaacacatactaaattggagcactctgtgtgtgcaaatgaaatgagaaaagtttccaagtcttcaactcatccacaacataatcctaatgaaaatgaaattctagtagctgacacttatgaccaaagtcaatctccaatggccaaagcacatggaacaagcagctatacccctgataagtcatcttttaatttagctacagttgttgctgaaacacttggacttggtgttcaagaagaatctgaaactcaaggtcccatgagcccccttggtgatgagctctaccactgtctggaaggaaatcacaagaaacagccttttgaggaatctacaagaaatactgaagatagtttaagattttcagattctacttcaaagactcctcctcaagaagaattacctactcgagtgtcatctcctgtatttggagctacctctagtatcaaaagtggtttagatttgaatacaagtttgtccccttctcttttacagcctgggaaaaaaaaacatctgaaaacactcccttttagcaacacttgtatatctagattagaaaaaactagatcaaaatctgaagatagtgcccttttcacacatcacagtcttgggtctgaagtgaacaagatcattatccagtcatctaataaacagatacttataaataaaaatataagtgaatccctaggtgaacagaataggactgagtacggtaaagattctaacactgataaacatttggagcccctgaaatcattgggaggccgaacatccaaaaggaagaaaactgaggaagaaagtgaacatgaagtaagctgcccccaagcttcttttgataaagaaaatgctttcccttttccaatggataatcagttttccatgaatggagactgtgtgatggataaacctctggatctgtctgatcgattttcagctattcagcgtcaagagaaaagccaaggaagtgagacttctaaaaacaaatttaggcaagtgactctttatgaggctttgaagaccattccaaagggcttttcctcaagccgtaaggcctcagatggcaactgcacgttgcccaaagattccccaggggagccctgttcacaggaatgcatcatccttcagcccttgaataaatgctctccagacaataaaccatcattacaaataaaagaagaaaatgctgtctttaaaattcctctacgtccacgtgaaagtttggagactgagaatgttttagatgacataaagagtgctggttctcatgagccaataaaaatacaaaccaggtcagaccatggaggatgtgaacttgcatcagttcttcagttaaatccatgtagaactggtaaaataaagtctctacaaaacaaccaagatgtatcctttgaaaatatccagtggagtatagatccgggagcagacctttctcagtataaaatggatgttactgtaatagatacaaaggatggcagtcagtcaaaattaggaggagagacagtggacatggactgtacattggttagtgaaaccgttctcttaaaaatgaagaagcaagagcagaagggagaaaaaagttcaaatgaagaaagaaaaatgaatgatagcttggaagatatgtttgatcggacaacacatgaagagtatgaatcctgtttggcagacagtttctcccaagcagcagatgaagaggaggaattgtctactgccacaaagaaactacacactcatggtgataaacaagacaaagtcaagcagaaagcgtttgtggagccgtattttaaaggtgatgaaagagagactagcttgcaaaattttcctcatattgaggtggttcggaaaaaagaggagagaagaaaactgcttgggcacacgtgtaaggaatgtgaaatttattatgcagatatgccagcagaagaaagagaaaagaaattggcttcctgctcaagacaccgattccgctacattccacccaacacaccagagaatttttgggaagttggttttccttccactcagacttgtatggaaagaggttatattaaggaagatcttgatccttgtcctcgtccaaaaagacgtcagccttacaacgcaatattttctccaaaaggcaaggagcagaagacatagacgttgaaacagaaacagaaggatgaaggacagttttttccttcttagttatttatagttaaagttggtactaaacattgatttttttgatcttctgtaaatggatttataaatcagttttctattgaaaatgtttgtgatattttgcttttgcacctttaaaacaataaggcgctttcattttgcactctaacttaagagtttttactttatgtagtgatacctaatacaattttgaaaatacaaaaaaaaaa

SEQ ID NO: 1850 - protein, 897 aa, Homo sapiens; identical to SEQ ID NO: 1848

SEQ ID NO: 1851 - DNA, 3233 bp, Homo sapiens
cgcacgcggaaccggcgcgggcacctggggagaaatggatggagaagggacctggctggaaagcctttgccccgctgctctgctccgcccataagaggacccctgaaatgtcccgtgcagtttgttcaagtcccctgtgtgatgaaatgtgcctctcgccttacccgtgtgagaatacctgtggtgtggcagcgagtattttggtgagcacctgcagtgtagtggtttatactaaggaatacacacaaattacaggcctttgagcccagaatgcaacttgggaggtatttgacctgtccaaagacgacttgatacctctataatgtaacagaaaaggtcagaaaatattaagcaagtagaagtgtggagcatattaagcaagatgaacatctcgggaagcagctgtggaagccctaactctgcagatacatctagtgactttaaggacctttggacaaaactaaaagaatgtcatgatagagaagtacaaggtttacaagtaaaagtaaccaagctaaaacaggaacgaatcttagatgcacaaagactagaagaattcttcaccaaaaatcaacagctgagggaacagcagaaagtccttcatgaaaccattaaagttttagaagatcggttaagagcaggcttatgtgatcgctgtgcagtaactgaagaacatatgcggaaaaaacagcaagagtttgaaaatatccggcagcagaatcttaaacttattacagaacttatgaatgaaaggaatactctacaggaagaaaataaaaagctttctgaacaactccagcagaaaattgagaatgatcaacagcatcaagcagctgagcttgaatgtgaggaagacgttattccagattcaccgataacagccttctcattttctggcgttaaccggctacgaagaaaggagaacccccatgtccgatacatagaacaaacacatactaaattggagcactctgtgtgtgcaaatgaaatgagaaaagtttccaagtcttcaactcatccacaacataatcctaatgaaaatgaaattctagtagctgacacttatgaccaaagtcaatctccaatggccaaagcacatggaacaagcagctatacccctgataagtcatcttttaatttagctacagttgttgctgaaacacttggacttggtgttcaagaagaatctgaaactcaaggtcccatgagcccccttggtgatgagctctaccactgtctggaaggaaatcacaagaaacagccttttgaggaatctacaagaaatactgaagatagtttaagattttcagattctacttcaaagactcctcctcaagaagaattacctactcgagtgtcatctcctgtatttggagctacctctagtatcaaaagtggtttagatttgaatacaagtttgtccccttctcttttacagcctgggaaaaaaaaacatctgaaaacactcccttttagcaacacttgtatatctagattagaaaaaactagatcaaaatctgaagatagtgcccttttcacacatcacagtcttgggtctgaagtgaacaagatcattatccagtcatctaataaacagatacttataaataaaaatataagtgaatccctaggtgaacagaataggactgagtacggtaaagattctaacactgataaacatttggagcccctgaaatcattgggaggccgaacatccaaaaggaagaaaactgaggaagaaagtgaacatgaagtaagctgcccccaagcttcttttgataaagaaaatgctttcccttttccaatggataatcagttttccatgaatggagactgtgtgatggataaacctctggatctgtctgatcgattttcagctattcagcgtcaagagaaaagccaaggaagtgagacttctaaaaacaaatttaggcaagtgactctttatgaggctttgaagaccattccaaagggcttttcctcaagccgtaaggcctcagatggcaactgcacgttgcccaaagattccccaggggagccctgttcacaggaatgcatcatccttcagcccttgaataaatgctctccagacaataaaccatcattacaaataaaagaagaaaatgctgtctttaaaattcctctacgtccacgtgaaagtttggagactgagaatgttttagatgacataaagagtgctggttctcatgagccaataaaaatacaaaccaggtcagaccatggaggatgtgaacttgcatcagttcttcagttaaatccatgtagaactggtaaaataaagtctctacaaaacaaccaagatgtatcctttgaaaatatccagtggagtatagatccgggagcagacctttctcagtataaaatggatgttactgtaatagatacaaaggatggcagtcagtcaaaattaggaggagagacagtggacatggactgtacattggttagtgaaaccgttctcttaaaaatgaagaagcaagagcagaagggagaaaaaagttcaaatgaagaaagaaaaatgaatgatagcttggaagatatgtttgatcggacaacacatgaagagtatgaatcctgtttggcagacagtttctcccaagcagcagatgaagaggaggaattgtctactgccacaaagaaactacacactcatggtgataaacaagacaaagtcaagcagaaagcgtttgtggagccgtattttaaaggtgatgaaagtattatgcagatatgccagcagaagaaagagaaaagaaattggcttcctgctcaagacaccgattccgctacattccacccaacacaccagagaatttttgggaagttggttttccttccactcagacttgtatggaaagaggttatattaaggaagatcttgatccttgtcctcgtccaaaaagacgtcagccttacaacgcaatattttctccaaaaggcaaggagcagaagacatagacgttgaaacagaaacagaaggatgaaggacagttttttccttcttagttatttatagttaaagttggtactaaacattgatttttttgatcttctgtaaatggatttataaatcagttttctattgaaaatgtttgtgatattttgcttttgcacctttaaaacaataaggcgctttcattttgcactctaacttaagagtttttactttatgtagtgatacctaatacaattttgaaaatacaaaaaaaaaa

SEQ ID NO: 1852 - protein, 867 aa, Homo sapiens
MNISGSSCGSPNSADTSSDFKDLWTKLKECHDREVQGLQVKVTKLKQERILDAQRLEEFFTKNQQLREQQKVLHETIKVLEDRLRAGLCDRCAVTEEHMRKKQQEFENIRQQNLKLITELMNERNTLQEENKKLSEQLQQKIENDQQHQAAELECEEDVIPDSPITAFSFSGVNRLRRKENPHVRYIEQTHTKLEHSVCANEMRKVSKSSTHPQHNPNENEILVADTYDQSQSPMAKAHGTSSYTPDKSSFNLATVVAETLGLGVQEESETQGPMSPLGDELYHCLEGNHKKQPFEESTRNTEDSLRFSDSTSKTPPQEELPTRVSSPVFGATSSIKSGLDLNTSLSPSLLQPGKKKHLKTLPFSNTCISRLEKTRSKSEDSALFTHHSLGSEVNKIIIQSSNKQILINKNISESLGEQNRTEYGKDSNTDKHLEPLKSLGGRTSKRKKTEEESEHEVSCPQASFDKENAFPFPMDNQFSMNGDCVMDKPLDLSDRFSAIQRQEKSQGSETSKNKFRQVTLYEALKTIPKGFSSSRKASDGNCTLPKDSPGEPCSQECIILQPLNKCSPDNKPSLQIKEENAVFKIPLRPRESLETENVLDDIKSAGSHEPIKIQTRSDHGGCELASVLQLNPCRTGKIKSLQNNQDVSFENIQWSIDPGADLSQYKMDVTVIDTKDGSQSKLGGETVDMDCTLVSETVLLKMKKQEQKGEKSSNEERKMNDSLEDMFDRTTHEEYESCLADSFSQAADEEEELSTATKKLHTHGDKQDKVKQKAFVEPYFKGDESIMQICQQKKEKRNWLPAQDTDSATFHPTHQRIFGKLVFLPLRLVWKEVILRKILILVLVQKDVSLTTQYFLQKARSRRHRR

SEQ ID NO: 1853 - DNA, 2523 bp, Homo sapiens
ggccatttttcttcctggtgtttgaatgactcataaaatgagtttggagtggtctgaagcctctgcctccttccttgaatgctttctaagaggggctgccatgcaagaatatatgctgattttcccatacggcgcctcatctcccagagatcttccttggagaccctggaagatattgaggagaacgcccctctccggagatgtcgaactctctcaggttcacccagaccaaagaattttaagaagattcattttatcaagaacatgcggcaacacgataccaggaatggcagaatagtccttatcagtggcagaagatccttctgtagtatattttcagtgctgccgtatcgcgacagtacccaagtcggggacttgaagttggacggaggaagacaatcaactggtgcagtgagtttgaaagagatcattggtctggaaggtgtggagctgggtgctgatgggaagactgtttcctatacccaatttctgttacccacaaatgcctttggagcccggagaaataccatagactccacctcctctttctcccagttccgtaacctgagccaccgcagcctctccataggccgggcaagcggcacccaggggagcctcgacacaggtagtgacctgggagactttatggactatgacccaaatctcttggatgacccccagtggccttgtggcaaacacaaacgcgttctgatcttcccttcctacatgacaacagtgattgactacgtgaagccctcggatctcaagaaggacatgaacgagaccttcaaggagaagtttcctcacattaagctgacactcagcaaaattaggagtctgaaacgagagatgcggaagcttgcgcaggaggactgtggccttgaggagcccacggtggccatggccttcgtctactttgaaaagctcgccctcaaggggaaactcaacaaacagaaccggaagctgtgtgctggggcatgtgtgctgttagcagccaaaattggaagtgacctcaaaaaacacgaagtcaagcatttaattgacaaactggaagagaagttccggctgaacaggcgagaactgattgcctttgaattcccggtgttagtggccttggaattcgccctccacttgcccgagcacgaagtcatgccccactacagacggctggtccagagttcctagcactggccccgaggacagccaagggccatttcttctcagcttggtggagcagcacttacttactactggaaatgaaaaaaagtagaactcagaataccagacttttcttcctctcgacatagtttggggagaagcagtactagaaactttccaaggagtcttgggtgtgtagccaagaggagccatgagctatggactcctcaagcacgggaagaggaggtgtgtgctgagaacagagaggccctgccctctgtccactagcgagaatccctagctgccccagcccagtctttctccccggcattcacaaactttgcaagcgtggtccagggccttctccagatctgttccaacttggagtgtgaagggcttgagcatacgggggaagagagtctgcagaagttgggggaaaacttttaaaagataccctcattgtgtcaaagagtgtgccaatctatttttgtatcagcattggaagtgcactttcccctggggcgtgtgggtgtgtgaatgtgcaagtgtctgagagatactgcatcagccctagacccccagagccagtcccgccctttacagagcagcccttagcctggggccatgggtcaggctgaccttcaacaattatttctagatgatttctggataagaattgctctctcggtaccagacagtttgacatcctccacccttagaaaatgactgacattgttttgttactgctcctacccaccaaggggataaagaaggcgagttctgagtgttggatgagtcagtcgcgtggaaggacgtggagcgtggcgctctgtaacttcctgccgtctgccaccccgccacgtgtatttaaccctcgcactttctccactgtggagatggctggggcggcgccccacagtgtgtattcctgtcctctatgttagagtgcatcagaagcacatttactgtgctatttatatcgctatataaaagtgttttataaaaacccagaataggagcccgacgcatgattggtgtttgaggcgtttgccagctgggacaaactgcgtttggagctgtggttaagctgactaaggaggcggtggctctttcttaacattcccacgtgcccagggctgttcatgcaagattttaatggtgacttgtcctggcttactgggacagtctgtatgaggcatgtcaccacactgtcgcctcatagctgcaagagagaggcaccagctgaagttcccctgactgaagagagcctgtggccatgtaaaaagagaattaaactcttgttgctttttgtaaaaaaaaaaaaaaaaaaaaaaaaaaaaaaaaaaaaaaaaaaaaaaaaaaaaa

SEQ ID NO: 1854 - protein, 368 aa, Homo sapiens
MLSKRGCHARIYADFPIRRLISQRSSLETLEDIEENAPLRRCRTLSGSPRPKNFKKIHFIKNMRQHDTRNGRIVLISGRRSFCSIFSVLPYRDSTQVGDLKLDGGRQSTGAVSLKEIIGLEGVELGADGKTVSYTQFLLPTNAFGARRNTIDSTSSFSQFRNLSHRSLSIGRASGTQGSLDTGSDLGDFMDYDPNLLDDPQWPCGKHKRVLIFPSYMTTVIDYVKPSDLKKDMNETFKEKFPHIKLTLSKIRSLKREMRKLAQEDCGLEEPTVAMAFVYFEKLALKGKLNKQNRKLCAGACVLLAAKIGSDLKKHEVKHLIDKLEEKFRLNRRELIAFEFPVLVALEFALHLPEHEVMPHYRRLVQSS

SEQ ID NO: 1855 - DNA, 4122 bp, Homo sapiens
tttgtcatcagctcgctctccattggcggggagcggagagcagcgaagaagggggtggggaggggaggggaagggaagggggtggaaactgcctggagccgtttctccgcgccgctgttggtgctgccgctgcctcctcctcctccgccgccgccgccgccgccgccgcctcctccggctcttcgctcggcccctctccgcctccatgtgccggatagcgggagcgctgcggaccctgctgccgctgctggcggccctgcttcaggcgtctgtagaggcttctggtgaaatcgcattatgcaagactggatttcctgaagatgtttacagtgcagtcttatcgaaggatgtgcatgaaggacagcctcttctcaatgtgaagtttagcaactgcaatggaaaaagaaaagtacaatatgagagcagtgagcctgcagattttaaggtggatgaagatggcatggtgtatgccgtgagaagctttccactctcttctgagcatgccaagttcctgatatatgcccaagacaaagagacccaggaaaagtggcaagtggcagtaaaattgagcctgaagccaaccttaactgaggagtcagtgaaggagtcagcagaagttgaagaaatagtgttcccaagacaattcagtaagcacagtggccacctacaaaggcagaagagagactgggtcatccctccaatcaacttgccagaaaactccaggggaccttttcctcaagagcttgtcaggatcaggtctgatagagataaaaacctttcactgcggtacagtgtaactgggccaggagctgaccagcctccaactggtatcttcattatcaaccccatctcgggtcagctgtcggtgacaaagcccctggatcgcgagcagatagcccggtttcatttgagggcacatgcagtagatattaatggaaatcaagtggagaaccccattgacattgtcatcaatgttattgacatgaatgacaacagacctgagttcttacaccaggtttggaatgggacagttcctgagggatcaaagcctggaacatatgtgatgaccgtaacagcaattgatgctgacgatcccaatgccctcaatgggatgttgaggtacagaatcgtgtctcaggctccaagcaccccttcacccaacatgtttacaatcaacaatgagactggtgacatcatcacagtggcagctggacttgatcgagaaaaagtgcaacagtatacgttaataattcaagctacagacatggaaggcaatcccacatatggcctttcaaacacagccacggccgtcatcacagtgacagatgtcaatgacaatcctccagagtttactgccatgacgttttatggtgaagttcctgagaacagggtagacatcatagtagctaatctaactgtgaccgataaggatcaaccccatacaccagcctggaacgcagtgtacagaatcagtggcggagatcctactggacggttcgccatccagaccgacccaaacagcaacgacgggttagtcaccgtggtcaaaccaatcgactttgaaacaaataggatgtttgtccttactgttgctgcagaaaatcaagtgccattagccaagggaattcagcacccgcctcagtcaactgcaaccgtgtctgttacagttattgacgtaaatgaaaacccttattttgcccccaatcctaagatcattcgccaagaagaagggcttcatgccggtaccatgttgacaacattcactgctcaggacccagatcgatatatgcagcaaaatattagatacactaaattatctgatcctgccaattggctaaaaatagatcctgtgaatggacaaataactacaattgctgttttggaccgagaatcaccaaatgtgaaaaacaatatatataatgctactttccttgcttctgacaatggaattcctcctatgagtggaacaggaacgctgcagatctatttacttgatattaatgacaatgcccctcaagtgttacctcaagaggcagagacttgcgaaactccagaccccaattcaattaatattacagcacttgattatgacattgatccaaatgctggaccatttgcttttgatcttcctttatctccagtgactattaagagaaattggaccatcactcggcttaatggtgattttgctcagcttaatttaaagataaaatttcttgaagctggtatctatgaagttcccatcataatcacagattcgggtaatcctcccaaatcaaatatttccatcctgcgcgtgaaggtttgccagtgtgactccaacggggactgcacagatgtggacaggattgtgggtgcggggcttggcaccggtgccatcattgccatcctgctctgcatcatcatcctgcttatccttgtgctgatgtttgtggtatggatgaaacgccgggataaagaacgccaggccaaacaacttttaattgatccagaagatgatgtaagagataatattttaaaatatgatgaagaaggtggaggagaagaagaccaggactatgacttgagccagctgcagcagcctgacactgtggagcctgatgccatcaagcctgtgggaatccgacgaatggatgaaagacccatccacgctgagccccagtatccggtccgatctgcagccccacaccctggagacattggggacttcattaatgagggccttaaagcggctgacaatgaccccacagctccaccatatgactccctgttagtgtttgactatgaaggcagtggctccactgctgggtccttgagctcccttaattcctcaagtagtggtggtgagcaggactatgattacctgaacgactgggggccacggttcaagaaacttgctgacatgtatggtggaggtgatgactgaacttcagggtgaacttggtttttggacaagtacaaacaatttcaactgatattcccaaaaagcattcagaagctaggctttaactttgtagtctactagcacagtgcttgctggaggctttggcataggctgcaaaccaatttgggctcagagggaatatcagtgatccatactgtttggaaaaacactgagctcagttacacttgaattttacagtacagaagcactgggattttatgtgcctttttgtacctttttcagattggaattagttttctgtttaaggctttaatggtactgatttctgaaacgataagtaaaagacaaaatattttgtggtgggagcagtaagttaaaccatgatatgcttcaacacgcttttgttacattgcatttgcttttattaaaatacaaaattaaacaaacaaaaaaactcatggagcgattttattatcttgggggatgagaccatgagattggaaaatgtacattacttctagttttagactttagtttgttttttttttttcactaaaatcttaaaacttactcagctggttgcaaataaagggagttttcatatcaccaatttgtagcaaaattgaattttttcataaactagaatgttagacacattttggtcttaatccatgtacacttttttatttctgtatttttccacttcactgtaaaaatagtatgtgtacataatgttttattggcatagtctatggagaagtgcagaaacttcagaacatgtgtatgtattatttggactatggattcaggttttttgcatgtttatatctttcgttatggataaagtatttacaaaacagtgacatttgattcaattgttgagctgtagttagaatactcaatttttaatttttttaatttttttattttttattttctttttggtttggggagggagaaaagttcttagcacaaatgttttacataatttgtaccaaaaaaaaaaaaaaggaaaggaaagaaaggggtggcctgacactggtggcactactaagtgtgtgttttttaaaaaaaaaaatggaaaaaaaaaagcttttaaactggagagacttctgacaacagctttgcctctgtattgtgtaccagaatataaatgatacacctctgaccccagcgttctgaataaaatgctaattttggaaaaaaaaaaaaaaaaa

SEQ ID NO: 1856 - protein, 906 aa, Homo sapiens
MCRIAGALRTLLPLLAALLQASVEASGEIALCKTGFPEDVYSAVLSKDVHEGQPLLNVKFSNCNGKRKVQYESSEPADFKVDEDGMVYAVRSFPLSSEHAKFLIYAQDKETQEKWQVAVKLSLKPTLTEESVKESAEVEEIVFPRQFSKHSGHLQRQKRDWVIPPINLPENSRGPFPQELVRIRSDRDKNLSLRYSVTGPGADQPPTGIFIINPISGQLSVTKPLDREQIARFHLRAHAVDINGNQVENPIDIVINVIDMNDNRPEFLHQVWNGTVPEGSKPGTYVMTVTAIDADDPNALNGMLRYRIVSQAPSTPSPNMFTINNETGDIITVAAGLDREKVQQYTLIIQATDMEGNPTYGLSNTATAVITVTDVNDNPPEFTAMTFYGEVPENRVDIIVANLTVTDKDQPHTPAWNAVYRISGGDPTGRFAIQTDPNSNDGLVTVVKPIDFETNRMFVLTVAAENQVPLAKGIQHPPQSTATVSVTVIDVNENPYFAPNPKIIRQEEGLHAGTMLTTFTAQDPDRYMQQNIRYTKLSDPANWLKIDPVNGQITTIAVLDRESPNVKNNIYNATFLASDNGIPPMSGTGTLQIYLLDINDNAPQVLPQEAETCETPDPNSINITALDYDIDPNAGPFAFDLPLSPVTIKRNWTITRLNGDFAQLNLKIKFLEAGIYEVPIIITDSGNPPKSNISILRVKVCQCDSNGDCTDVDRIVGAGLGTGAIIAILLCIIILLILVLMFVVWMKRRDKERQAKQLLIDPEDDVRDNILKYDEEGGGEEDQDYDLSQLQQPDTVEPDAIKPVGIRRMDERPIHAEPQYPVRSAAPHPGDIGDFINEGLKAADNDPTAPPYDSLLVFDYEGSGSTAGSLSSLNSSSSGGEQDYDYLNDWGPRFKKLADMYGGGDD

SEQ ID NO: 1857 - DNA, 2494 bp, Homo sapiens
agttggcgacatggtggcacccgtgctggagacttctcacgtgttttgctgcccaaaccgggtgcggggagtcctgaactggagctctgggcccagaggacttctggcctttggcacgtcctgctccgtggtgctctatgaccccctgaaaagggttgttgttaccaacttgaatggtcacaccgcccgagtcaattgcatacagtggatttgtaaacaggatggctccccttctactgaattagtttctggaggatctgataatcaagtgattcactgggaaatagaggataatcagcttttaaaagcagtgcatcttcaaggccatgaaggacctgtttatgcggtgcatgctgtttaccagaggaggacatcagatcctgcattatgtacactgatcgtttctgcagctgcagattctgctgttcgactctggtctaaaaagggtccagaagtaatgtgccttcagactttaaactttggaaatggatttgctttggctctctgcttatcttttttgccaaatactgatgtaccaatattagcatgtggcaatgatgattgcagaattcacatatttgctcaacaaaatgatcagtttcagaaagtgctttctctctgtggacatgaggattggattagaggagtggaatgggcagcctttggtagagatcttttcctagcaagctgttcacaagattgcctgataagaatatggaagctgtatataaagtcaacatctttagaaactcaggatgacgataacataagactgaaagaaaatacttttaccatagaaaatgaaagtgttaaaatagcatttgctgttactctggagacagtgctagccggtcatgaaaactgggtaaatgcagttcactggcaacctgtgttttacaaagatggtgtcctacagcagccagtgagattattatctgcttccatggataaaaccatgattctctgggctccagatgaagagtcaggagtttggctagaacaggttcgagtaggtgaagtaggtgggaatactttgggattttatgattgccagttcaatgaagatggctccatgatcattgctcatgctttccacggagcgttgcacctttggaaacagaatacagttaacccaagagagtggactccagagattgtcatttcaggacactttgatggtgtccaagacctagtctgggatccagaaggagaatttattatcactgttggtactgatcagacaactagactttttgctccatggaagagaaaagaccaatcacaggtgacttggcatgaaattgcaaggcctcagatacatgggtatgacctgaaatgtttggcaatgattaatcggtttcagtttgtatctggagcagatgaaaaagttcttcgggttttttctgcacctcggaattttgtggaaaatttttgtgccattacaggacaatcactgaatcatgtgctctgtaatcaagatagtgatcttccagaaggagccactgtccctgcattgggattatcaaataaagctgtctttcagggagatatagcttctcagccttctgatgaagaggagctgttaactagtactggttttgagtatcagcaggtggcctttcagccctccatacttactgagcctcccactgaggatcatcttctgcagaatactttgtggcctgaagttcaaaaactatatgggcacggttatgaaatattttgtgttacttgtaacagttcaaagactctgcttgcctcagcttgtaaggcagctaagaaagagcatgcagctatcattctttggaacactacatcttggaaacaggtgcagaatttagttttccacagtttgacagtcacgcagatggccttctcacctaatgagaagttcttactagctgtttccagagatcgaacctggtcattgtggaaaaagcaggatacaatctcacctgagttcgagccagtttttagtctttttgccttcaccaacaaaattacttctgtgcacagtagaattatttggtcttgtgattggagtcctgacagcaagtatttcttcactgggagtcgagacaaaaaggtggttgtctggggtgagtgcgactccactgatgactgtattgagcacaacattggcccctgctcctcagtcctggacgtgggtggggctgtgacagctgtcagcgtctgcccagtgctccacccttctcaacgatacgtggttgcagtaggattggagtgtggaaagatttgcttatatacctggaaaaagactgatcaagttccagaaataaatgactggacccactgtgtagaaacaagtcaaagccaaagtcatacactggctatcagaaaattatgctggaagaattgcagtggaaaaactgaacagaaggaagcagaaggtgctgagtggttacactttgcaagctgtggtgaagatcacactgtgaagatacacagagtcaataaatgtgcactgtaatgg

SEQ ID NO: 1858 - protein, 826 aa, Homo sapiens
MVAPVLETSHVFCCPNRVRGVLNWSSGPRGLLAFGTSCSVVLYDPLKRVVVTNLNGHTARVNCIQWICKQDGSPSTELVSGGSDNQVIHWEIEDNQLLKAVHLQGHEGPVYAVHAVYQRRTSDPALCTLIVSAAADSAVRLWSKKGPEVMCLQTLNFGNGFALALCLSFLPNTDVPILACGNDDCRIHIFAQQNDQFQKVLSLCGHEDWIRGVEWAAFGRDLFLASCSQDCLIRIWKLYIKSTSLETQDDDNIRLKENTFTIENESVKIAFAVTLETVLAGHENWVNAVHWQPVFYKDGVLQQPVRLLSASMDKTMILWAPDEESGVWLEQVRVGEVGGNTLGFYDCQFNEDGSMIIAHAFHGALHLWKQNTVNPREWTPEIVISGHFDGVQDLVWDPEGEFIITVGTDQTTRLFAPWKRKDQSQVTWHEIARPQIHGYDLKCLAMINRFQFVSGADEKVLRVFSAPRNFVENFCAITGQSLNHVLCNQDSDLPEGATVPALGLSNKAVFQGDIASQPSDEEELLTSTGFEYQQVAFQPSILTEPPTEDHLLQNTLWPEVQKLYGHGYEIFCVTCNSSKTLLASACKAAKKEHAAIILWNTTSWKQVQNLVFHSLTVTQMAFSPNEKFLLAVSRDRTWSLWKKQDTISPEFEPVFSLFAFTNKITSVHSRIIWSCDWSPDSKYFFTGSRDKKVVVWGECDSTDDCIEHNIGPCSSVLDVGGAVTAVSVCPVLHPSQRYVVAVGLECGKICLYTWKKTDQVPEINDWTHCVETSQSQSHTLAIRKLCWKNCSGKTEQKEAEGAEWLHFASCGEDHTVKIHRVNKCAL

SEQ ID NO: 1859 - DNA, 2729 bp, Homo sapiens
ctggatggactagccggggccatggccggcgcggcggcggagtcagggcgggagctgtggaccttcgcgggttcccgggacccgagcgcaccgcggctagcctacggctacggcccgggcagcctgcgcgagctgcgggcgcgcgagttcagccgcctggcaggaactgtctatcttgaccatgcaggtgccaccttgttctcccagagccagctcgaaagcttcactagtgatctcatggaaaacacttatggtaatcctcacagccagaacatcagcagcaagctcacccatgacactgtggagcaggtgcgctacagaatcctggcgcacttccacaccaccgcagaagactacactgtgatcttcactgccgggagcacggctgctctcaaactggtggcagaggcctttccatgggtgtcccagggcccagagagcagtgggagtcgcttctgttacctcaccgacagccacacctccgtagtgggtatgaggaacgtgaccatggctataaatgtcatatccatcccggtcaggccagaggacctgtggtctgcagaggaacgtggtgcttcagccagcaacccagactgccagctgccgcatctcttctgctacccagctcagagtaacttttctggagtcagataccccctgtcctggatagaagaggtcaagtctgggcggttgcgccctgtgagcacgcctgggaagtggtttgtgctgctggatgcagcctcctacgtgagcacctcgcctttggacctgtcagctcaccaggccgactttgtccccatctccttctataagatcttcgggtttcctacaggcctgggcgctctgctggtccataatcgtgcggctcctctactgaggaagacctactttggaggagggacagcctctgcgtacctagcaggagaagacttctacatcccgaggcagtcggtagctcagaggtttgaagatggcaccatctcattccttgatgttatcgcgctaaaacatggatttgacaccctagagcgcctcacaggtggaatggagaatataaagcagcacaccttcaccttggctcagtatacctacatggccctgtcctctctccagtaccccaatggagcccctgtggtgcggatttacagcgattctgagttcagcagccctgaggttcagggcccgatcatcaattttaatgtgctggatgacaaagggaacatcattggttactcccaggtggacaaaatggccagtctttacaacatccacctgcgaactggctgcttctgtaacactggggcctgccagaggcacctgggcataagcaacgagatggtcaggaagcattttcaggctggtcatgtctgtggggacaatatggacctcatagatgggcagcccacaggatctgtgaggatttcatttggatacatgtcgacgctggatgatgtccaggcctttcttaggttcatcatagacactcgcctgcactcatcaggggactggcctgtccctcaggcccatgctgacaccggggagactggagccccatcagcagacagccaggctgatgttatacctgctgtcatgggcagacgtagcctctcgcctcaggaagatgccctcacaggctccagggtttggaacaactcgtctactgtgaatgctgtgcctgtggccccacctgtgtgtgatgtcgccagaacccagccgactccttcagagaaagctgcaggagtcctggagggggcccttgggccacatgttgtcactaacctttatctctatccaatcaaatcctgtgctgcatttgaggtgaccaggtggcctgtaggaaaccaagggctgctatatgaccggagctggatggttgtgaatcacaatggtgtttgcctgagtcagaagcaggaaccccggctctgcctgatccagcccttcatcgacttgcggcaaaggatcatggtcatcaaagccaaagggatggagcctatagaggtgcctcttgaggaaaatagtgaacggactcagattcgccaaagcagggtctgtgctgacagagtaagtacttatgattgtggagaaaaaatttcaagctggttgtcaacattttttggccgtccttgtaatttgatcaaacaaagttcaaactctcaaaggaatgcaaagaagaaacatggaaaagatcaacttcctggtacaatggccaccctttctctggtgaatgaggcacagtatctgctgatcaacacatccagtattttggaacttcaccggcaactaaacaccagtgatgagaatggaaaggaggaattattctcactgaaggatctcagcttgcgttttcgtgccaatattattatcaatggaaaaagggcttttgaagaagagaaatgggatgagatttcaattggctctttgcgtttccaggttttggggccttgtcacagatgccagatgatttgcatcgaccagcaaactgggcaacgaaaccagcatgttttccaaaaactttctgagagtcgtgaaacaaaggtgaactttggcatgtacctgatgcatgcatcattggatttatcctccccatgtttcctgtctgtaggatctcaggtgctccctgtgttgaaagagaatgtggaaggtcatgatttacctgcatctgagaaacaccaggatgttacctcctaaaaaaaatttttagcatacattaaagtttctcttttacagtg

SEQ ID NO: 1860 - protein, 888 aa, Homo sapiens
MAGAAAESGRELWTFAGSRDPSAPRLAYGYGPGSLRELRAREFSRLAGTVYLDHAGATLFSQSQLESFTSDLMENTYGNPHSQNISSKLTHDTVEQVRYRILAHFHTTAEDYTVIFTAGSTAALKLVAEAFPWVSQGPESSGSRFCYLTDSHTSVVGMRNVTMAINVISIPVRPEDLWSAEERGASASNPDCQLPHLFCYPAQSNFSGVRYPLSWIEEVKSGRLRPVSTPGKWFVLLDAASYVSTSPLDLSAHQADFVPISFYKIFGFPTGLGALLVHNRAAPLLRKTYFGGGTASAYLAGEDFYIPRQSVAQRFEDGTISFLDVIALKHGFDTLERLTGGMENIKQHTFTLAQYTYMALSSLQYPNGAPVVRIYSDSEFSSPEVQGPIINFNVLDDKGNIIGYSQVDKMASLYNIHLRTGCFCNTGACQRHLGISNEMVRKHFQAGHVCGDNMDLIDGQPTGSVRISFGYMSTLDDVQAFLRFIIDTRLHSSGDWPVPQAHADTGETGAPSADSQADVIPAVMGRRSLSPQEDALTGSRVWNNSSTVNAVPVAPPVCDVARTQPTPSEKAAGVLEGALGPHVVTNLYLYPIKSCAAFEVTRWPVGNQGLLYDRSWMVVNHNGVCLSQKQEPRLCLIQPFIDLRQRIMVIKAKGMEPIEVPLEENSERTQIRQSRVCADRVSTYDCGEKISSWLSTFFGRPCNLIKQSSNSQRNAKKKHGKDQLPGTMATLSLVNEAQYLLINTSSILELHRQLNTSDENGKEELFSLKDLSLRFRANIIINGKRAFEEEKWDEISIGSLRFQVLGPCHRCQMICIDQQTGQRNQHVFQKLSESRETKVNFGMYLMHASLDLSSPCFLSVGSQVLPVLKENVEGHDLPASEKHQDVTS

SEQ ID NO: 1861 - DNA, 4942 bp, Homo sapiens
gctgcggctgcggcctcccctgcgcgcagctacccgggcgtcccggcccgcggccccgctaaccccggggcccgcgcccccgcggcagggatgcatcatggccacgctggcttgccgggtgcagttcttggacgacacggaccctttcaacagcaccaacttccccgagcccagccggccgccgctgttcacgttccgcgaggacctcgcgctcggcacccagctggcgggggtccataggctgctgcaggcgccgcacaagctggatgactgtactctgcagctctctcacaatggcgcctacctggatttggaggccaccctggcagagcagcgggatgagttggaaggcttccaggatgacgccgggcggggcaagaagcacagcatcatcctaaggacgcagctgtctgtgagggtccatgcctgcatcgaaaaactatacaactccagcggacgagatttgagaagggccctcttctccctgaagcagatatttcaggatgacaaggatttggtgcatgaatttgtagtggctgaaggtctgacatgtttgatcaaggtgggagctgaggctgatcagaactatcagaactacatcttaagggctttgggccagattatgttgtatgtggatggaatgaatggagtaataaaccgcaatgaaaccattcagtggctgtacactctcattgggtcaaagttccgcctggtggtgaagacagccctgaagctgctgctcgtctttgtagagtactcggagtccaacgcacctctcctaattcaggctgtcactgctgttgacacgaaaagaggggtcaaaccttggtcaaatatcatggaaatcctggaggaaaaagatggagttgatacggagctactggtttatgcaatgactttggtgaacaagacgttatcaggactaccagaccaagacaccttctacgacgtcgtggactgcctggaggagctgggcattgctgctgtgtcccagaggcacttgaacaagaaagggactgacctggacttagtggagcaactcaacatttatgaggtggcgctcaggcacgaggatggcgatgagaccacggagccaccccccagtgggtgccgggaccggaggagggccagcgtgtgttccagtggcggaggcgagcaccggggcctggaccgcagaaggagccgcaggcactcggtgcagagcatcaagagcaccctgtcggcccccaccagtccctgctcccagtcagctcccagcttcaagcccaaccaagtgcgagatctgcgtgaaaaatacagcaattttggcaataactcttatcactcctcaagaccctcatctggatccagtgtgcccaccacccccacatcatccgtctcacccccacaggaggccaggttggaaaggtcatcaccgagtggtcttctcacatcatccttcaggcagcaccaagagtcactggcagcagagagagagaggcggcggcaggagagagaagaaaggttgcagagaatagagcgggaagaaagaaacaaattcagccgagattatttagacaaaagagaggagcaaaggcaagcaagagaagaaagatacaaatacttggaacagttggcagctgaggagcacgagaaggagctgagaagccggagtgtgagccggggcagagccgacctctccttggacctgacctcgccagcagccccagcctgcctggctcctctgagccatagcccctcatcttcagactctcaagaggctctcacggtgtctgcctcctccccaggaacccctcaccatccccaagcaagtgccggggatcctgaacccgaatcagaggcagaaccggaagcagaggcaggggcggggcaggttgctgatgaagctggccaggacatagcctctgcccacgagggtgcagagactgaagtggagcaggcactagagcaagagccggaagaaagagcctccctcagtgaaaaagagaggcagaacgagggggtgaacgagagggacaactgctctgcctccagcgtctcgtcctccagcagcacgttggagagggaggagaaggaggacaagctctccagggacaggacaactggtttgtggcccgcaggtgtccaggatgcaggtgtaaatggacagtgtggcgacatcctcaccaacaaacggttcatgcttgacatgctgtatgcccataacaggaagtctccggatgatgaggagaagggggatggggaggctgggaggacccagcaggaggcagaggcggtagccagccttgctaccaggatatccaccctgcaggccaactctcagacccaggatgagagtgtcaggagggtggatgtcggctgtttggacaatcggggcagtgtgaaagcatttgctgagaaattcaacagtggggacctggggagaggttccatctcccctgatgctgagcccaatgacaaggtcccagaaacagcgccggtgcagccgaagacagagtctgattacatctgggaccagctcatggccaatccaagagagctcagaatccaagacatggatttcactgacctgggggaggaggatgacattgatgtcctagatgtggacctgggtcacagggaggcccctgggccacctcccccacccccacccacctttctgggtttgccgcccccaccccctccgcccctgttggacagcattcctccccctcctgtccctggtaatttattggttcctcctcctccagtgttcaacgctcctcagggcttagggtggtcccaggtacccaggggtcagcccacattcactaagaaaaagaagaccatccgtttgttctggaatgaagttcggccttttgactggccatgtaaaaacaaccgacgctgcagagaattcctgtggtcaaaactggaacccattaaggtggacacttccagactggagcacctgtttgagtctaaatccaaggaactgtctgtctcaaagaaaactgctgcagatggaaaaaggcaagagatcattgttctggattccaagaggagtaacgccatcaatattggtctgacggtgctgccccctccaaggacgattaagatcgccattttgaattttgatgagtatgccttaaacaaagaaggaatcgagaaaattctaacgatgattcccaccgatgaggagaagcagaaaatccaggaagctcagctggccaaccctgaaatccccctgggcagtgcagagcagttcctcctcaccctgtcctccatcagcgagctctctgcacgacttcacctctgggcattcaaaatggattatgaaactacagaaaaggaagtagcagaaccactcctggacctgaaggaaggaatagaccagttggagaacaataaaaccttgggctttatcctgtctactctcttagccattgggaactttctaaatggaactaatgccaaagcgtttgagttaagctacctcgagaaggttccagaagtcaaagacacagtgcacaagcagtcgcttctccaccatgtgtgcaccatggtggtagaaaacttcccagacagctccgatctgtactcggagatcggggccatcaccaggtcagccaaggttgactttgatcaacttcaggataatttatgtcagatggagagaagatgcaaagcttcatgggatcacctcaaggcaattgcaaaacatgaaatgaaaccagttttaaaacaacggatgtcagagttcctgaaagactgtgcagagcgaattataattttaaagattgtccatagaaggataatcaacagattccactcctttttactctttatgggccatccaccttatgcaattcgggaagtgaacataaacaaattctgcaggattattagtgaatttgcactagagtatcgcacaaccagggaaagggttttgcagcagaaacagaaacgggccaaccacagagagagaaataagaccagagggaagatgatcaccgattctggcaagttctccggcagttctccggcgcccccaagccagccgcagggtctgagctatgcggaggacgcggctgagcacgagaacatgaaggctgtgctgaaaacctcgtccccctccgtggaggacgccacccccgcgctgggcgtccgcacacgcagccgagcaagccgaggatccactagttcctggactatgggaactgatgactcgcccaatgtcacagatgatgcagctgatgagatcatggaccgcatcgtcaagtcagccacccaagtgcccagtcagcgagtggtgccgagggagaggaaacgatcccgggccaaccggaaatctttgcgaagaaccctgaagagcggcctgaccccagaagaagccagagccctgggcttggttggcacctcggagttgcagctgtgacactcataggttactcccaggagtgtgctgagcagaaggcaagctcttgctggatgaaacccctccaggtggggttggggagacttgatattcacatccaacagtttgaaaagggagagctcaattcccagcgtcaccccatggcttgtgttgcctgctacgcattgacttggatctccaggagtcccctgcacataccttctccatcgtgtcagctgtgtttctcttgattccgtgacacccggtttattagttcaaaagtgtgacaccttttctgggcaaggaacagcccctttaaggagcaaatcacttctgtcacagttattatggtaatatgaggcaatctgattagcttcacagactgagtctccacaacaccaaaatatccagatgtaaaccccaaacttgtacacaaaagaaagcacagattgtttacctgttgtggattttagatgtaacaaatgtttatacaaatacatacatgtacaccatgtttcaaatactaaataaatagagtttaatgcc

SEQ ID NO: 1862 - protein, 1439 aa, Homo sapiens
MATLACRVQFLDDTDPFNSTNFPEPSRPPLFTFREDLALGTQLAGVHRLLQAPHKLDDCTLQLSHNGAYLDLEATLAEQRDELEGFQDDAGRGKKHSIILRTQLSVRVHACIEKLYNSSGRDLRRALFSLKQIFQDDKDLVHEFVVAEGLTCLIKVGAEADQNYQNYILRALGQIMLYVDGMNGVINRNETIQWLYTLIGSKFRLVVKTALKLLLVFVEYSESNAPLLIQAVTAVDTKRGVKPWSNIMEILEEKDGVDTELLVYAMTLVNKTLSGLPDQDTFYDVVDCLEELGIAAVSQRHLNKKGTDLDLVEQLNIYEVALRHEDGDETTEPPPSGCRDRRRASVCSSGGGEHRGLDRRRSRRHSVQSIKSTLSAPTSPCSQSAPSFKPNQVRDLREKYSNFGNNSYHSSRPSSGSSVPTTPTSSVSPPQEARLERSSPSGLLTSSFRQHQESLAAERERRRQEREERLQRIEREERNKFSRDYLDKREEQRQAREERYKYLEQLAAEEHEKELRSRSVSRGRADLSLDLTSPAAPACLAPLSHSPSSSDSQEALTVSASSPGTPHHPQASAGDPEPESEAEPEAEAGAGQVADEAGQDIASAHEGAETEVEQALEQEPEERASLSEKERQNEGVNERDNCSASSVSSSSSTLEREEKEDKLSRDRTTGLWPAGVQDAGVNGQCGDILTNKRFMLDMLYAHNRKSPDDEEKGDGEAGRTQQEAEAVASLATRISTLQANSQTQDESVRRVDVGCLDNRGSVKAFAEKFNSGDLGRGSISPDAEPNDKVPETAPVQPKTESDYIWDQLMANPRELRIQDMDFTDLGEEDDIDVLDVDLGHREAPGPPPPPPPTFLGLPPPPPPPLLDSIPPPPVPGNLLVPPPPVFNAPQGLGWSQVPRGQPTFTKKKKTIRLFWNEVRPFDWPCKNNRRCREFLWSKLEPIKVDTSRLEHLFESKSKELSVSKKTAADGKRQEIIVLDSKRSNAINIGLTVLPPPRTIKIAILNFDEYALNKEGIEKILTMIPTDEEKQKIQEAQLANPEIPLGSAEQFLLTLSSISELSARLHLWAFKMDYETTEKEVAEPLLDLKEGIDQLENNKTLGFILSTLLAIGNFLNGTNAKAFELSYLEKVPEVKDTVHKQSLLHHVCTMVVENFPDSSDLYSEIGAITRSAKVDFDQLQDNLCQMERRCKASWDHLKAIAKHEMKPVLKQRMSEFLKDCAERIIILKIVHRRIINRFHSFLLFMGHPPYAIREVNINKFCRIISEFALEYRTTRERVLQQKQKRANHRERNKTRGKMITDSGKFSGSSPAPPSQPQGLSYAEDAAEHENMKAVLKTSSPSVEDATPALGVRTRSRASRGSTSSWTMGTDDSPNVTDDAADEIMDRIVKSATQVPSQRVVPRERKRSRANRKSLRRTLKSGLTPEEARALGLVGTSELQL

SEQ ID NO: 1863 - DNA, 4875 bp, Homo sapiens
cccgagtggcggttgtttcaagatggcggacgtggcgggcccctcccgccccagtgccgcggcgttctggagccgggacttttctgatgaagaacaatcagtagtatacgttccaggaatttctgctgaaggaaatgtcagatcaagacacaagctgatgagtccaaaagctgatgttaaacttaagacttccagggtgactgatgcttcaatctccatggagtccttaaaaggcacaggagattcagtagatgaacagaattcctgcaggggagaaataaagagtgcatcattgaaggatttatgtcttgaagacaaaagacgcattgcaaacttaattaaagaactggccagagtaagtgaggaaaaggaagtgacagaggaaagactgaaagctgagcaggagtcatttgagaagaagatcaggcagttggaagaacagaatgaactgatcatcaaagaaagggaagctcttcagctacagtatagagaatgccaagaacttctaagcctgtatcagaaatatttatcagaacaacaggagaagctcaccatgtctctctcagaacttggtgctgctagaatgcaggaacagcaggtatccagtagaaaaagcactctccagtgttcatctgtggaactggatggttcctacttgagcatagccagaccacagacctactatcaaaccaagcaaagacctaagtctgcagtccaggattcagcttcagaatcccttatagcatttaggaataattctttgaaaccagtaacccttcatcatcccaaagatgatctagataagataccatcagagaccacaacatgtaattgtgaatctccagggagaaaacctgcagtcccaacagagaaaatgccacaagaagaattgcacatgaaggaatgtccacatcttaagcctactcctagtcaatgctgtggtcatagacttgctgcagatcgtgttcatgacagccatcctacaaacatgacccctcaacatcctaagacacatccagaatcatgcagttattgtcggctttcttgggcatctctggtgcatggtggtggggcactgcaacccattgaaactttgaaaaagcagatctcagaagatagaaagcagcaactgatgcttcagaaaatggaactggaaattgaaaaggagcgccttcagcatctgctggcccagcaggagacaaagcttcttctaaaacagcagcagcttcaccagtctcgactggattacaattgtttattgaagtcaaactgtgatggctggctgcttggaacatcatcatctattaaaaagcaccaagaccccccaaacagtggagagaataggaaggagaggaagacagttgggtttcattcgcatatgaaagatgatgcccagtggtcatgtcaaaagaaagatacatgtagaccccaaagagggacagtgacaggagttagaaaagatgcgtctacatctcctatgccaacaggaagcctaaaggattttgtcaccacagcctcaccatcattacagcacaccacctcccggtatgagacatctttgttggatttggttcagtctctgagcccaaactctgcgcccaaacctcagcgctatccctccagagaagctggggcctggaatcatggtactttccgactcagtcctctaaaatcaacccggaagaagatggggatgcacagaacccctgaagagttggaggagaatcagattctggaagatatatttttcatttgacatattgcaaaattttcttaggaaatttgtgggtttcctcacatactgatctaggattttaaattatttcattgcaaagtaattgtgtctctcctttcacggggacttgtctcactagcatcctgttacgtattgaatatagaaatcattctaacaacccaggttattttcaatcagaccaggcattcgataacacactaagggggtaggaatggaagatggtatcttttatatgctaaacagattagaaaattaacataggatactttctgcgtggtggaaaccattgcatattcagcctcatttcaagagtgtttccttctcaaacttctgctagaaaatgctgactcacttttatatacaagaaaaacctttccactgaaaaatccctctgatttaaaagtaacccctttgaaacataagcagtttcagaaaggcagactctctcatctttctcatcctgttctctcactactacatttctgtaagtggtcctttaattctgaagttggagttggtgcccctgccatcacaaacaacacgagagccaattgtgagtcagtctcagtagccatcagcctggcagctgcccatcccataaccaaagagctcaatgggctggagggtgagacccagccaatccttgggagcaagcagcactaaatcacatcagggagtgattagtcctggggaaattcagtggaggcacaagcctgaagcactcttctaccaatgtttgggtgaccacccctccaatatcccagaatgaataagaacaatccctaggtatttttatttacccaagtgttcagcttattcaccccacccccccaccccccatcacacgtgctcctgtgaactttccatggttatgtctacggaaaatgccactagagagagagtgatgcaagctgctgcaaagctgatgggcttcctctggccctcccttttcctccacgaggattaaaggatacaagctgaccaggcctcacaggtgctctgctcgtggccccaaagaaccatctctacttgccagagtatgttccaccacccaagcagggtctccctactttttctcactggcctcgttttgacccagagaaagcctatggaagttatgcagtgcagacctcatcctgtctgctgtcttttctcccacagagctcttgagatgggtccttcagcttgcagtggtccctagtagcctctcaagctaatggggatgatgatcctggtttagccagagttcaaaactctccagtcattgaaagcaaggggagggtgtgttcccagatgtgtattacttgggaattttatttgatctggagggtgtggctttttttctctcctttttaccaaccccaactaaactgggagtaagacttagtcagtgttggtagacaaagtcataccacccagggcagcctgcatgcagcgagtctgcgtggcttccctgaattactcttttaattaaaactagattatttcaatctagaaaagccttgttgagcagcctccttatccagatagatccaaagctcatgtctcttcaggctgagactggcgctgtcacctccacccagccttctttcacttggggttttttattctttggagtagaaaagaatggagcccactaatattatatttttcttctgaaataaatataaagtcaagactaactagttataatcattcccttaaaaagttggaaaatcattacagattaaaatttctttataaagttcacctctgagagtaaccaaatcggtttcatcccatatcaaaaagcctttggagtgtggagctttctgtggtatggcagaaatgggtggatggcaaactaagagccctcagccattttttcagttaaagttaggttgccagaactttcttttccttgccccctgtgtcatgactagcttaagtgtacttgactcccatagactactcccatgcccacagtcacccattccagactccagtgtccttaaaactctggagtgagaggatgccagaggatcaagaaaaggatcacagtttcttgaagaagcttgtttgcctttagaagaatcgtaaacagagtctaaactaaaggctttttgggggtcacagccacagagtggagttttattgcttctttgcctctccatgaatggccaatttggaaaagcagagatgggctttcagcagaatatcaaccaatacatttttcacatgcaaaactcatcaccagttgcctttttctaacttaatggacattttgttggtgttggtgcaagggcaataggatgtaaatttgtatataatctaatgtcttcattattaattgaatagtacatgttaacattttaatctatttaaatttactttgaaatatatacatacatatgaatgaaaggttgttacagagcctcaaagctgttgcagactatcccaagagaaaggatctggcacaaaggaatctgcctttcctccgtctcaagtctcccacccttgactggttgggatttgctcgtccagcctctagacacttcccaaagcaagactggacacatgccgagggcgttgcggatagtgcctcaccattgcccaccctgctgcccaactcctgtgagagaaaaaccaatcaatgtttacaaaatggaaaaggacacagcatgtcctttgaactccctaagtaaggcccacagttcttgatgcagagaaccaaagtgaatcatagaaaagcttttgctaacagtccgctttccaggaggcaaacttgtgtttatccaaacctgatccccatgatggggacttttctagagcaccccaaatgtcatggggagagagggactctttctgctccctcagagctactcttcacttgtccctgcttccggcaccaagttcataatagagatcttctggccagagaatcaggggagaggagaggcctgatggggcagagctggacgaagtctgctaagagagatggaggctgtggcggactccttccaactcacgatttatcctcagctcagagtgtattttgaatatgagcaaatgtttatgtacgtatgagatttcaagttaataaatcatctctatggctaaaaaaaaaaaaaaaaaaaaaa

SEQ ID NO: 1864 - protein, 577 aa, Homo sapiens
MADVAGPSRPSAAAFWSRDFSDEEQSVVYVPGISAEGNVRSRHKLMSPKADVKLKTSRVTDASISMESLKGTGDSVDEQNSCRGEIKSASLKDLCLEDKRRIANLIKELARVSEEKEVTEERLKAEQESFEKKIRQLEEQNELIIKEREALQLQYRECQELLSLYQKYLSEQQEKLTMSLSELGAARMQEQQVSSRKSTLQCSSVELDGSYLSIARPQTYYQTKQRPKSAVQDSASESLIAFRNNSLKPVTLHHPKDDLDKIPSETTTCNCESPGRKPAVPTEKMPQEELHMKECPHLKPTPSQCCGHRLAADRVHDSHPTNMTPQHPKTHPESCSYCRLSWASLVHGGGALQPIETLKKQISEDRKQQLMLQKMELEIEKERLQHLLAQQETKLLLKQQQLHQSRLDYNCLLKSNCDGWLLGTSSSIKKHQDPPNSGENRKERKTVGFHSHMKDDAQWSCQKKDTCRPQRGTVTGVRKDASTSPMPTGSLKDFVTTASPSLQHTTSRYETSLLDLVQSLSPNSAPKPQRYPSREAGAWNHGTFRLSPLKSTRKKMGMHRTPEELEENQILEDIFFI

SEQ ID NO: 1865 - DNA, 561 bp, Homo sapiens
atggctgggaataaaggaagaggaggatgtgctgctcatacctttaatactgaggctgttggatttagcaaaggtgaaaagttaccttatgtagtgttgaaaccacccccactatttcctgatgcagattataaatcagtgccactgaaaacagaagatgaagaatacatgctggctttgaaacaggagttgagagaaacaatgaaaagaatgccttattttattgaaacacctgaagaaagacaagatattgaaaggtatagtaaaagatacatgaaggtatataaagaagaatggataccagattggagaagacttccaagagagataacgccaagaaataaatatgtgttgaaaaaaattgaggaattgggaaagaaaggtgatggtgaaaattcagaagaggaaaatgaaaaggaagaaggaagcaaagaggaaaaacaggagggatataatgaagaagagcaagaagaggaaaatgactacattaattcataattcgaagatggaaatgattttggcccagacagtgatgacaacatggatgaagcaacctattag

SEQ ID NO: 1866 - DNA, 5737 bp, Homo sapiens
gtcagatcagggatcattttttttccttcctctactccctcccccctacccgcccctccctccctgtttcccttccctccctccctcccctctctgctgggtctgtgcgctggggcgcccgatcccctccgcagctgggacgctccgaactcgaggcaggagtcggctctccggagcctcgtccctcccttccccttccctgcccccttcccccacccccgactcgggcttggcgcggcggccagaggaaccccgagtcccggcccaggcccctgagctggagggatggaaaactcctctgcagcatcagcctcctcggaggcagggagcagccgctcccaggagatcgaggagctggagcgcttcatcgacagctacgtgctggagtaccaggtgcaggggctgctggctgacaagacggagggtgatggcgagagcgagaggacccagtcccacatctcccagtggacagcggactgcagcgaaccgctggacagcagctgttccttctcccgagggcgagcccccccacagcagaatggcagcaaagacaactctctggacatgctgggcacggacatctgggcggccaacaccttcgattccttcagtggtgccacctgggacctgcagccggaaaagctggacttcacccagttccaccgcaaagtccgacacacgcccaagcagcccctgccacacatcgaccgcgaagggtgtggcaaagggaagctggaagatggggatggcatcaacctgaatgacatcgagaaggtccttccagcctggcagggctaccacccgatgccccatgaagtggagatcgcacacaccaagaagctgttccgcaggaggagaaatgatcgaaggcggcagcagagacctccggggggcaacaagccccaacagcatggtgaccaccagccaggcagtgccaaacacaacagggaccaccagaaatcctaccaggggggctcagcaccccacccctcagggaggcccactcaccatggctacagccagaaccggcgctggcaccatggcaacatgaagcacccaccaggcgacaagggggaggcaggcgcacaccgcaatgccaaagagaccatgaccatcgagaacccaaaactggaggacactgcaggggacaccgggcacagcagcctcgaggccccccgcagccctgacaccctggccccggtggcttctgagcggctgcccccacagcagtcaggggggccagaggttgagacaaaacgtaaagacagtattcttcccgagcgcatcggggagcggcccaaaattaccctgctccagtcttccaaagacagactgcggcgaaggctaaaggaaaaggatgaagtggccgtggagacgaccactccccagcagaacaagatggacaagctgatcgagatcctgaacagcatgcggaacaacagcagcgacgtggacaccaagctcaccaccttcatggaggaggcccagaactccaccaactccgaggagatgctgggcgagatcgtgcgcacaatctaccagaaggctgtgtccgaccgcagcttcgccttcaccgctgccaagctctgcgacaagatggcgctctttatggtggaggggaccaagttccggagcctgctcctcaacatgctgcagaaggacttcacggtgcgcgaggagctgcagcagcaggacgtggagcgctggctgggcttcatcaccttcctgtgtgaggtcttcggcaccatgcgcagcagcacaggcgagcccttccgtgtgctcgtgtgccccatctacacctgcctcagggagctcttgcaatctcaggatgtgaaggaagatgctgtcctttgctgctctatggagctgcagagtacaggccggctgctggaggaacagctgcctgagatgatgacagagctcctggccagcgcacgggacaagatgctgtgcccctcggagtccatgctgacccggtcgctgctcctagaggtcatcgagctccacgctaacagctggaaccctctgacgccccccatcacgcagtactacaacagaaccatccagaaactgacagcctgacagccagggggcctggcaggcggcccacgggcagctggggccctggtgcacagggccagatggacaggcgggaggacaggggtggccctggcgggagaaagaaatggggaggagggcaggcagagtcggtggccagtctggagccagacggggaagggagcaaatccctgagaggagtgcccccgcacaagccccccagcccgagcatgcaagctcacaccaataagggaagcatgtttctttttcctggtggccctggccctccccttcctcactcccgcctctcccctccccatcagacccatcccccacggagctttgtgtgagggatctcatcgctgtgactcctcggagaccttggcagcctcgcacgccggggcaccgcttgggtcagaaaggacctcggaaggctgaaaaagtgggtcggagacgggctcgcattgttcccgcatgctgtcagccgcagtcgccaactggcagcaggcgacgtgtagcagatgtccgggaggacaaaggcaggcacggtccccaccagccgcccgtaattgacggcctttgtcagccatggcagagctgacgctccacctcccacctccaagtcctcctcactgcagcccccacagcctcaggcctagggggtcaggcgcagcgggggagatggagtttgcagttccacttgcactcttttgtttattgtgttttatttttcaaaagtcggttgctttgaagtctctttggccaatgaaaatgcccgtgaggtgatcacacagtcagcactgttgaggacccccggattagtgggagatcaaacccagctcccctctagaagaaggattcgagccacagacagcttgccagtagccaattagggtaattggaaacttctgccccggcggggggtccccgctggaatcctgtgttcctcgccactggcttccagcgcctctgttttctcaaagggctgatactgtcaccactgggaccaagttaaacctggtcctggccccaggggccttgtggcaaacagggcacagaacgagactggcaaattaaaaccaaaattctagatggtgtcttgcgctccacacgcaggtcttactggggaaaaggatgggagtgggggctccccaggactcgattttagctaatgcgctgtgtcactgccccagctcggacgtagaagcccagccctccgtgagctcttgggaaaggggtgaattcactgggtcatggaagggacagtcaggtgaccagcggggtcgccagatgaagcttcccagccgggaaacaagacggggtttcttggcaggccctggtcctggggagcaggccctgttgttggctggagaggaaggtgtggggtggaacaggtgtccacatagctccatctctgggggctggagcacacactttgatgagcccccccggaaatgatgtcagagcctagccgcttccttatttgctcttttattgaggccgggcaggccctgggtcactttggaggcccctcttggtccacactggactggccgggaggtgatgggcggggaaggttctcgtgattgattgattctgagtctgagagtggcgagtggggagaggcttccccagttctctccagctttccctgcagctgcaacctgccctctggtcccaggtgtggagcctttgcctgtctctaaaaagagcctgttggcgacaaggtgtagggggcacaagtttacctgaaacaggtcagtggtctctcccaagaagcgcacgccacctctggtccctggccctgaaccctgccttcttcctccctccacggtttcttcccagactttctcaagctcctcctcactgcccttcctccccagcccagcctgggaacacagatgccccgcgggtaggaggcctcgagggaggagccgggctgatgcggggctgctcagggcaggccccagggcgagcttgccatcgtggccaggcagcctccacctgtgcttcagtggcccctgcccccctgaagcatgtggggtttgtccgctaggaggaggcaaggcccccgaagagaggagagacctgggagtgggagctcaggtcagggaggaggcaggggagtggggtctcccagacccaacggtgagctcagagcaagcttcacgcaggacgctccgaaacactgtgtggagggggctgtgttgtgggcaccttggggcctgattctccttcctccgaacgggctccttgatggcctggccacaggggcagctccccattggctgttaggaccagagtgtgaagaagaagtgaaatataaatatgtatacatatataaatatatttttaattacatgtcgtgtcacggtggctccagacatactgtttgcctagtttattccactgcttgaaagcgcttcctagccaatctgaacaacaacactttaagctgtttttctaaatgcaggttgctgctcctttttcagatatggaaggaaaacgttaagactattttttttttaaagaaacaacagtcaagcctaaaatttgagaccccgaggcagcttcccgagggagactgctcagacaggaactgcaggacagaagtggatgccccacagaccctggccccctccccaagtccatcccctctctgtggcatgaggaaggccgcgtccgagttgacctctgaatgtatgtgatgagaggcagagctggatattgcatttctaaggcttgcattgctttcccctcgcccgcggttcttggcgcatggaagaggcggtccagccatctgatgttgatcctgtctcagtctccccactgcctgtcaggatgagttagtcattgtttttctccgaggcggcctgcttgccacagccctgctccccaaggcctggtggctttgccgaagctctgggaccgcagccccagcgaggcccccaacctcacccagacgaggccaggagccccgccaccctccacgggatgtgcaccctcagaccccattctctctgttcgtccttccttgaccagtctgtaaaccttcactgtttggggatcgtcctgtccatccatgtaaatgtaaatgttggccgagtcggtatttattctgattgatttttattttattctattattttctccgagggatgagggtggggggtgtgggaagggtaccacagatcaggccggggcagctgtaggggcgggggcccagacagccaggccgccaccagagcagccccatggggtgccccagacgcgggcctccaagaagccaagtcccagtctgttttctggcatcagacaccggcccgtgttccttgtcagacagacagactctcaggcctgcctggggagtcgtgtccctcagctgcagggcactgtgttgggaaaccattggctgggcctttgaggacacagatcagaagaaagaaagacaactttcctctgcgcggaacactcacacggaagggctggccgcctccctgagccggctgggagtggacgacaggacctacctccccagagcaagggcctggggcttcccgccaaagctgccgcggaaccccgctagtgcgaccaccctccctccgtcggtatgtcctgctttccagctgaacccaaactacaagtgggtttaaaaaaaataaacaccaccaccaaaaac

SEQ ID NO: 1867 - protein, 598 aa, Homo sapiens
MENSSAASASSEAGSSRSQEIEELERFIDSYVLEYQVQGLLADKTEGDGESERTQSHISQWTADCSEPLDSSCSFSRGRAPPQQNGSKDNSLDMLGTDIWAANTFDSFSGATWDLQPEKLDFTQFHRKVRHTPKQPLPHIDREGCGKGKLEDGDGINLNDIEKVLPAWQGYHPMPHEVEIAHTKKLFRRRRNDRRRQQRPPGGNKPQQHGDHQPGSAKHNRDHQKSYQGGSAPHPSGRPTHHGYSQNRRWHHGNMKHPPGDKGEAGAHRNAKETMTIENPKLEDTAGDTGHSSLEAPRSPDTLAPVASERLPPQQSGGPEVETKRKDSILPERIGERPKITLLQSSKDRLRRRLKEKDEVAVETTTPQQNKMDKLIEILNSMRNNSSDVDTKLTTFMEEAQNSTNSEEMLGEIVRTIYQKAVSDRSFAFTAAKLCDKMALFMVEGTKFRSLLLNMLQKDFTVREELQQQDVERWLGFITFLCEVFGTMRSSTGEPFRVLVCPIYTCLRELLQSQDVKEDAVLCCSMELQSTGRLLEEQLPEMMTELLASARDKMLCPSESMLTRSLLLEVIELHANSWNPLTPPITQYYNRTIQKLTA

SEQ ID NO: 1868 - DNA, 5690 bp, Homo sapiens
accgctggcggacaccccagtaacaagtgagagcgctccaccccgcagtcccccccgcctctcctccctgggtcccctcggctctcggaagaaaaaccaacagcatctccagctctcgcgcggaattgtctcttcaactttacccaaccgacgacaaggaaccagcctcaaccttttaatgcacagcccggccacaggattgccttccatctcctcttggtccctcctggatgtggtttattgatgacttgcgagcccctcagagagctgtcttccctcctctggctccctccgtttccttgagttagttttctaaggttttaccggggctcgggatctcttggaccgaatggaactttttgctgcctgcttttgctgctgattctgtcagtggacaaggaaaaaggcttcgaaggcagcagaggcgcaggggaggtggagaaagaggtggaggaagaggacgaggaggaggaggaagccgaaggggctcggcgcgtgtgtgtgcatgtgtgcatgcgtgtgtgagtgcatgtgtgtgagtgctgccgctgcccgcgacccctggccccgaaggtgttggctgaaatatggagaatagtcttagatgtgtttgggtacccaagctggcttttgtactcttcggagcttccttgttcagcgcgcatcttcaagtaaccggttttcaaattaaagctttcacagcactgcgcttcctctcagaaccttctgatgccgtcacaatgcggggaggaaatgtcctcctcgactgctccgcggagtccgaccgaggagttccagtgatcaagtggaagaaagatggcattcatctggccttgggaatggatgaaaggaagcagcaactttcaaatgggtctctgctgatacaaaacatacttcattccagacaccacaagccagatgagggactttaccaatgtgaggcatctttaggagattctggctcaattattagtcggacagcaaaagttgcagtagcaggaccactgaggttcctttcacagacagaatctgtcacagccttcatgggagacacagtgctactcaagtgtgaagtcattggggagcccatgccaacaatccactggcagaagaaccaacaagacctgactccaatcccaggtgactcccgagtggtggtcttgccctctggagcattgcagatcagccgactccaaccgggggacattggaatttaccgatgctcagctcgaaatccagccagctcaagaacaggaaatgaagcagaagtcagaattttatcagatccaggactgcatagacagctgtattttctgcaaagaccatccaatgtagtagccattgaaggaaaagatgctgtcctggaatgttgtgtttctggctatcctccaccaagttttacctggttacgaggcgaggaagtcatccaactcaggtctaaaaagtattctttattgggtggaagcaacttgcttatctccaatgtgacagatgatgacagtggaatgtatacctgtgttgtcacatataaaaatgagaatattagtgcctctgcagagctcacagtcttggttccgccatggtttttaaatcatccttccaacctgtatgcctatgaaagcatggatattgagtttgaatgtacagtctctggaaagcctgtgcccactgtgaattggatgaagaatggagatgtggtcattcctagtgattattttcagatagtgggaggaagcaacttacggatacttggggtggtgaagtcagatgaaggcttttatcaatgtgtggctgaaaatgaggctggaaatgcccagaccagtgcacagctcattgtccctaagcctgctatcccaagctccagtgtcctcccttcggctcccagagatgtggtccctgtcttggtttccagccgatttgtccgtctcagctggcgcccacctgcagaagcgaaagggaacattcaaactttcacggtctttttctccagagaaggtgacaacagggaacgagcattgaatacaacacagcctgggtcccttcagctcactgtgggaaacctgaagccagaagccatgtacacctttcgagttgtggcttacaatgaatggggaccgggagagagttctcaacccatcaaggtggccacacagcctgagttgcaagttccagggccagtagaaaacctgcaagctgtatctacctcacctacctcaattcttattacctgggaaccccctgcctatgcaaacggtccagtccaaggttacagattgttctgcactgaggtgtccacaggaaaagaacagaatatagaggttgatggactatcttataaactggaaggcctgaaaaaattcaccgaatatagtcttcgattcttagcttataatcgctatggtccgggcgtctctactgatgatataacagtggttacactttctgacgtgccaagtgccccgcctcagaacgtctccctggaagtggtcaattcaagaagtatcaaagttagctggctgcctcctccatcaggaacacaaaatggatttattaccggctataaaattcgacacagaaagacgacccgcaggggtgagatggaaacactggagccaaacaacctctggtacctattcacaggactggagaaaggaagtcagtacagtttccaggtgtcagccatgacagtcaatggtactggaccaccttccaactggtatactgcagagactccagagaatgatctagatgaatctcaagttcctgatcaaccaagctctcttcatgtgaggccccagactaactgcatcatcatgagttggactcctcccttgaacccaaacatcgtggtgcgaggttatattatcggttatggcgttgggagcccttacgctgagacagtgcgtgtggacagcaagcagcgatattattccattgagaggttagagtcaagttcccattatgtaatctccctaaaagcttttaacaatgccggagaaggagttcctctttatgaaagtgccaccaccaggtctataaccgatcccactgacccagttgattattatcctttgcttgatgatttccccacctcggtcccagatctctccacccccatgctcccaccagtaggtgtacaggctgtggctcttacccatgatgctgtgagggtcagctgggcagacaactctgtccctaagaaccaaaagacgtctgaggtgcgactttacaccgtccggtggagaaccagcttttctgcaagtgcaaaatacaagtcagaagacacaacatctctaagttacacagcaacaggcctcaaaccaaacacaatgtatgaattctcggtcatggtaacaaaaaacagaaggtccagtacttggagcatgactgcacatgccaccacgtatgaagcagcccccacctctgctcccaaggacttgacagtcattactagggaagggaagcctcgtgccgtcattgtgagttggcagcctcccttggaagccaatgggaaaattactgcttacatcttattttataccttggacaagaacatcccaattgatgactggattatggaaacaatcagtggtgataggcttactcatcaaatcatggatctcaaccttgatactatgtattactttcgaattcaagcacgaaattcaaaaggagtggggccactctctgatcctatcctcttcaggactctgaaagtggaacaccctgacaaaatggctaatgaccaaggtcgtcatggagatggaggttattggccagttgatactaatttgattgatagaagcaccctaaatgagccgccaattggacaaatgcaccccccgcatggcagtgtcactcctcagaagaacagcaacctgcttgtgatcattgtggtcaccgttggtgtcatcacagtgctggtagtggtcatcgtggctgtgatttgcacccgacgctcttcagcccagcagagaaagaaacgggccacccacagtgctggcaaaaggaagggcagccagaaggacctccgaccccctgatctttggatccatcatgaagaaatggagatgaaaaatattgaaaagccatctggcactgaccctgcaggaagggactctcccatccaaagttgccaagacctcacaccagtcagccacagccagtcagaaacccaactgggaagcaaaagcacctctcattcaggtcaagacactgaggaagcagggagctctatgtccactctggagaggtcgctggctgcacgccgagccccccgggccaagctcatgattcccatggatgcccagtccaacaatcctgctgtcgtgagcgccatcccggtgccaacgctagaaagtgcccagtacccaggaatcctcccgtctcccacctgtggatatccccacccgcagttcactctccggcctgtgccattcccaacactctcagtggaccgaggtttcggagcaggaagaagtcagtcagtgagtgaaggaccaactacccaacaaccacctatgctgcccccatctcagcctgagcattctagcagcgaggaggcaccaagcagaaccatccccacagcttgtgttcgaccaactcacccactccgcagctttgctaatcctttgctacctccaccaatgagtgcaatagaaccgaaagtcccttacacaccacttttgtctcagccagggcccactcttcctaagacccatgtgaaaacagcctcccttgggttggctggaaaagcaagatcccctttgcttcctgtgtctgtgccaacagcccctgaagtgtctgaggagagccacaaaccaacagaggattcagccaatgtgtatgaacaggatgatctgagtgaacaaatggcaagtttggaaggactcatgaagcagcttaatgccatcacaggctcagccttttaacatgtatttctgaatggatgaggtgaattttccgggaactttgcagcataccaattacccataaacagcacacctgtgtccaagaactctaaccagtgtacaggtcacccatcaggaccactcagttaaggaagatcctgaagcagttcagaaggaataagcattccttctttcacaggcatcaggaattgtcaaatgatgattatgagttccctaaacaaaagcaaagatgcattttcactgcaatgtcaaagtttaagctgctagaatagtcatgggcctttgtcactgcagtgaccacactgtcataactaatacctatgttttcctttgtcaaggcctgttgtttaatgtgtaggtctagtcttacaaaatgcaagtgcattatttaagcctgtaccatgccatggcaaaccagtgcaagctcactattttgttttcaacttaaacatacaaagcacccatgggaatctctcatgccatagcaccaaaggattggatgttttccttacagcacaaaaagtaaatagtaaacaaacaaaaggcagagaatgcttatgtttgtaactcagtcattcatcttgcacaagtggtggatattagtgagtggctaaaaattcacctattttggcaagtatttgtaaatccacccttggttaatatgtatgtctggagtccaggaatataaaaatctgcaactagtggcattctgccagcagcagtacatttctggaaagaggatataatatgcaatcttct

SEQ ID NO: 1869 - protein, 1447 aa, Homo sapiens
MENSLRCVWVPKLAFVLFGASLFSAHLQVTGFQIKAFTALRFLSEPSDAVTMRGGNVLLDCSAESDRGVPVIKWKKDGIHLALGMDERKQQLSNGSLLIQNILHSRHHKPDEGLYQCEASLGDSGSIISRTAKVAVAGPLRFLSQTESVTAFMGDTVLLKCEVIGEPMPTIHWQKNQQDLTPIPGDSRVVVLPSGALQISRLQPGDIGIYRCSARNPASSRTGNEAEVRILSDPGLHRQLYFLQRPSNVVAIEGKDAVLECCVSGYPPPSFTWLRGEEVIQLRSKKYSLLGGSNLLISNVTDDDSGMYTCVVTYKNENISASAELTVLVPPWFLNHPSNLYAYESMDIEFECTVSGKPVPTVNWMKNGDVVIPSDYFQIVGGSNLRILGVVKSDEGFYQCVAENEAGNAQTSAQLIVPKPAIPSSSVLPSAPRDVVPVLVSSRFVRLSWRPPAEAKGNIQTFTVFFSREGDNRERALNTTQPGSLQLTVGNLKPEAMYTFRVVAYNEWGPGESSQPIKVATQPELQVPGPVENLQAVSTSPTSILITWEPPAYANGPVQGYRLFCTEVSTGKEQNIEVDGLSYKLEGLKKFTEYSLRFLAYNRYGPGVSTDDITVVTLSDVPSAPPQNVSLEVVNSRSIKVSWLPPPSGTQNGFITGYKIRHRKTTRRGEMETLEPNNLWYLFTGLEKGSQYSFQVSAMTVNGTGPPSNWYTAETPENDLDESQVPDQPSSLHVRPQTNCIIMSWTPPLNPNIVVRGYIIGYGVGSPYAETVRVDSKQRYYSIERLESSSHYVISLKAFNNAGEGVPLYESATTRSITDPTDPVDYYPLLDDFPTSVPDLSTPMLPPVGVQAVALTHDAVRVSWADNSVPKNQKTSEVRLYTVRWRTSFSASAKYKSEDTTSLSYTATGLKPNTMYEFSVMVTKNRRSSTWSMTAHATTYEAAPTSAPKDLTVITREGKPRAVIVSWQPPLEANGKITAYILFYTLDKNIPIDDWIMETISGDRLTHQIMDLNLDTMYYFRIQARNSKGVGPLSDPILFRTLKVEHPDKMANDQGRHGDGGYWPVDTNLIDRSTLNEPPIGQMHPPHGSVTPQKNSNLLVIIVVTVGVITVLVVVIVAVICTRRSSAQQRKKRATHSAGKRKGSQKDLRPPDLWIHHEEMEMKNIEKPSGTDPAGRDSPIQSCQDLTPVSHSQSETQLGSKSTSHSGQDTEEAGSSMSTLERSLAARRAPRAKLMIPMDAQSNNPAVVSAIPVPTLESAQYPGILPSPTCGYPHPQFTLRPVPFPTLSVDRGFGAGRSQSVSEGPTTQQPPMLPPSQPEHSSSEEAPSRTIPTACVRPTHPLRSFANPLLPPPMSAIEPKVPYTPLLSQPGPTLPKTHVKTASLGLAGKARSPLLPVSVPTAPEVSEESHKPTEDSANVYEQDDLSEQMASLEGLMKQLNAITGSAF

SEQ ID NO: 1870 - DNA, 4871 bp, Homo sapiens
ccgcagggtagggtgcgggaccggggggacctggaggcagaggggagaaccggccgtccgcgccgcagcacagccgctgggagcgcctcagaccccgcgcggggcgccggctccatggcgaccgggctcggggagccggtctatggactttccgaagacgagggagagtcccgtattctcagagtaaaagttgtttctggaattgatctcgccaaaaaggacatctttggagccagtgatccgtatgtgaaactttcattgtacgtagcggatgagaatagagaacttgctttggtccagacaaaaacaattaaaaagacactgaacccaaaatggaatgaagaattttatttcagggtaaacccatctaatcacagactcctatttgaagtatttgacgaaaatagactgacacgagacgacttcctgggccaggtggacgtgccccttagtcaccttccgacagaagatccaaccatggagcgaccctatacatttaaggactttctcctcagaccaagaagtcataagtctcgagttaagggatttttgcgattgaaaatggcctatatgccaaaaaatggaggtcaagatgaagaaaacagtgaccagagggatgacatggagcatggatgggaagttgttgactcaaatgactcggcttctcagcaccaagaggaacttcctcctcctcctctgcctcccgggtgggaagaaaaagtggacaatttaggccgaacttactatgtcaaccacaacaaccggaccactcagtggcacagaccaagcctgatggacgtgtcctcggagtcggacaataacatcagacagatcaaccaggaggcagcacaccggcgcttccgctcccgcaggcacatcagcgaagacttggagcccgagccctcggagggcggggatgtccccgagccttgggagaccatttcagaggaagtgaatatcgctggagactctctcggtctggctctgcccccaccaccggcctccccaggatctcggaccagccctcaggagctgtcagaggaactaagcagaaggcttcagatcactccagactccaatggggaacagttcagctctttgattcaaagagaaccctcctcaaggttgaggtcatgcagtgtcaccgacgcagttgcagaacagggccatctaccaccgccatcagtggcctatgtacataccacgccgggtctgccttcaggctgggaagaaagaaaagatgctaaggggcgcacatactatgtcaatcataacaatcgaaccacaacttggactcgacctatcatgcagcttgcagaagatggtgcgtccggatcagccacaaacagtaacaaccatctaatcgagcctcagatccgccggcctcgtagcctcagctcgccaacagtaactttatctgccccgctggagggtgccaaggactcacccgtacgtcgggctgtgaaagacaccctttccaacccacagtccccacagccatcaccttacaactcccccaaaccacaacacaaagtcacacagagcttcttgccacccggctgggaaatgaggatagcgccaaacggccggcccttcttcattgatcataacacaaagactacaacctgggaagatccacgtttgaaatttccagtacatatgcggtcaaagacatctttaaaccccaatgaccttggcccccttcctcctggctgggaagaaagaattcacttggatggccgaacgttttatattgatcataatagcaaaattactcagtgggaagacccaagactgcagaacccagctattactggtccggctgtcccttactccagagaatttaagcagaaatatgactacttcaggaagaaattaaagaaacctgctgatatccccaataggtttgaaatgaaacttcacagaaataacatatttgaagagtcctatcggagaattatgtccgtgaaaagaccagatgtcctaaaagctagactgtggattgagtttgaatcagagaaaggtcttgactatgggggtgtggccagagaatggttcttcttactgtccaaagagatgttcaacccctactacggcctctttgagtactctgccacggacaactacacccttcagatcaaccctaattcaggcctctgtaatgaggatcatttgtcctacttcacttttattggaagagttgctggtctggccgtatttcatgggaagctcttagatggtttcttcattagaccattttacaagatgatgttgggaaagcagataaccctgaatgacatggaatctgtggatagtgaatattacaactctttgaaatggatcctggagaatgaccctactgagctggacctcatgttctgcatagacgaagaaaactttggacagacatatcaagtggatttgaagcccaatgggtcagaaataatggtcacaaatgaaaacaaaagggaatatatcgacttagtcatccagtggagatttgtgaacagggtccagaagcagatgaacgccttcttggagggattcacagaactacttcctattgatttgattaaaatttttgacgaaaatgagctggagttgctcatgtgcggcctcggtgatgtggatgtgaatgactggagacagcattctatttacaagaacggctactgcccaaaccaccccgtcattcagtggttctggaaggctgtgctactcatggacgccgaaaagcgtatccggttactgcagtttgtcacagggacatcgcgagtacctatgaatggatttgccgaactttatggttccaatggtcctcagctgtttacaatagagcaatggggcagtcctgagaaactgcccagagctcacacatgctttaatcgccttgacttacctccatatgaaacctttgaagatttacgagagaaacttctcatggccgtggaaaatgctcaaggatttgaaggggtggattaagcaccctgtgcctcgggggtggttgttcttcaagcaagttctgcttgcacttttgcatttgcctaacagacttttgcagaggcgatggcagagagcagctgcaggcatggtccctggagccgagccttcaccacgcactcgtccaagttcggatgcgggaacctggtcccagcttgagttcctgcctttcccaccacaaattatcaactggttgatgtgtacactaattacatttcaggaggacttaatgctatttatgttgtgcctctgcaggcaaagcccttaataaatattttacatcctttctaatgacaatgaatggaattaatcactcaacaggtatagtattacgactcatgtttactttttaaaatgatttagaccgattttcagattttatttcgttatgattaaagatgtctcatgtacttggaaaagtgagcatttttttttttttttgtatttcactttcataccaggcttaatgtcaatgacatttttatttttgaagtactctgacacctccaccctctactttattagaattggaaggcaaatttttgtccaaaaacctacagacaagtactttgagagaatttccaatataatattagacataatgataattttttccatactcagaatgaaaaactggatattacgtttttgttttggggtttttttgtacaaatttagctaatagctacaggctgagagaattgtaacatagcatgacaaattttgtgttgacttgaaaggaatcacaccattattccttagaagtaattacatgtgttctaacacatttgagacagggttggactcccatttctcatccgagaaattacttaacccttcctggcgctgtacagtcatcttttattctatttcctctttgctgtttgtagtagagacattttgaatgaaacttggcactgcttgattcaaaactgtggaaaccagatctgtttagtctcctgtttgtatgcgtttgctaatggtagctaaataaccagtttttgttgtaaatgcaccaattctgaaggcactttatgtactacatggaggtcatatctggttttgtttttatttttttatcatgaacattaaatgtgatgatgatttcttttccctgcacacatctttccggtgcaatatctatcaattgtgaatctggctgctggtgtataaaaacctggatgtaaagctgagcctacagacctgtcctcaccaactgttttgtgatttctactcaactacaaagatttatttaatgtactcttaatctaactgagttttgttaccaatgacctgttgcatgcttcaataccgtgtactgcctgagttgtgcctcttgtgtgctagattaaaagtgagacagagacttgacttgatcctctgagctcaagctattgagctggtagtggcagaggactgagggtacctgcacagtttgattcttttccacgtgtaagtctccattgcagaattgtcgtgctttgagaaaacacctgaggcagtgtgggagttgaacgaccctgctgtcctttttaacctgtgttgtcctagaccctgtcggggcagtcaggggacactagagatttgatctcatgcgagtcatcaataggacaaaaaagttgtggtttggggaggtctgtttgttacataaaaaggacctttcggtgtaagaaattgccgtttttaccctgccctggctggcatgtgagaagccatggaaggttgtggttgtaaatgagttgtctaaaggggtgcagaggcctgaggtttctaaaagaaggtagatttctacagagctgagtgttggttcctttttcttattggttgaaaattacctggtagtgatcagaaaacttagatgctatgtaact

SEQ ID NO: 1871 - protein, 955 aa, Homo sapiens
MATGLGEPVYGLSEDEGESRILRVKVVSGIDLAKKDIFGASDPYVKLSLYVADENRELALVQTKTIKKTLNPKWNEEFYFRVNPSNHRLLFEVFDENRLTRDDFLGQVDVPLSHLPTEDPTMERPYTFKDFLLRPRSHKSRVKGFLRLKMAYMPKNGGQDEENSDQRDDMEHGWEVVDSNDSASQHQEELPPPPLPPGWEEKVDNLGRTYYVNHNNRTTQWHRPSLMDVSSESDNNIRQINQEAAHRRFRSRRHISEDLEPEPSEGGDVPEPWETISEEVNIAGDSLGLALPPPPASPGSRTSPQELSEELSRRLQITPDSNGEQFSSLIQREPSSRLRSCSVTDAVAEQGHLPPPSVAYVHTTPGLPSGWEERKDAKGRTYYVNHNNRTTTWTRPIMQLAEDGASGSATNSNNHLIEPQIRRPRSLSSPTVTLSAPLEGAKDSPVRRAVKDTLSNPQSPQPSPYNSPKPQHKVTQSFLPPGWEMRIAPNGRPFFIDHNTKTTTWEDPRLKFPVHMRSKTSLNPNDLGPLPPGWEERIHLDGRTFYIDHNSKITQWEDPRLQNPAITGPAVPYSREFKQKYDYFRKKLKKPADIPNRFEMKLHRNNIFEESYRRIMSVKRPDVLKARLWIEFESEKGLDYGGVAREWFFLLSKEMFNPYYGLFEYSATDNYTLQINPNSGLCNEDHLSYFTFIGRVAGLAVFHGKLLDGFFIRPFYKMMLGKQITLNDMESVDSEYYNSLKWILENDPTELDLMFCIDEENFGQTYQVDLKPNGSEIMVTNENKREYIDLVIQWRFVNRVQKQMNAFLEGFTELLPIDLIKIFDENELELLMCGLGDVDVNDWRQHSIYKNGYCPNHPVIQWFWKAVLLMDAEKRIRLLQFVTGTSRVPMNGFAELYGSNGPQLFTIEQWGSPEKLPRAHTCFNRLDLPPYETFEDLREKLLMAVENAQGFEGVD

SEQ ID NO: 1872 - DNA, 3233 bp, Homo sapiens
gccgggagcttccctgatggtgccgccgcctccgagccggggaggagctgccaggggccagctgggcaggagcctgggtccgctgctgctgctcctggcgttgggacacacgtggacctacagagaggagccggaggacggcgacagagaaatctgctcagagagcaaaatcgcgacgactaaatacccgtgtctgaagtcttcaggcgagctcaccacatgctacaggaaaaagtgctgcaaaggatataaatttgttcttggacaatgcatcccagaagattacgacgtttgtgccgaggctccctgtgaacagcagtgcacggacaactttggccgagtgctgtgtacttgttatccgggataccgatatgaccgggagagacaccggaagcgggagaagccatactgtctggatattgatgagtgtgccagcagcaatgggacgctgtgtgcccacatctgcatcaataccttgggcagctaccgctgcgagtgccgggaaggctacatccgggaagatgatgggaagacatgtaccaggggagacaaatatcccaatgacactggccatgagaagtctgagaacatggtgaaagccggaacttgctgtgccacatgcaaggagttctaccagatgaagcagaccgtgctgcagctgaagcaaaagattgctctgctccccaacaatgcagctgacctgggcaagtatatcactggtgacaaggtgctggcctcaaacacctaccttccaggacctcctggcctgcctgggggccagggccctcccggctcaccaggaccaaagggaagcccaggcttccccggtatgccaggccctcctgggcagcccggcccacggggctcaatgggacccatgggaccatctcctgatctgtcccacattaagcaaggccggaggggccctgtgggtccaccaggggcaccaggaagagatggttctaagggggagagaggagcgcctgggcccagagggtctccaggaccccctggttctttcgacttcctgctacttatgctggctgacatccgcaatgacatcactgagctgcaggaaaaggtgttcgggcaccggactcactcttcagcagaggagttccctttacctcaggaatttcccagctacccagaagccatggacctgggctctggagatgaccatccaagaagaactgagacaagagacttgagagcccccagagacttctacccatagcacatcccaacaccgtcacgccaaaggaagagaaagatcaactcacctgcagttaaaccatctaaagagaagaaagaccactggagacctagaaaacatacatttttctcttctcttctcctgacgtctctccactcctcttcttccaaatacgatgctattttcagagtcccctcctaggcctgcagacatgagggagtgaatgattgatttacctgcttctcactaagagtccattggggtggtttgcattgtaacttttcttttacatcctatttttccaggaactttggatttaagtactctcacagtgtcttaaatcataaattcttgaagttaaatttggcagagtatcaaaagggggaaaatgacaaagtgagctctaagaaaatgtgaggctacttctaagatgtgtgttcacaatagaccataactcctctagtatcaaaattggggctcttcagttaaaaaggggtggggaggacaaacgtgtcgatgtgctttggtggagaattttttccttgtgcttctagtagactttaaatattgtatccctttgtcaaaccttgtttcccaaattcaattaaagagaggagagaattgaatggcgtttagagaagatagaaaagaatcacagtcatatatttactgttatatagattgccacattctaaaattcaaatacggtgcttaaggtttcatgccatgcttatctgtaagtatcctatttagggaagaagattaaactctcttttcaaaaaaacaaagtgaaatgcctggattcacattaaaacaatgggctctcgtttgctataatattttaaagctgtttaatcaacagtggagtctgctctataaatatagattatttgttcaataaactggctgagcttagagagaggtgcagaattcctggttctgagcaggtgcccagaaggtaccattaggtgccatgatccaggctgaaccaatatacagtggggctgaagtctgcaaggaggttgctggcttgggctgacctcactaatgccatcagcagcggtaggtaaattttttctccttgggtattacaagtttttgtctggagccaaccaagcttgccaccaacatattgagagtaatacactattgaaagttatcttggatggggagaaaaaaaaatagtggttttccttgtttgcaaaaacttccttcctattctcattttttcttaattttctttaatttagtccaagttccagttcttttaggccttctctttgatttattttcccctgcatgtgagaagcagttcagaaaaaggtctatatctccacctcctagtgagttagagtgttttctcagagcacctctgggtggcaaagggaagcatgttcctgccaaggtttgctgtggattcagaagcaccaggagcaagagaccagaaggatgatctgctcctttgtaacgttgttgagggccctcttgtttccaatgagcagcttataggttactcacagtccactttctcactggacacacaaagtggctctttatctacctttgcgggagattttcactctcctgcaaatgatcgttctcacactcatattagctcatgttggaatttcccatcctgccatgtcctttcccatttctttttggcttttttgcctccaccttttagcccacatcatttaactccactactgtgaaagcttgcttaaagaaaatccctcttggccgggtgtggtagcccacgcctctaatcccagcactttgggaggctgaggcggggagatcacaaggtcaggagatcgagaccagcctgaccaacatggtgaaaccctgtctctactaaaaatacaaaaattagctgggcgtgttggcacacacctgtaatcccagctactcaggaggctgaggcaggagaattactttaacctgcggggggagcctagattgcgctactgcactccagcctaggcaacagagggagactctgtctcattaaaaa

SEQ ID NO: 1873 - protein, 406 aa, Homo sapiens
MVPPPPSRGGAARGQLGRSLGPLLLLLALGHTWTYREEPEDGDREICSESKIATTKYPCLKSSGELTTCYRKKCCKGYKFVLGQCIPEDYDVCAEAPCEQQCTDNFGRVLCTCYPGYRYDRERHRKREKPYCLDIDECASSNGTLCAHICINTLGSYRCECREGYIREDDGKTCTRGDKYPNDTGHEKSENMVKAGTCCATCKEFYQMKQTVLQLKQKIALLPNNAADLGKYITGDKVLASNTYLPGPPGLPGGQGPPGSPGPKGSPGFPGMPGPPGQPGPRGSMGPMGPSPDLSHIKQGRRGPVGPPGAPGRDGSKGERGAPGPRGSPGPPGSFDFLLLMLADIRNDITELQEKVFGHRTHSSAEEFPLPQEFPSYPEAMDLGSGDDHPRRTETRDLRAPRDFYP

SEQ ID NO: 1874 - DNA, 1638 bp, Homo sapiens
atggcaacctcctctgaagaagttttgctgattgtaaagaaagtgcgtcaaaagaagcaggatggagctctatacctcatggcagaaagaattgcttgggcacctgaaggcaaaaatagatttacagtcagccgtatgtatgtagatgttaaatgtcagaaaattagtccagaaggcaaagctacaattcagcatcagctggacctacatgaaggagatacaattaacttccgttttcccagtgaaaacacagcagtgaaagagcaagatgcagtaaaggaccttcagcagctgcttcccaaattcaagaggaaagcaaataaagaactggaagagaagaacagaatgctgcaagaagatcctgttttgtttcagctttataaagatcttgttgtgagccaagtgatgagtgctgaggaattctgggccaatcatttaaatgggaatgcaacagaaaattcttccacatccaatcataagcaggatgttggcatttctgctgcatatctggctgatgtctggcccgaaaccgatggctgtaacggtctgaaatataatttaacttctgatatcattgagttcatatttaggacctatccagcagtgaaaatgaaatatgcagaaagtgttccccacaacatgacagagaagggattctggacacgttttttccagtcccattattttcacagggattggctgaatacagggtcaaaggatctctctgcagaatgtgccaaaatagatgaaaaaggccttaaaacaatggtttcattaggagtgaaaaacccactactagaattaacagctttgggaaataagccattagatgagggctatggcatttcctctgtgccatctgcttccaattctaaatccatagaagagaatagtaatgctgccatcaagagatttaaccatcacagtgccatggtcctggcagctggactcaggaaacaagaagcagaaaatgagcaaaatagcccagcagcatggatggaaattccagagatgcagactgctttcagccagtagtcaaaagggcgaaatcgcaagagtccagtgaatatgaagacttggggaaagataattctataaaaatgattgcactaaacctcaagaagtcaggtaggtattatcatggtctaactccagtctagtcactacagtatgcaacaataaggacattattcttttcaaagtattgggcaagaaatggaagcttatatacccaagttaattgaggttctcttgagtagtgctgccagtagtaccatcatagcactgtcacctgcaggggaccttatgcagggaggaacacagcaaaccataaaccagatggtgccaagtgatattcagtctgaattgaaacacttgtatgtagctgttggagaacttctatggcatttctggtcctactttcctgttaatacaccattcctagaagaaagggtagtgaaaatgaaaagtaatttggaacgattccaagttaagaagatctgcccattccaagaaaagattcggaggcagtatttaagcacacatttggtaagtcacatagagatactccaggcagcctacaagctccacacatggcaattatggtgtctgatgaaagaaaatgtgaggtggctatga

SEQ ID NO: 1875 - DNA, 2603 bp, Homo sapiens
ccacgcgtccgcgctcccctcagctcctgcagtgctaattaagggagggagcagcggggagcttgcagtgaccaagagggtgttgaggctaggaggccacgataaacaggatacgataaaagtccttaaccaagacgcagatgggaagaagcgttagagcgagcagcactcacatctcaagaaccagcctttcaaacagtttccagagatggattatcctactttacttttggctcttcttcatgtatacagagctctatgtgaagaggtgctttggcatacatcagttccctttgccgagaacatgtctctagaatgtgtgtatccatcaatgggcatcttaacacaggtggagtggttcaagatcgggacccagcaggattccatagccattttcagccctactcatggcatggtcataaggaagccctatgctgagagggtttactttttgaattcaacgatggcttccaataacatgactcttttctttcggaatgcctctgaagatgatgttggctactattcctgctctctttacacttacccacagggaacttggcagaaggtgatacaggtggttcagtcagatagttttgaggcagctgtgccatcaaatagccacattgtttcggaacctggaaagaatgtcacactcacttgtcagcctcagatgacgtggcctgtgcaggcagtgaggtgggaaaagatccagccccgtcagatcgacctcttaacttactgcaacttggtccatggcagaaatttcacctccaagttcccaagacaaatagtgagcaactgcagccacggaaggtggagcgtcatcgtcatccccgatgtcacagtctcagactcggggctttaccgctgctacttgcaggccagcgcaggagaaaacgaaaccttcgtgatgagattgactgtagccgagggtaaaaccgataaccaatataccctctttgtggctggagggacagttttattgttgttgtttgttatctcaattaccaccatcattgtcattttccttaacagaaggagaaggagagagagaagagatctatttacagagtcctgggatacacagaaggcacccaataactatagaagtcccatctctaccggtcaacctaccaatcaatccatggatgatacaagagaggatatttatgtcaactatccaaccttctctcgcagaccaaagactagagtttaagcttattcttgacatgagtgcattagtaatgactcttatgtactcatgcatggatctttatgcaatttttttccactacccaaggtctaccttagatactagttgtctgaattgagttactttgataggaaaaatacttcattacctaaaatcatttttcatagaactgtttcagaaaacctgactctaactggtttatatacaaaagaaaacttactgtatcatataacagaatgatccaggggagattaagctttgggcaagggctatttaccagggcttaaatgttgtgtctagaattaagtatgggcataaactggcttctgaatccctttccagagtgttggatccatttccctggtcttggcctcactctcatgcaggctttcctcttgtgttggcaagatggctgccaactcttggcaattcatacatccttgtttctgtctggtagagagtttgcttctcaaatggagcaaacaaatttgattattttttcattgttaaataggcaacatgaccagaaaggatggaatggcttaagtaaactaagggttcacttctagagctgagaagcagggtcaaagcacaatactgggcaattcagagcatggttagaagaggaaaggggagtctcaaagctggagagtttaccaacaaatattgactgcagtgattaaccaagacatttttgttaactaaaaagtgaaatatgggatggattctagaaatggggtatctctgtccatacttctagaatccactctatcagcatagtccagaagaatacctggcagtagaagaaatgaatattcaagaggaagataaatgcgagagggcaatcctttactattctcatatttatttatctctcattctgtatagaattcttgccgccatcccaggtctagccttaggagcaaatgtagtagatagtcgaataataaataacttaatgttttggacatattttgtctacttttgagaattatttttaatatgtaaattctctcaaaagggtcaggcacctagttattattttttaatgattatgtgaaagttgaatataatataccactaaaagtgacagttgaaagtggtggcataggatggtagggtagaaatttgggagggaaaaaagaaattgggagggtacaggcaacaggagaaaggaatcaaaccacagaaaaatacaaagggaaacttctgcttcactattcagacaaagacagccctaatgacatcaccaacagtcaaagcaattagagaccatacctaatattgtttaaattctagatgtaggctaacaatgaaaagtatttgccaaactgaataaaactgtcatggttaccttgaaaaaaaaaaaaaaaaaaaaaaaaaaaaa

SEQ ID NO: 1876 - protein, 336 aa, Homo sapiens
MDYPTLLLALLHVYRALCEEVLWHTSVPFAENMSLECVYPSMGILTQVEWFKIGTQQDSIAIFSPTHGMVIRKPYAERVYFLNSTMASNNMTLFFRNASEDDVGYYSCSLYTYPQGTWQKVIQVVQSDSFEAAVPSNSHIVSEPGKNVTLTCQPQMTWPVQAVRWEKIQPRQIDLLTYCNLVHGRNFTSKFPRQIVSNCSHGRWSVIVIPDVTVSDSGLYRCYLQASAGENETFVMRLTVAEGKTDNQYTLFVAGGTVLLLLFVISITTIIVIFLNRRRRRERRDLFTESWDTQKAPNNYRSPISTGQPTNQSMDDTREDIYVNYPTFSRRPKTRV

SEQ ID NO: 1877 - DNA, 1441 bp, Homo sapiens
atcggccagaaaggccacctgcgccagcacctcctgagaccggccttcaaagacacgacgcatgccgctctgccgtccggagcacttaatgcctagagccagcagggtcccagtggccgcgtcactgcctctgagccacgcggtcattccaactcaactgccctcgcgttctggccacaggccccctgggagaccccggagatgcccaaaggcctcatgcctgccgcctccagtgggacctagcagcacacagacagcgaagcgggtgaccatggggtggccacggccgggccaagccctcgtggcagtcaaagccttgctggtcttgtcgctgctccaggtgcccgcgcaggcggtggtacgggccgtgctggaagacaactcgagctcggtggactttgcggatctgccggcgctgttcggcgtccccctggcccccgagggcatacggggctacctgatggaggtcaagccagccaacgcgtgccatcccatcgaggccccgcgactgggcaaccgctctctgggctccatcgcgctgatccgccactacgactgcaccttcgacctcaaggtgctgaacgcccagcgcgccggcttcgaggcggccatcgtgcacaacgtccactccgacgacctcgtgagcatgacccacgtctacgaggacttgaggggccagatcgccatcccctcagtgttcgtgagcgaggccgcctcgcaggacctgcgggtcatcctgggctgcaacaagtcggcccacgcgctgctcctgcccgacgacccaccgtgccacgacctgggctgtcaccccgtgctgaccgtgtcctgggtgctgggctgtaccctggccctggtcgtatcagccttctttgtcctgaaccacctgtggctctgggcccaggcctgctgcagccacagacggccggtgaagacgtctacctgccagaaggcccaggtccgcaccttcacgtggcacaacgacctgtgtgccatctgcctggatgagtacgaggagggcgaccaactcaagatcctgccctgctcccacacctaccactgcaaatgcattgacccctggttctcccaagccccccggcgctcctgccccgtgtgcaaacagtcggtggccgccacagaagacagctttgactccaccacctacagcttcagggacgaggacccctccctaccgggccaccggccccccatctgggccattcaagtccagctacgctcccggaggctggagctgctgggccgcgccagtccccactgccactgcagcaccacgtccctggaggcagagtataccactgtctcctcagcccctcctgaggcccctggtcagtaaagatctagggcagggaggggggtgcaatgaggaatgtttctggtctgaaaagaataaagtgggtttgaaagcggaaaaaaaaaaaaaaaa

SEQ ID NO: 1878 - protein, 429 aa, Homo sapiens
MPLCRPEHLMPRASRVPVAASLPLSHAVIPTQLPSRSGHRPPGRPRRCPKASCLPPPVGPSSTQTAKRVTMGWPRPGQALVAVKALLVLSLLQVPAQAVVRAVLEDNSSSVDFADLPALFGVPLAPEGIRGYLMEVKPANACHPIEAPRLGNRSLGSIALIRHYDCTFDLKVLNAQRAGFEAAIVHNVHSDDLVSMTHVYEDLRGQIAIPSVFVSEAASQDLRVILGCNKSAHALLLPDDPPCHDLGCHPVLTVSWVLGCTLALVVSAFFVLNHLWLWAQACCSHRRPVKTSTCQKAQVRTFTWHNDLCAICLDEYEEGDQLKILPCSHTYHCKCIDPWFSQAPRRSCPVCKQSVAATEDSFDSTTYSFRDEDPSLPGHRPPIWAIQVQLRSRRLELLGRASPHCHCSTTSLEAEYTTVSSAPPEAPGQ

SEQ ID NO: 1879 - DNA, 2360 bp, Homo sapiens
agcagacagagagaggaggttgtctgggacagactgctcctgacagaaggatgtcccagctgagcctgtcctggctgggcctctggccagtggcagcatccccttggctgctcctcctgctggtcggggcctcctggctcctggcccatgtcctggcctggacctacgccttctatgacaactgccgccgccttcggtgtttcccacaacccccaagacggaactggttttggggacaccagggcatggtcaaccccacagaggagggcatgagagttctgactcagctggtggccacctacccccagggctttaaggtctggatgggacccatctcccccctcctcagtttgtgccaccccgacatcatccggtctgtcatcaacgcctcagctgccattgcaccaaaggacaagttcttctacagcttcctggagccctggctgggggatgggctcctgctgagtgctggtgacaagtggagccgccaccgtcggatgctgacgcctgccttccatttcaacatcctgaagccctatatgaagattttcaatgagagtgtgaacatcatgcacgccaagtggcagctcctggcctcagagggtagtgcctgtttggatatgtttgagcacatcagcctcatgaccttggacagtctacagaaatgtgtcttcagctttgacagccattgtcaggagaaacccagtgaatatattgccgccatcttggagctcagtgcccttgtatcaaaaagacaccatgagatcctcctgcatattgacttcctgtattatctcacccctgatgggcagcgtttccgcagggcctgccgcctggtgcacgacttcacagatgccgtcatccaggagcggcgccgcactctccctagccagggtgttgatgacttcctccaagccaaggccaaatccaagactttggacttcattgatgtactcctgctgagcaaggatgaagacgggaagaagttatctgatgaggacataagagcagaagctgacacctttatgtttgagggccatgacaccacggccagtggtctctcctgggtcctgtaccaccttgcaaagcacccagaataccaggagcgctgccggcaggaggtgcaagaacttctgaaggaccgtgagcctaaagagattgaatgggacgacctggcccatttgcccttcctgaccatgtgcatgaaggagagcctgcggctgcatcccccagtcccggtcatctcccgccatgtcacccaggacattgtgctcccagacggccgggtcatccccaaaggcattatctgcctcatcagtgttttcggaacccatcacaacccagctgtgtggccggaccctgaggtctacgacccctttcgctttgacccagagaacatcaaggagaggtcacctctggcttttattcccttctcggcagggcccaggaactgcatcgggcagacgttcgcgatggcggagatgaaggtggtcctggcgctcacgctgctgcgcttccgcgtcctgcctgaccacaccgagccccgcaggaagccggagctggtcctgcgcgcagagggcggactttggctgcgggtggagcccctgagctgagttctgcagagacccactctgaccccactaaaatgacccctgattcatcaaaagtgaagcctagaattaccctaagaccctgttccacagtcctgtattccatcctagatatctactcaaaataattgagacaagtgttcaaacagaaagacgcttgtgcgtgaatgttcatggcggccctattcacagtagccaaacgatgaaaacaaccccaagctatatattaccagatgaaaggataaacaaaatgtggtccatccatacaatggagtattacacagccataaaaaggaatgaagcagtgatccctactacactgtggatgaaccttgaatgcatgatactgaatgaaagacgtcagatgcaaaaggtcacatagtgtactgtccttttatacgaaatttccagaacaggccaatctgaagagatgcatagcggattggtggctttcagcagctgtggggaggtgggactgaggagcgactgctaatcagtatggggtttcctcccgggatggtgaaaatgttccggacctagatactgacgaaggtagcacgacactgtgagtgcactaaatgctattgaattggacactttgaaatggtgaatttcgtggtatgtgaattctacctcaatcaaaaaaatttgctattttatctcacatacattttttttctgtccaggttgttcatataataatatgctgtgagcatctttccatgacattaaatcatcttaggaaacatt

SEQ ID NO: 1880 - protein, 520 aa, Homo sapiens
MSQLSLSWLGLWPVAASPWLLLLLVGASWLLAHVLAWTYAFYDNCRRLRCFPQPPRRNWFWGHQGMVNPTEEGMRVLTQLVATYPQGFKVWMGPISPLLSLCHPDIIRSVINASAAIAPKDKFFYSFLEPWLGDGLLLSAGDKWSRHRRMLTPAFHFNILKPYMKIFNESVNIMHAKWQLLASEGSACLDMFEHISLMTLDSLQKCVFSFDSHCQEKPSEYIAAILELSALVSKRHHEILLHIDFLYYLTPDGQRFRRACRLVHDFTDAVIQERRRTLPSQGVDDFLQAKAKSKTLDFIDVLLLSKDEDGKKLSDEDIRAEADTFMFEGHDTTASGLSWVLYHLAKHPEYQERCRQEVQELLKDREPKEIEWDDLAHLPFLTMCMKESLRLHPPVPVISRHVTQDIVLPDGRVIPKGIICLISVFGTHHNPAVWPDPEVYDPFRFDPENIKERSPLAFIPFSAGPRNCIGQTFAMAEMKVVLALTLLRFRVLPDHTEPRRKPELVLRAEGGLWLRVEPLS

SEQ ID NO: 1881 - DNA, 984 bp, Homo sapiens
tctgcttctgtctttcaaaagacatggaagaaaattggtataattccttccttaaatgtttagtagatgcaacggcctacagcattatgctgccctgggccgcgacagcgtgggcgccgcctcagtcaacctggagccctcggatgtgccgcaggacgtgtacagcggcgtggccgcgcaggtggaggtgttccgtaggcaggacgcccagcggggcatgcgggtggcacaggtgctggaagccttcatcacccgcaaggtggtgaagcagacagtgatgaccgtggtgtacggggtcacccgctacggtgggcgcctgcagattgagaagcgcctccgggagctgaacgactttccccaggagttcgtgtgggaggcctcccactacctcgtacgccaggtcttcaggagtctacaggagatgttctcggggacccgggccatccagcactggctgatcgagagcgcccacctcgtctcccacacgggctctgtggtggagtgggtcacccccctgggcgtccccatcatccagccgtatcgcctggagtccaaggtcaagcaatcaggaggtggaattcagagcatcacttacacccacaacagagacatcagccggaagcccaacacacctaagcagaagaacggcttccggcccaacttcatccactcgctggactcctcacacatgatgctcaccaccctgcactgctacaggaagggcctgaccttcgtctctgtgcacgactgttaccggacccatgcagctgatgtctccatcatgaaccaggtgtgccgggagcagtttgcttgcacagcgagtccatcctgcaggacctgtccaggttcctggtcaggcggttctgctctgagccccagaagatcttggaggccagccagatgaaggagacactgcaggtggtgcccaagccaggggccttcgacctggagctggtgaagcgttccacctacttcttcagctga

SEQ ID NO: 1882 - DNA, 1245 bp, Homo sapiens
atggcaagagagccaccatccccgctccgggtcgaggcgccgggtcccccagaaatgcggaccccaccggcgatcgaggccacccctaagggcaccctgcagccggcaggcggcagactccgcttcctcagtggctgtgtgcccatcttgcatcaggtggccgggcacaggtatgggaaggacaaaatgggtatactgcaacatccagatggcacagttttgaaacagttacaaccacctccaaggggcccaagagagctggaattctataatatggtttatgctgctgactgtaccgatggtgttcttctagagctacgacaatatttgccaaaatattatggcatctggccacctcccgctgccccaaacgatttatacctaaaactggaaaatgtgacccataaatttaataagccctgtataatggatgtaaagacagggcaaaaaagctatgatcctttttgcctcatctgagaaaattcagcaataggtcagcaaggacccattaatggaagagattgggttcttggtgcttggcatgagggtttatcttgttcattcccatagctatgagacacaaaccaacattatggaagaagcttaacaaaagaagctataaaggatggagtcttcggattttttcataatgggtactgcttaataaaagatgctgttgctgccattattcagaagactgagaaaattctgcagtggtttgaaaaccagaagcagcttaacttttacgcaagttcattactgtttctttaggaaggttcatctcagccaatcactacaaaactgaatgacagaaatttggcagaaaagtttttgtccaaaggacaactgtcagacacagaagtactagagtgcaataataactttcatgtattaacttccacagtgaatggaaaaatagaggcttcagtaggcaaaagcttgtccaagatgtatgcccatcacaggaaaatgtatacaaaaaagtatcacagtcagacttcattgaaagttgaaaatctagagcaagacaatgggtggaaaagcatgtcacaggaacatttaaatggaaatgtactttcccaactggaaaaagttgtctaccatcttcccactggttgccaagagactgctgaagtgtgcatgatagatatggctgatatgttccttagcaacacagtagataagggatatgtttatgggctaaagcatttaatttctgtacttcgaagtattttagacaattga

SEQ ID NO: 1883 - DNA, 3044 bp, Homo sapiens
atctgcctccagcactgcccatccttgcccctttccactgtccttggagcttcctgggcccttccctgggcctcaggatcccaccctccatcccgtctgccctgcaggatgccgcagctgagcctgtcctggctgggcctcgggcccgtggcagcatccccgtggctgcttctgctgctggttgggggctcctggctcctggcccgcgtcctggcctggacctacaccttctatgacaactgccgccgcctccagtgttttcctcaacccccgaaacagaactggttttggggacaccagggcctggtcactcccacggaagagggcatgaagacattgacccagctggtgaccacatatccccagggctttaagttgtggctgggtcctaccttccccctcctcattttatgccaccctgacattatccggcctatcaccagtgcctcagctgctgtcgcacccaaggatatgattttctatggcttcctgaagccctggctgggggatgggctcctgctgagtggtggtgacaagtggagccgccaccgtcggatgttgacgcctgccttccatttcaacatcttgaagccttatatgaagattttcaacaagagtgtgaacatcatgcacgacaagtggcagcgcctggcctcagagggcagcgccagactggacatgtttgaacacatcagcctcatgaccttggacagtctgcagaaatgtgtcttcagctttgaaagcaattgtcaggagaagcccagtgaatatattgccgccatcttggagctcagtgcctttgtagaaaagagaaaccagcagattctcttgcacacggacttcctgtattatctcactcctgatgggcagcgcttccgcagggcctgccacctggtgcacgacttcacagatgccgtcatccaggagcggcgccgcaccctccccactcagggtattgatgatttcctcaagaacaaggcaaagtccaagactttagacttcattgatgtgcttctgctgagcaaggatgaagatgggaaggaattgtctgatgaggacataagagcagaagctgacaccttcatgtttgagggccatgacactacagccagtggtctctcctgggtcctataccaccttgcaaagcacccagaataccaggaacagtgccggcaagaagtgcaagagcttctgaaggaccgtgaacctatagagattgaatgggacgacctggcccagctgcccttcctgaccatgtgcattaaggagagcctgcggttgcatcccccagtcccggtcatctcccgatgttgcacgcaggactttgtgctcccagacggccgcgtcatccccaaaggcattgtctgcctcatcaatattatcgggatccattacaacccaactgtgtggccagaccctgaggtctacgaccccttccgtttcgaccaagagaacatcaaggagaggtcacctctggcttttattcccttctcggcagggcccagaaactgcatcgggcaggcgttcgccatggctgagatgaaggtggtcctggcgctcaccctgctgcacttccgcatcctgccgacccacactgaaccccgcaggaaacccgagctgatattgcgcgcagagggtggactttggctgcgggtggagcccctgggtgcgaactcacagtgactgtcctacccacccacccacctctgtagagtcccagaaacaaaactatgctgacacctctgcttgagcctcgttgacagccagcatggggctcctggggactggtgggatctaagaaagggaggtgagtgggtggaggcagggtgacgtctctgaacccaaaaccctgacggcctctctggctgagcacagggcatctaggcccttagtgggttctcccagagcccaagtaaaaactttatcctgtgggcagtagggagccctgggaggtgtttgagcaggagagggaacaggattaagaatgggtttaaggagcaagactgagactctgattcagcgagaaacaaccataggggcagatcccttcatctgtcctgggaatgtcctcccaagactggagtcctcagctcagaacaaagggaaaggggtgcagcttccaccctggcaggctctcagaaatttttagttcctttttccaccaacttcccacccctgtttctccccctcccagtgcgttctctctgtgactctcttcccttactttcagaggcataggatctggagccagactgcttgggctcaagtcctggctctgctgcgtgacttgagcaagttaattcctctctctgtgcctcggttccctcaaccatataatggagacaacagcattacctatatcagggttttcctgaggtctcaatataagggactcagagctgtgcctggcacacaatgaatgctaaatatatggagccattattatttcctgtctcagaaagtctggctgttaaagaatgttgtctttcaagatcgttatttctaccacgactttaaaggctgtgttttggaactcaaaggcaaaaattctaatatctgtgctccttgaacaacctcttctcctagagggctgtgcatataagatatgtatatatatatatatattatatatatatatatatacacacacacacacacacacacacacatatatacatatacacacacacacacacacacacacacacacacacacatatatatatatatatatttttttttttttcctgaggatggtgaaggtacctgactgtgtgaggtggtaggagaatgagagaaacctcagtcagtgtctcaaaataaaatcctgctacaaacattgatctcttttcatagcctaagggatgttgcatcgctaaaccctgttgacttctctaatctcttctgtagctgatctccttcccttgctacactcggttactctggccttgattctgatctccaaatacattatattttttatttgggaccatcgtattgcctttgcacctttatcaaatataagttgcctatatttatttgga

SEQ ID NO: 1884 - protein, 524 aa, Homo sapiens
MPQLSLSWLGLGPVAASPWLLLLLVGGSWLLARVLAWTYTFYDNCRRLQCFPQPPKQNWFWGHQGLVTPTEEGMKTLTQLVTTYPQGFKLWLGPTFPLLILCHPDIIRPITSASAAVAPKDMIFYGFLKPWLGDGLLLSGGDKWSRHRRMLTPAFHFNILKPYMKIFNKSVNIMHDKWQRLASEGSARLDMFEHISLMTLDSLQKCVFSFESNCQEKPSEYIAAILELSAFVEKRNQQILLHTDFLYYLTPDGQRFRRACHLVHDFTDAVIQERRRTLPTQGIDDFLKNKAKSKTLDFIDVLLLSKDEDGKELSDEDIRAEADTFMFEGHDTTASGLSWVLYHLAKHPEYQEQCRQEVQELLKDREPIEIEWDDLAQLPFLTMCIKESLRLHPPVPVISRCCTQDFVLPDGRVIPKGIVCLINIIGIHYNPTVWPDPEVYDPFRFDQENIKERSPLAFIPFSAGPRNCIGQAFAMAEMKVVLALTLLHFRILPTHTEPRRKPELILRAEGGLWLRVEPLGANSQ

SEQ ID NO: 1885 - DNA, 951 bp, Homo sapiens
atgcctagtcagaactatagcatcatatctgaatttaacctctttggcttctcagccttcccccagcacctcctgcccatcttgttcctgctgtacctcctgatgttcctgttcacattgctgggcaaccttctcatcatggccacaatctggattgaacacagactccacacacccatgtacctcttcttgtgcaccctctccgtctctgagattctgttcactgttgccatcacccctcgcatgctggctgatctgctttccacccatcattccatcacctttgtggcttgtgccaaccagatgttcttctccttcatgtttggcttcactcactccttccttctcctggtcatgggctatgatcgctatgtggccatctgccacccactgcgttacaatgtgctcatgagcccccgtgactgtgcccatcttgtggcctgtacctgggctggtggctcagtcatggggatgatggtgacaacgatagttttccacctcactttctgtgggtctaatgtgatccaccattttttctgtcatgtgctttccctcttgaagttggcctgtgaaaacaagacatcatctgtcatcatgggtgtgatgctggtgtgtgtcacagccctgataggctgtttattcctcatcatcctctcctatgtcttcattgtggctgccatcttgaggattccctctgccgaaggccggcacaagacattttctacgtgtgtatcccacctcactgtggtggtcacgcactatagttttgcctcctttatctacctcaagcccaagggcctccattctatgtacagtgacgccttgatggccaccacctatactgtcttcacccccttccttagcccaatcattttcagcctaaggaacaaggagctgaagaatgccataaataaaaacttttacagaaaattctgtcctccaagttcctga

SEQ ID NO: 1886 - protein, 316 aa, Homo sapiens
MPSQNYSIISEFNLFGFSAFPQHLLPILFLLYLLMFLFTLLGNLLIMATIWIEHRLHTPMYLFLCTLSVSEILFTVAITPRMLADLLSTHHSITFVACANQMFFSFMFGFTHSFLLLVMGYDRYVAICHPLRYNVLMSPRDCAHLVACTWAGGSVMGMMVTTIVFHLTFCGSNVIHHFFCHVLSLLKLACENKTSSVIMGVMLVCVTALIGCLFLIILSYVFIVAAILRIPSAEGRHKTFSTCVSHLTVVVTHYSFASFIYLKPKGLHSMYSDALMATTYTVFTPFLSPIIFSLRNKELKNAINKNFYRKFCPPSS

SEQ ID NO: 1887 - DNA, 1410 bp, Homo sapiens
atgaaggagggcatgagagttctgactcagctggtggccacttacccccagggctttaagatctggatgaaccccattactcccatcatcaggttgtgccaccccaacatcatctggtctgtcatcaatgcctcagccaccattgcaccaaaagacgaggccttctacaagttcctgaagccctggctgggggatgggctcctggtaaatgccagtgacaagtggagctgccaccgtcagatgctgatgcccgccttccatttcaacatgctgaagccctatatgaagtttttcactgacagtgtgaatatcatgcacgccaagtggcagctcctggcctcagggggcagtgcccatctggacatgtttgagcacaccagcctcatgaccttggacagtgtgcagaaatgtgtcttcagctttgacagccattgtcaggaaaagcccagtcaatatattgccaccatcttggagctcagttccctggtggcaggttctcaacaacttccttaccttcatctgtgcatggactttctgtattatctcatccccagcggatggcgcttccgcagggcctgctgcctggttcatgacttcacagaagctatcatccaggagcagcgccacacccttactagccagggtgttgattatttccacgaagtaaaggccaagtccaagactttggacttcactgatgtactcctgctgagcaaggatgaagattggaaggagttgtctgatgaggaaataagagcagaagctgacaccttcatgtttgaggatgacctgtcttgctgcccctcaggtcataacaccacggccagtggcctctcctgggtcctatactaccttgcaaggcacccagaataccaggagcactgctggcaggaggtgcaaaagcttctgaaggatcacgagcctaaagagattgaatgggatgacctggcccagctgcccttcctgaccatgtacattaaggacagcctgtggctgcatcccccagtccctgtcatctcccgatgctgcacccaggacattgtgctcccaggcggctgagtcatccccaaaggcattgtctgtctcttcagtaattttgagactcaccacaacccaactgtgtggctggaccctgaggtctatgaccccttccgctttgacccagagaatagcaaagagagatcacctctggcttttattcccttctcagcaggtcccttcccccgcaccaggaactgcattgggcaggcgtttgcaatggctgagatgaaggtggtcctggcgctcacgctgctgtgcttccgtgtctgtccagaccacatggagccccgcaggaagccggaggtcataatgtatgcagagggcggactttggctgtgggtgaagcccctgagcgcagacccacagtga

SEQ ID NO: 1888 - DNA, 2100 bp, Homo sapiens
ggtggctgaacctcgcaggtggcagagaggctcccctggggctgtggggctctacgtggatccgatggagccgctggtgacctgggtggtccccctcctcttcctcttcctgctgtccaggcagggcgctgcctgcagaaccagtgagtgctgttttcaggacccgccatatccggatgcagactcaggctcggcctcgggccctagggacctgagatgctatcggatatccagtgatcgttacgagtgctcctggcagtatgagggtcccacagctggggtcagccacttcctgcggtgttgccttagctccgggcgctgctgctacttcgccgccggctcagccaccaggctgcagttctccgaccaggctggggtgtctgtgctgtacactgtcacactctgggtggaatcctgggccaggaaccagacagagaagtctcctgaggtgaccctgcagctctacaactcagttaaatatgagcctcctctgggagacatcaaggtgtccaagttggccgggcagctgcgtatggagtgggagaccccggataaccaggttggtgctgaggtgcagttccggcaccggacacccagcagcccatggaagttgggcgactgcggacctcaggatgatgatactgagtcctgcctctgccccctggagatgaatgtggcccaggaattccagctccgacgacggcagctggggagccaaggaagttcctggagcaagtggagcagccccgtgtgcgttccccctgaaaaccccccacagcctcaggtgagattctcggtggagcagctgggccaggatgggaggaggcggctgaccctgaaagagcagccaacccagctggagcttccagaaggctgtcaagggctggcgcctggcacggaggtcacttaccgactacagctccacatgctgtcctgcccgtgtaaggccaaggccaccaggaccctgcacctggggaagatgccctatctctcgggtgctgcctacaacgtggctgtcatctcctcgaaccaatttggtcctggcctgaaccagacgtggcacattcctgccgacacccacacagaaccagtggctctgaatatcagcgtcggaaccaacgggaccaccatgtattggccagcccgggctcagagcatgacgtattgcattgaatggcagcctgtgggccaggacgggggccttgccacctgcagcctgactgcgccgcaagacccggatccggctggaatggcaacctacagctggagtcgagagtctggggcaatggggcaggaaaagtgttactacattaccatctttgcctctgcgcaccccgagaagctcaccttgtggtctacggtcctgtccacctaccactttgggggcaatgcctcagcagctgggacaccgcaccacgtctcggtgaagaatcatagcttggactctgtgtctgtggactgggcaccatccctgctgagcacctgtcccggcgtcctaaaggagtatgttgtccgctgccgagatgaagacagcaaacaggtgtcagagcatcccgtgcagcccacagagacccaagttaccctcagtggcctgcgggctggtgtagcctacacggtgcaggtgcgagcagacacagcgtggctgaggggtgtctggagccagccccagcgcttcagcatcgaagtgcaggtttctgattggctcatcttcttcgcctccctggggagcttcctgagcatccttctcgtgggcgtccttggctaccttggcctgaacagggccgcacggcacctgtgcccgccgctgcccacaccctgtgccagctccgccattgagttccctggagggaaggagacttggcagtggatcaacccagtggacttccaggaagaggcatccctgcaggaggccctggtggtagagatgtcctgggacaaaggcgagaggactgagcctctcgagaagacagagctacctgagggtgcccctgagctggccctggatacagagttgtccttggaggatggagacaggtgcaaggccaagatgtgatcgttgaggctcagagagggtgagtgactcgcccgaggctacgtagc

SEQ ID NO: 1889 - protein, 662 aa, Homo sapiens
MEPLVTWVVPLLFLFLLSRQGAACRTSECCFQDPPYPDADSGSASGPRDLRCYRISSDRYECSWQYEGPTAGVSHFLRCCLSSGRCCYFAAGSATRLQFSDQAGVSVLYTVTLWVESWARNQTEKSPEVTLQLYNSVKYEPPLGDIKVSKLAGQLRMEWETPDNQVGAEVQFRHRTPSSPWKLGDCGPQDDDTESCLCPLEMNVAQEFQLRRRQLGSQGSSWSKWSSPVCVPPENPPQPQVRFSVEQLGQDGRRRLTLKEQPTQLELPEGCQGLAPGTEVTYRLQLHMLSCPCKAKATRTLHLGKMPYLSGAAYNVAVISSNQFGPGLNQTWHIPADTHTEPVALNISVGTNGTTMYWPARAQSMTYCIEWQPVGQDGGLATCSLTAPQDPDPAGMATYSWSRESGAMGQEKCYYITIFASAHPEKLTLWSTVLSTYHFGGNASAAGTPHHVSVKNHSLDSVSVDWAPSLLSTCPGVLKEYVVRCRDEDSKQVSEHPVQPTETQVTLSGLRAGVAYTVQVRADTAWLRGVWSQPQRFSIEVQVSDWLIFFASLGSFLSILLVGVLGYLGLNRAARHLCPPLPTPCASSAIEFPGGKETWQWINPVDFQEEASLQEALVVEMSWDKGERTEPLEKTELPEGAPELALDTELSLEDGDRCKAKM

SEQ ID NO: 1890 - DNA, 1881 bp, Homo sapiens
ggtggctgaacctcgcaggtggcagagaggctcccctggggctgtggggctctacgtggatccgatggagccgctggtgacctgggtggtccccctcctcttcctcttcctgctgtccaggcagggcgctgcctgcagaaccagtgagtgctgttttcaggacccgccatatccggatgcagactcaggctcggcctcgggccctagggacctgagatgctatcggatatccagtgatcgttacgagtgctcctggcagtatgagggtcccacagctggggtcagccacttcctgcggtgttgccttagctccgggcgctgctgctacttcgccgccggctcagccaccaggctgcagttctccgaccaggctggggtgtctgtgctgtacactgtcacactctgggtggaatcctgggccaggaaccagacagagaagtctcctgaggtgaccctgcagctctacaactcagttaaatatgagcctcctctgggagacatcaaggtgtccaagttggccgggcagctgcgtatggagtgggagaccccggataaccaggttggtgctgaggtgcagttccggcaccggacacccagcagcccatggaagttgggcgactgcggacctcaggatgatgatactgagtcctgcctctgccccctggagatgaatgtggcccaggaattccagctccgacgacggcagctggggagccaaggaagttcctggagcaagtggagcagccccgtgtgcgttccccctgaaaaccccccacagcctcaggtgagattctcggtggagcagctgggccaggatgggaggaggcggctgaccctgaaagagcagccaacccagctggagcttccagaaggctgtcaagggctggcgcctggcacggaggtcacttaccgactacagctccacatgctgtcctgcccgtgtaaggccaaggccaccaggaccctgcacctggggaagatgccctatctctcgggtgctgcctacaacgtggctgtcatctcctcgaaccaatttggtcctggcctgaaccagacgtggcacattcctgccgacacccacacagatggcatgatctcagctcactgcaacctccgccttccagattcaagagattctcctgcttcagcctcccgagtagctgggattacaggcatctgccaccatacccggctaattttgtatttttagtagagacggggtttcaccacgttggccaggctggtctcgaactcctgacctcaagtgatccacctgccttggcctcccaaagtgttgggattataggcgtgagccaccatgcccagcctaatttttgtatttttagtagagatggagtttcaccatgttgcccaggctggtctcaaactcctgccctcaggtgatccacccacctcagcctctcaaagtgctgggattacaggtgtgagccactgtggccgacctactatttttattatttttgagctaggttctcagtctgttggcagactggagtgcaatcatggctcactgcagccttgaactcccagactcaagtgatccttccacctcagcctctggagtagctgggactacagacatgcaccaccacacctggttaattttttatttttattttttgtagagacaggtgtctctctacgttgcccaggctggtctcgaactcctgggctcaagtgatccacccatctccacctcccaaagtgctaggattacaggcgtgagccaccgtacccagcctggtcccatatcatagtgaaatggtgcctgtaaagctctcagcattggcttggcacatgcagttggtactcaataaacggctgttgctatccccaaaaaaaaaaaaaaaaaaaaaaaaa

SEQ ID NO: 1891 - protein, 381 aa, Homo sapiens
MEPLVTWVVPLLFLFLLSRQGAACRTSECCFQDPPYPDADSGSASGPRDLRCYRISSDRYECSWQYEGPTAGVSHFLRCCLSSGRCCYFAAGSATRLQFSDQAGVSVLYTVTLWVESWARNQTEKSPEVTLQLYNSVKYEPPLGDIKVSKLAGQLRMEWETPDNQVGAEVQFRHRTPSSPWKLGDCGPQDDDTESCLCPLEMNVAQEFQLRRRQLGSQGSSWSKWSSPVCVPPENPPQPQVRFSVEQLGQDGRRRLTLKEQPTQLELPEGCQGLAPGTEVTYRLQLHMLSCPCKAKATRTLHLGKMPYLSGAAYNVAVISSNQFGPGLNQTWHIPADTHTDGMISAHCNLRLPDSRDSPASASRVAGITGICHHTRLILYF

SEQ ID NO: 1892 - DNA, 5896 bp, Homo sapiens
atggacgagtcgagcctcctgcggcgccgcgggctccagaaggagctgagcctgccacgccgaggacgtggctgccgcagcgggaaccgcaagagcttggtggtaggaacgccctccccgaccctctcccggcccctgtcgccattgtcggtcccaacggcaggcagcagccccttggatagtcctcggaatttctcggctgcctctgccctaaatttcccctttgcccggagggcagacggcagaagatggtccctcgcgtctctcccatcttccggctatggaaccaacacacccagctccaccctctcgtcaagctcatcctcccgggaacgtctccaccagcttcccttccagccgacgccggacgagctgcacttcctgtccaagcacttccgcagctcagagaatgtgcttgatgaggaaggcggccggtcaccccgcctccgaccccgctctcgcagtctcagcccgggccgtgcaacggggaccttcgacaatgagattgtcatgatgaatcacgtgtaccgggagaggttccccaaggccacagcacagatggagggccgtctgcaggagttcctgacggcctacgcgcccggcgcccggctggcgctggctgatggcgtcttgggcttcatccaccaccagatcgtcgagctggcccgagactgcttggccaagtctggcgagaacctcgtcacctcccgctacttcctagagatgcaggagaagctggagcggcttctgcaggatgcccatgagcgttcggacagtgaggaggtcagcttcatcgtccagcttgtccggaaactgctgatcatcatctcacggccagctcggctgctggagtgtctggagtttgaccctgaggaattttaccacctgctggaggcggctgagggccatgcgcgggagggccaaggcattaagactgaccttccacagtacatcattgggcagctgggcctggccaaggaccccctggaggagatggtgccactgagtcacctcgaagaagaacagcccccagcacctgagtccccagagagccgcgccctggtcggccagtcacggaggaagccatgcgaaagcgactttgagaccatcaaactcattagcaacggagcctatggggccgtctacctggtgcggcaccgtgacacacggcagcgctttgccatcaagaagatcaacaaacagaacttgatcctgcgtaaccagatccagcaggtctttgtggagcgtgacattctcacctttgccgagaacccctttgtggtcagcatgttctgctcctttgagacccggcgccacctatgtatggtcatggaatacgtggaaggcggcgactgcgccacgctcctgaagaacatgggcccgctgcccgtggacatggcccgcctgtacttcgccgagacggtgttggcgctggagtacctgcataactatggcatcgtgcaccgtgacctcaaaccagacaatctgctcatcacctcgcttggccacatcaagctcacggacttcggcctgtccaagatcggcctcatgagcatggccaccaacctctatgagggccacatcgagaaggacgcccgagagttcatcgacaagcaggtgtgtgggacgccggagtacatagcccccgaggtgatcttccgccagggctatgggaagccagtggactggtgggccatgggcgtcgtcctctatgagtttctggtgggctgcgtgcctttctttggagatacccccgaggaactcttcggtcaggtggtcagcgatgagatcatgtggccagagggagatgaggcccttccagcagacgcccaggacctcatcaccaggttgctccggcagagcccgctggaccgtctgggcactggtggcacccacgaagtgaagcagcacccctttttcctggccctggactgggcagggcttctccgacacaaagccgagttcgtgccccagctcgaagctgaggatgataccagctactttgacacacgttcggaacgttaccgccatctgggctccgaggacgacgagaccaatgatgaagaatcgtccacagagatcccccagttctcctcctgctcccaccggttcagcaaggtctacagcagctctgagttcctggccgtccagcccactcctaccttcgctgaaaggagcttcagtgaagaccgggaggaggggtgggagcgcagcgaagtggactatggccgccggctgagtgctgacatccggctgaggtcctggacatcctctggatcctcctgtcagtcatcttcgtcccagcccgagcggggtcccagcccatctctcctgaataccatcagcctggacacaatgcccaagtttgccttctcatcagaggatgagggggtaggcccaggccctgcaggccccaagaggcccgtcttcattctaggggagcctgaccccccaccagcggccaccccagtgatgcccaagccctcgagcctttctgccgacacagctgctctcagccacgcccgcctacggagcaatagcatcggcgcccgacactccacaccaaggcctctggatgccggccggggccgccgccttgggggcccaagagacccagcccctgagaagtccagagcctcctccagcggtggcagtggtggcggcagtgggggccgcgtgcccaagtcagcctctgtctctgccctgtccctcatcatcacggcagatgatggcagcggcggccccctcatgagccccctttccccgcgctctctgtcctcgaacccgtcgtcccgtgactcttcgccgagccgagacccgtcccccgtgtgtggcagcctgcggccccccatcgttatccacagctctggcaagaagtacggcttcagcctgcgggcgatccgcgtctacatgggtgatagcgacgtctacactgtgcaccacgtcgtctggagtgtggaggacggaagccccgcccaggaggcgggcctgcgggctggggacctcatcacccacatcaacggggagtcagtgctggggctggtgcacatggacgtcgtggagctgctgctgaagagcggcaacaagatatccctgcggaccacagccctggagaacacctccatcaaggtgggccccgcccggaagaatgtggccaagggccgcatggcacgcaggagcaagaggagccgtcggcgggagacccaggatcggcggaagtcacttttcaagaagatctccaagcagacctccgtgctgcacaccagccgcagcttctcctccggactccaccactcactgtcatccagtgagagcctccccggctcgcccacccacagcctctcccccagccccaccactccctgccgaagcccagcccctgatgtcccagcagataccactgcatccccacccagcgcatccccgagctccagcagccccgcctccccagctgctgctggccacacccgccccagctccctgcacggcctggctgccaagcttgggccaccccgccccaagactggccgccgcaagtccaccagcagcatcccgccctccccgctggcctgcccgcccatctccgcgcccccaccccgctcgccctcgcccctgcccgggcacccgcccgcacctgcccgatccccgcggctgcgccggggccagtcagctgacaagctgggcacaggggagcggctggatggggaggcggggcggcgcactcgtgggccagaggccgagctcgtggtcatgcggcggctgcacctgtccgagcgccgagactccttcaagaagcaggaggccgtgcaggaggttagcttcgatgagccgcaggaggaggccactgggctgcccacctcagtgccacagatcgccgtggagggcgaggaagccgtgccagtagctctcgggcccaccggaagagactgatcccctgccaggtctctccctggcatcaaagttacgcgttttcttgtgcaatgttttttccgtaaagtcatgcctggatggggactgagccaccagcctgacacccagaaggcgagaagccatctcggtccttgctggaaggtggagacatcgcttgtgttctggtgtcaatcggggctggatggggcaagaatgggggacaagggtggctttgtaaatagcagcaaatccctgcaactaatttattactttttttttctttttttttttttttttttgagacagagtctcactctgttgcccgggctggagtgcagcggcgtgatctcagctcactgcaacctccgcctcccaagttcaagcgattgtcctgcctcagcttcccaagtggctgggattacaggcgcccaccactatgcccagctaattttttgtatttttagtacagacggggtttcaccatgttggtcaggctggtctcgaactcctgacctcatgatttgcctgcctttgcctcccaaagtgctgggattacaggcgtgagccactgggcccagcctaatttattactttttataagcgatagccgtactgagccgccccctgaaggcggctgccaggtcttgccccaggcacctgggactctgtttgcaggccctgccctctgggctgagaaggatgcactttggacaagtcatctgtgtttgtgttttccagtttttctgtactttttaagtgttttgtgttacctggtctcattcccctccccacacctacccatttgaggggatggagttgaagtcacctggtcacctgtaccggcccagttcggctacaacctggagtgtccgtaaacaattcctctcacccacaaaacaatgtaatcccagcgatggactggattctgaaggccacttcccaccatcatagctgccatgcccaggcagtgcctgctctatatatagagtctgcctccaatcctgctggcttcagcctggagaagggatatgggagctggagctttgatggatgaataggtgttcaccggatctgggcagaggggtcatccgctccccaggtgggcactgataaaggaaggtacaggcctcacctggaactgccaaggcagcctccagaaatgctcggctgtctcggggcacgctccagtatgccagtcctgcgggattacgtccagctacttccagaaacactcagtgtcccctcccctcaggctctgccttggcctggccttgtccagtctaccctggacaagatgccgtgtgtttgaggcccagcagagtaagcccttggccgtgatgtgtctgaaacacctgttaggggttccctccatatgtcagagcctctctgggatgaagttcaagccagaaaacccagtcgaggctcaagtttgaatttcagcttcactgtgtggctctgggaaaatggctttcccactctgtgcctcagtttccttgtgtttacaagactaatcccattgactgtttattaagcacctactgtgtgccaagcgcttttacgtggcttctccctcagccagccttgagaaggctggaggtggtgtcatcacctccattttacagacaaagcagctgagaccccagcgaggggcggagacctgtcccacgatcacccagcaggagtcgtggcagaacggagcatcagccagaccctgttgtgggcgttgtcatcaagggagcttgaatggagggtctggtgtcagatacagccgactccagccccagctcatcccccatgatgctgtgtgacccactgggcactctggtgagggagctttccagacatcaacagcccactctgcttccctttctgagtcccctgtccagcactgcctagtgttggagggtagaccaaggctgtgcatgattcaccccctccttccatcctggagctggcagtgaataaaagcccgtatttacaaagatga

SEQ ID NO: 1893 - protein, 1309 aa, Homo sapiens
MDESSLLRRRGLQKELSLPRRGRGCRSGNRKSLVVGTPSPTLSRPLSPLSVPTAGSSPLDSPRNFSAASALNFPFARRADGRRWSLASLPSSGYGTNTPSSTLSSSSSSRERLHQLPFQPTPDELHFLSKHFRSSENVLDEEGGRSPRLRPRSRSLSPGRATGTFDNEIVMMNHVYRERFPKATAQMEGRLQEFLTAYAPGARLALADGVLGFIHHQIVELARDCLAKSGENLVTSRYFLEMQEKLERLLQDAHERSDSEEVSFIVQLVRKLLIIISRPARLLECLEFDPEEFYHLLEAAEGHAREGQGIKTDLPQYIIGQLGLAKDPLEEMVPLSHLEEEQPPAPESPESRALVGQSRRKPCESDFETIKLISNGAYGAVYLVRHRDTRQRFAIKKINKQNLILRNQIQQVFVERDILTFAENPFVVSMFCSFETRRHLCMVMEYVEGGDCATLLKNMGPLPVDMARLYFAETVLALEYLHNYGIVHRDLKPDNLLITSLGHIKLTDFGLSKIGLMSMATNLYEGHIEKDAREFIDKQVCGTPEYIAPEVIFRQGYGKPVDWWAMGVVLYEFLVGCVPFFGDTPEELFGQVVSDEIMWPEGDEALPADAQDLITRLLRQSPLDRLGTGGTHEVKQHPFFLALDWAGLLRHKAEFVPQLEAEDDTSYFDTRSERYRHLGSEDDETNDEESSTEIPQFSSCSHRFSKVYSSSEFLAVQPTPTFAERSFSEDREEGWERSEVDYGRRLSADIRLRSWTSSGSSCQSSSSQPERGPSPSLLNTISLDTMPKFAFSSEDEGVGPGPAGPKRPVFILGEPDPPPAATPVMPKPSSLSADTAALSHARLRSNSIGARHSTPRPLDAGRGRRLGGPRDPAPEKSRASSSGGSGGGSGGRVPKSASVSALSLIITADDGSGGPLMSPLSPRSLSSNPSSRDSSPSRDPSPVCGSLRPPIVIHSSGKKYGFSLRAIRVYMGDSDVYTVHHVVWSVEDGSPAQEAGLRAGDLITHINGESVLGLVHMDVVELLLKSGNKISLRTTALENTSIKVGPARKNVAKGRMARRSKRSRRRETQDRRKSLFKKISKQTSVLHTSRSFSSGLHHSLSSSESLPGSPTHSLSPSPTTPCRSPAPDVPADTTASPPSASPSSSSPASPAAAGHTRPSSLHGLAAKLGPPRPKTGRRKSTSSIPPSPLACPPISAPPPRSPSPLPGHPPAPARSPRLRRGQSADKLGTGERLDGEAGRRTRGPEAELVVMRRLHLSERRDSFKKQEAVQEVSFDEPQEEATGLPTSVPQIAVEGEEAVPVALGPTGRD

SEQ ID NO: 1894 - DNA, 3953 bp, Homo sapiens
ggctgcggcgacggtggccgcggtggagccacggggcgggcttggcttggtgtgacggcggctgcggcggcggtggcggccgcgaccaggtcggcgtcctcagctggccgagcatggtggcagcctgcacccttggctcccttgtctggtgcagccagcagagccgccagccttgggcgcccatggccctccgtgtgagggcgtgagcggcctgccccagcctcacctgctgatggaggactcaatggcccagtgacctgacaccacaccaccaactccctcccaccagctgacgaatggtggacccagtgacgagtggcccttgtaagggtcatggaataatttgaagcgaggcatgagcggcccctgtggtcgcctgtgactgctggagatagaggtcccagcaccccaagccaacccagcggaccctcccagccctgcttcaaccaatggggccagtggggctccaagcagccacctaaccatccagaccccaccccactcacgcggccatggcgggccctgagggcttccagtaccgcgctctgtacccgttccgccgggagcggccggaggacctggagctgctgcccggcgacgtgctggtagtgagccgggcggccttgcaggcgctgggcgtggccgagggtggcgagcgctgcccacagagcgtgggctggatgcccggcctcaacgagcgcacacggcagcgaggtgacttccctggcacctatgtggagttcctggggcccgtggccctggcccggcccggccctcgcccacggggcccccgcccactgcccgccaggccccgtgatggggcccctgagccaggcctcacactccccgacttgcccgagcagttctccccacctgatgtggctccccctcttctggtgaagcttgtggaggccattgaaaggacagggctggacagcgaatctcactaccgcccggagctgcccgcaccgcgtacagactggtccctgagcgacgtggatcagtgggacacggcagccctggctgacggcattaagagcttcctgctggcactgcccgcgccgctcgtgacccccgaggcctcggccgaggcgcgccgggccctgcgggaggccgcggggcccgtggggccggcgctggagccaccgacgctgccgctgcaccgcgcgctcacgctgcgcttcctgctccagcacctgggccgcgtggcccgccgcgccccggccctgggtcccgcggtccgggccctgggcgccacctttgggccgctgctgctgcgcgcgccgccgccgccgtcctcgccgccgccagggggcgctcccgacgggagtgagcccagccctgacttcccggcgctgctggtggagaagctgcttcaggaacacttggaagagcaggaggttgcgcccccagcgctgccgcctaaaccccccaaggcaaagccggcccccacagtcctggccaatggagggagcccaccctccctgcaggatgctgagtggtactggggggacatttcaagggaggaggtgaacgagaaactccgggacactcccgatggcaccttcctagtccgagatgcttctagcaagatccagggcgagtacacgctgaccctcaggaaaggcgggaacaataagctgatcaaggtcttccaccgagatgggcactatggcttctcagagccactcaccttctgctccgttgtggacctcatcaatcactaccgccacgagtctctggcccagtacaatgccaagctggacacacggctcctctaccctgtgtccaaataccagcaggaccagattgtcaaggaggacagcgtggaggcagtgggcgcccagcttaaggtctatcaccagcagtaccaggacaagagccgcgagtatgaccagctttatgaagagtacacacggacctcccaggagctgcagatgaagcgtactgcaattgaggccttcaatgagactatcaagatctttgaagagcagggccagactcaagagaaatgcagcaaggaatacctggagcgcttccggcgtgagggcaacgagaaagagatgcaaaggatcctgctgaactccgagcggctcaagtcccgcattgccgagatccatgagagccgcacgaagctggagcagcagctgcgggcccaggcctcggacaacagagagatcgacaagcgcatgaacagcctcaagccggacctcatgcagctgcgcaagatccgagaccagtacctcgtgtggctcacccagaaaggcgcccggcagaagaaaatcaacgagtggctggggattaaaaatgagactgaggaccagtacgcactcatggaggacgaggacgatctcccgcaccacgaggaacgcacttggtacgtgggcaagatcaaccgcacgcaggcagaggagatgctgagtggcaagcgggatggcaccttcctcatccgcgagagcagccagcggggctgctacgcctgctccgtggtagtggacggcgacaccaagcactgcgtcatctaccgcacggccaccggcttcggcttcgcggagccctacaacctgtacgggtcgctgaaggagctggtgctgcactaccagcacgcctcgctggtgcagcacaacgacgcgctcaccgtcaccctggcgcacccagtgcgcgccccgggccccggcccgccgcctgccgcccgctgagcaccgaggacccgccccaagcagagccgcccctgggcccgtctgcgccggaggctgcggcggcgggagccacggaccagaccagccacatccaggggtcctcatttctccggctctggctcttgtttggggttctctcaccctctttctctttccttccctcccccattctccagatctccctctgtctccttttctctgtctttcttggcccctgtctctctccatgttgggggtcctaactcccccaccccatatctacgtgtcctccgggcattgccctctccatggctctggtcaccctgaccctctgccctgcccaccgcaggtcccccggggtcccggaagccccttctggctgcacctgccatgtttacagagggcccctgggctgcgcggccccagcctgggcaccctgatttttaagccatagacctggggtcagggcaggaaggaacttcactctgctgcttccgagaacctcggccgtgacattcggggccgggcgggacccgccccacagactccaacttcccctccaaaccccgaagtgaaacccgccaccgggttacccccacaagggggccgctgcgagaagttcacccacccccgaaaaaataattaaactcgcaggccaggcacggtggctcatgcctgtaatcccagcactttgggaggccaagacgggcggatcttttgaggtcgggagttggaggccagcctggccaaaatggcaaaaccccgcatctactaaaatacaaaaattagccgggcgtggtggcggccgcctgtaatcccagctacttgggaggctgaggcgtgagaatctcttgaacccaggagatggaggttgcagtgagcagagatcgtgccactgcactccagcctgggtaacagagggagactcctccgtctcaaaaaaataaataaataaacttgtgagctggccccaacccctcctaggaatcacagctccccgtactggtgccgccgcagtggccaagttgcgacactgcccacggcccctccctctgatgcagattcagggcttctcttcgatcatgttgggttttgattctgtttttccttgactgcaaaaccctctttcctctcctcttttgggacaagagccctggttttctacgctgcccttggccaccacactgcctgccccacgagctgggaggcaggttttgtacggtacgttgttattgatatgatataaaacatcaaacgtcgaaaaaaaaaaaaaaa

SEQ ID NO: 1895 - protein, 728 aa, Homo sapiens
MAGPEGFQYRALYPFRRERPEDLELLPGDVLVVSRAALQALGVAEGGERCPQSVGWMPGLNERTRQRGDFPGTYVEFLGPVALARPGPRPRGPRPLPARPRDGAPEPGLTLPDLPEQFSPPDVAPPLLVKLVEAIERTGLDSESHYRPELPAPRTDWSLSDVDQWDTAALADGIKSFLLALPAPLVTPEASAEARRALREAAGPVGPALEPPTLPLHRALTLRFLLQHLGRVARRAPALGPAVRALGATFGPLLLRAPPPPSSPPPGGAPDGSEPSPDFPALLVEKLLQEHLEEQEVAPPALPPKPPKAKPAPTVLANGGSPPSLQDAEWYWGDISREEVNEKLRDTPDGTFLVRDASSKIQGEYTLTLRKGGNNKLIKVFHRDGHYGFSEPLTFCSVVDLINHYRHESLAQYNAKLDTRLLYPVSKYQQDQIVKEDSVEAVGAQLKVYHQQYQDKSREYDQLYEEYTRTSQELQMKRTAIEAFNETIKIFEEQGQTQEKCSKEYLERFRREGNEKEMQRILLNSERLKSRIAEIHESRTKLEQQLRAQASDNREIDKRMNSLKPDLMQLRKIRDQYLVWLTQKGARQKKINEWLGIKNETEDQYALMEDEDDLPHHEERTWYVGKINRTQAEEMLSGKRDGTFLIRESSQRGCYACSVVVDGDTKHCVIYRTATGFGFAEPYNLYGSLKELVLHYQHASLVQHNDALTVTLAHPVRAPGPGPPPAAR

SEQ ID NO: 1896 - DNA, 1051 bp, Homo sapiens
ggaccgccgcctggttaaaggcgcttatttcccaggcagccgctgcagtcgccacacctttgcccctgctgcgatgaccctgtcgccacttctgctgttcctgccaccgctgctgctgctgctggacgtccccacggcggcggtgcaggcgtcccctctgcaagcgttagacttctttgggaatgggccaccagttaactacaagacaggcaatctatacctgcgggggcccctgaagaagtccaatgcaccgcttgtcaatgtgaccctctactatgaagcactgtgcggtggctgccgagccttcctgatccgggagctcttcccaacatggctgttggtcatggagatcctcaatgtcacgctggtgccctacggaaacgcacaggaacaaaatgtcagtggcaggtgggagttcaagtgccagcatggagaagaggagtgcaaattcaacaaggtggaggcctgcgtgttggatgaacttgacatggagctagccttcctgaccattgtctgcatggaagagtttgaggacatggagagaagtctgccactatgcctgcagctctacgccccagggctgtcgccagacactatcatggagtgtgcaatgggggaccgcggcatgcagctcatgcacgccaacgcccagcggacagatgctctccagccaccacacgagtatgtgccctgggtcaccgtcaatgggaaacccttggaagatcagacccagctccttacccttgtctgccagttgtaccagggcaagaagccggatgtctgcccttcctcaaccagctccctcaggagtgtttgcttcaagtgatggccggtgagctgcggagagctcatggaaggcgagtgggaacccggctgcctgcctttttttctgatccagaccctcggcacctgctacttaccaactggaaaattttatgcatcccatgaagcccagatacacaaaattccaccccatgatcaagaatcctgctccactaagaatggtgctaaagtaaaactagtttaataagcaaaaaaaaaaaaaaaaaaa

SEQ ID NO: 1897 - protein, 250 aa, Homo sapiens
MTLSPLLLFLPPLLLLLDVPTAAVQASPLQALDFFGNGPPVNYKTGNLYLRGPLKKSNAPLVNVTLYYEALCGGCRAFLIRELFPTWLLVMEILNVTLVPYGNAQEQNVSGRWEFKCQHGEEECKFNKVEACVLDELDMELAFLTIVCMEEFEDMERSLPLCLQLYAPGLSPDTIMECAMGDRGMQLMHANAQRTDALQPPHEYVPWVTVNGKPLEDQTQLLTLVCQLYQGKKPDVCPSSTSSLRSVCFK

SEQ ID NO: 1898 - DNA, 1360 bp, Homo sapiens
gtcggcgcggcgaaagcagagcggcgcgccggttccttggttcctgagggcgatggcgcggggtggctggcgccggctacgccgcctgttatccgcggggcagcttctattccagggccgcgcgctgctcgtcactaacacgctgggctgcggcgcgctcatggcggccggtgatggcgtgcgccagtcctgggagatccgcgcccggcccggccaggttttcgacccacggcgctccgcgagcatgtttgcggtgggctgcagcatgggtcccttcctgcactactggtacttgtcgctggaccgcctattccctgcgtctggcctccgaggcttcccaaatgtcctcaagaaggtcctcgtggatcagctggtagcctctccattgctgggcgtctggtacttcttgggccttggctgcctggagggtcagacagtgggtgagagctgccaggagctgcgggagaagttctgggaattctacaaggcagactggtgcgtgtggcctgctgcgcagttcgtgaacttcctcttcgtgcccccccaatttcgagtcacctacatcaacggcctgacgctgggctgggacacgtacctgtcctacttgaagtaccggagcccagttcctctgacacccccaggctgtgtggccctggacacccgagcagactgaactgtctgcttcctggaccagatgcaagactgtctcctggcggaccaccccctctgacagaaggggaatgggctcctgcagcaagctcgggtcttgagccacgtcccagcaccacttcagctccggagcattgggctgagccgccctttccaagctcacttctgggactgagtttcctcaaccggaacacacccatgaagatggatgatcatcccctagcccttctcagcaggaacctcatgcgacctgtgaccaagatgtcccatcctcagcacagggcccactctgccaaccagtctcaagcaccagcccctcaacactgccatccacctggctctgggccaagccaccaatccagagctccctcaggtcctgggactaaggcggggacatgactgatcccctcagagcaggctcaggcctggagtcggcccccaaaagtttcacatagggccaggcagcctctgtgtttctttccctggtcctgaactgtggaaatgccattaaactctctctataatgtaactgaaactgctggctgggcgcagtggctcccacctgtaatctcagcccttcccgaggctgaggtggaaggattgctcgaggccaggtgttcgagaccagcctgggcaacatagcaagaccctgtctctatttatattgaaaaataaaaataacaaaagaaaa

SEQ ID NO: 1899 - protein, 206 aa, Homo sapiens
MARGGWRRLRRLLSAGQLLFQGRALLVTNTLGCGALMAAGDGVRQSWEIRARPGQVFDPRRSASMFAVGCSMGPFLHYWYLSLDRLFPASGLRGFPNVLKKVLVDQLVASPLLGVWYFLGLGCLEGQTVGESCQELREKFWEFYKADWCVWPAAQFVNFLFVPPQFRVTYINGLTLGWDTYLSYLKYRSPVPLTPPGCVALDTRAD

SEQ ID NO: 1900 - DNA, 1491 bp, Homo sapiens
gaggactgcaggggcctgagccgctgctgccgccgccgccgcgcagccccacatcaacgcaccggggtcctgtcaccgccaccgccaaaaaagtcaccgccgctagggtcgccgttgcatcggtgcagggcaagatggcatccgccacagactcgcgctatgggcagaaggagtcctcggatcagaacttcgactacatgttcaagattctcatcatcggcaacagcagcgtgggcaagacgtccttcctcttccgctatgctgacgactcgttcacgcctgccttcgtcagcaccgtgggcatcgacttcaaggtcaagaccatctatcgcaacgacaagaggatcaagctgcagatctgggacacagcagggcaagagcggtaccggaccatcaccaccgcatactaccggggcgctatgggcttcatcctcatgtatgacatcaccaacgaggaatccttcaatgcagtgcaggactggtccacccagatcaagacctactcatgggacaatgcccaggtgctgctggtaggaaacaagtgtgacatggaggatgagcgggtggtgtcatcagaacgtggccggcagctagctgaccaccttgggttcgagttctttgaggcaagcgccaaggacaacattaacgtcaagcagacctttgagcgcctggtggatgtcatctgcgagaagatgtccgagtcgttggacacggcggaccctgcggtcacaggcgccaagcagggcccacagctcagtgaccagcaggtgccaccgcaccaggactgcgcctgctgagagccatcccactccctttcccctcttccctgtcttccccaccttcccccaactacccgggcctgacccggcccctaccagccacgggcacaagacccctgctcctgacttagcccgtcacccttatttattattgtagctatttatttatttattgaagatgtcccccaggggcccaggctcccctgcccgccccaagccctgcccctcctgtacatatagccctttccccactcagctgtggtgtctcgtggccccgtgaactcaccgctcaccctcctgaaccccccccccgcctttttttaaaattcacccccatccacagttgtcagttgtgaagaggggccagatgacaccctaaagcaggctgatcgggcaatgggaggtggccaggcctgccagcccctcggctctgccgcggtgggccgaggccgctgttgggggtttccctgtgtggaccatggggatcagagtctggcctgccaggctcctctccccgttttctcttttggtgggggggtgtgctgtgggtattcaccaccctgggaccccccccccccccgcccaccagacctgttctgacctcatgagtgtcaaacgtgccccccagttccttaggagatgtcatgacaacactacacgcacccaataaagcgaatggaccatcaaaaaaaaaaaaaaaaaaaaaaaaaaa

SEQ ID NO: 1901 - protein, 220 aa, Homo sapiens
MASATDSRYGQKESSDQNFDYMFKILIIGNSSVGKTSFLFRYADDSFTPAFVSTVGIDFKVKTIYRNDKRIKLQIWDTAGQERYRTITTAYYRGAMGFILMYDITNEESFNAVQDWSTQIKTYSWDNAQVLLVGNKCDMEDERVVSSERGRQLADHLGFEFFEASAKDNINVKQTFERLVDVICEKMSESLDTADPAVTGAKQGPQLSDQQVPPHQDCAC

SEQ ID NO: 1902 - DNA, 2739 bp, Homo sapiens
caccatctgggcatcgacagctcctcggtgtcggccccaccttgagccccagttccaccttctaccgcttcagcacctccggcgcggacagctcctcgctgtcgcctccactcccggccctgggccggacccgggagcagacgctcctcggcgcccgctcacggggacgagtcctgctccctgctatcccagacccctttctctggcgcatggagaacctgggggtcggcgaaggggcagaggcttgcagcaggttgagtcgctctcgcggccgccacagcatgaccagagccccgaagcacctgtggcggcaaccccggcgccccatccgcatccaacagcgcttctattcggatccggacaagtccgcgggctgccgcgagagggacctgagcccgcggccggagctcaggaagtcgcggctctcctggcccgtttcctcctgcaggcgctttgacctggaaaatgggctctcgtgtgggaggagggccctggaccctcagtccagccctggcctgggccggattatgcaggctccagtcccgcacagccagcggcgcgagtccttcctgtaccgctcagatagcgactatgaactctcgcccaaggccatgtctcggaactcctctgtggccagcgacctacatggagaggacatgattgtgacgccctttgcccaggtcctggccagtctgcggaccgttcggagcaacgtggcggcccttgcccgccagcaatgcctaggagcagccaagcagggacccgtcggaaacccttcatccagcaatcagctccctcctgcagaggacacggggcagaagctggcattggagacgctagacgagctggactggtgcctggatcagttggagacgctgcagacccggcactcggtgggggagatggcctccaacaagttcaagcggatcctgaaccgggagttgacccacctgtccgaaaccagccgctccgggaaccaggtgtccgagtacatctcccggaccttcctggaccagcagaccgaggtggagctgcccaaggtgaccgctgaggaggccccacagcccatgtcccggatcagtggcctacatgggctctgccacagtgccagcctctcctcagccactgtcccacgctttggggtccagactgaccaggaggagcaactggccaaggagctagaagacaccaacaagtggggacttgatgtgttcaaggtggcggagctaagtgggaaccggcccctcacagctatcatattcagcatttttcaggagcgggacctgctgaagacattccagatcccagcagacacactggccacctacctgctgatgctggaaggtcactaccacgccaatgtggcctaccacaacagcctacatgccgccgacgtggcccagtccacgcatgtgctgctggctacgcccgccctcgaggctgtgttcacagacttggaaatcctggctgccctctttgcaagcgccatccacgacgtggaccatcctggggtctccaaccagtttctgattaacaccaactcagagctggcgcttatgtacaacgacgcctcggtgctggagaaccatcacctggctgtgggcttcaagctgctgcaggcagagaactgcgatatcttccagaacctcagcgccaagcagcgactgagtctgcgcaggatggtcattgacatggtgctggccacagacatgtccaaacacatgaacctcctggccgacctcaagaccatggtggagaccaagaaggtgacaagcctcggtgtcctcctcctggacaactattccgaccgaatccaggtcttgcagaacctggtgcactgtgctgatctgagcaaccccaccaagccgctgcccctgtaccgccagtggacggaccgcatcatggccgagttcttccagcagggagaccgcgagcgtgagtcgggcctggacatcagtcccatgtgtgacaagcatacggcctcagtggagaagtcccaggtgggtttcattgactacattgctcacccactgtgggagacttgggctgacctggtccacccagatgcacaggacctgctggacacgctggaggacaatcgagagtggtaccagagcaagatcccccgaagtccctcagacctcaccaaccccgagcgggacgggcctgacagattccagtttgaactgactctggaggaggcagaggaagaggatgaggaggaagaagaggagggggaagagacagctttagccaaagaggccttggagttgcctgacactgaactcctgtcccctgaagccggcccagaccctggggacttacccctcgacaaccagaggacttagggccagccctgcgtgaactgcaggggcaatggatggtaaagccctttggctcttggcaggcagactttccaggaagaggctccatgtggctcctgcttcactttcccacccatttagggagacaatcaagctcttagttataggtggctcccagggtctaattggaggcacctggctggggtccactctgaccctagacttgcctaaaagagctctctaaggggcagcctcttacgatgccctggtgtctttctcctgggcttctatccctgtgaggagaggtgctgtctgctggagcctctagtccaccctctccagtggtcactcttgagtcacatctgtcacttaattatttccttctttatcaaatatttattgctcatctacttcg

SEQ ID NO: 1903 - protein, 712 aa, Homo sapiens
MENLGVGEGAEACSRLSRSRGRHSMTRAPKHLWRQPRRPIRIQQRFYSDPDKSAGCRERDLSPRPELRKSRLSWPVSSCRRFDLENGLSCGRRALDPQSSPGLGRIMQAPVPHSQRRESFLYRSDSDYELSPKAMSRNSSVASDLHGEDMIVTPFAQVLASLRTVRSNVAALARQQCLGAAKQGPVGNPSSSNQLPPAEDTGQKLALETLDELDWCLDQLETLQTRHSVGEMASNKFKRILNRELTHLSETSRSGNQVSEYISRTFLDQQTEVELPKVTAEEAPQPMSRISGLHGLCHSASLSSATVPRFGVQTDQEEQLAKELEDTNKWGLDVFKVAELSGNRPLTAIIFSIFQERDLLKTFQIPADTLATYLLMLEGHYHANVAYHNSLHAADVAQSTHVLLATPALEAVFTDLEILAALFASAIHDVDHPGVSNQFLINTNSELALMYNDASVLENHHLAVGFKLLQAENCDIFQNLSAKQRLSLRRMVIDMVLATDMSKHMNLLADLKTMVETKKVTSLGVLLLDNYSDRIQVLQNLVHCADLSNPTKPLPLYRQWTDRIMAEFFQQGDRERESGLDISPMCDKHTASVEKSQVGFIDYIAHPLWETWADLVHPDAQDLLDTLEDNREWYQSKIPRSPSDLTNPERDGPDRFQFELTLEEAEEEDEEEEEEGEETALAKEALELPDTELLSPEAGPDPGDLPLDNQRT

SEQ ID NO: 1904 - DNA, 744 bp, Homo sapiens
atgcagtatgcatctggggtctgtggccagcatggggacctcaaatctttcctggagccccgcgctccgccagcagggagcgcacacgcaggtgcaaggagctggcacctgggcacacacctggccacacacctgtgcagagccggtggcaggccctcccggcgcaggaatggcgtgcccccagctgccgccacttctgcttttggtgctggtggtgctgctgaaagctggtgtgaattacaatactccctttacagttccgaatccctgaccccgcactggagccccacttcccacagccccggaacggagcccttgacctccactgaccagaccttggagccccctggcccagctccaggtgacactgggccccgtgagttacacaggaacccgagtgtggtggtggtcgtgtgtttgctggtgtctcttttgctcatcgggtctgtggtcatggctgtgagattctgtcaccggaatgagtccaagtttgagaacctggacgaggtgtccatgggatccgtgaatgacagattgtcctttgcccaccacctccaggagtgagccctgaggagccaacagagatgggggcatggatggggctggggttcctggggaggagcagaacctgaggaaataaagcccctaccattcatccaaggcctcgtgtgaaaacacgagttatggactcgtgtgaaaacattaactgagcacctactatgtgctgggctctgtgctggggtc

SEQ ID NO: 1905 - protein, 187 aa, Homo sapiens
MQYASGVCGQHGDLKSFLEPRAPPAGSAHAGARSWHLGTHLATHLCRAGGRPSRRRNGVPPAAATSAFGAGGAAESWCELQYSLYSSESLTPHWSPTSHSPGTEPLTSTDQTLEPPGPAPGDTGPRELHRNPSVVVVVCLLVSLLLIGSVVMAVRFCHRNESKFENLDEVSMGSVNDRLSFAHHLQE

SEQ ID NO: 1906 - DNA, 3767 bp, Homo sapiens
ggctaggtttagcttcaggggcagcccagggcagtgttgctgcatattgcatggatgaaaggctgaaggctgcctcctcttgcaggctggcttctgagattgcaccttcttctcctgctactcctccaaatctatgacccttcaaggcagagctgacctgtccggtaatcaaggcaatgcagccggccgcctagctacagttcacgagccagttgtcacccagtgggcggtgcatcctccagcccccgctcaccccagtctcctggacaaaatggagaaagcgcctccacagccccagcacgagggcctcaagtccaaggagcatcttccgcaacagcctgccgaaggcaagacggcgtcccgccgcgtcccacgcctccgggctgtggtcgagagccaggccttcaagaacatcctggtagacgagatggacatgatgcacgcccgtgcagccacgctcatccaagccaactggaggggctattggctccggcagaagctgatttcccagatgatggcggccaaggccatccaggaggcctggcggcgcttcaacaagagacacatccttcactccagcaagtcgttggtaaagaaaacgagggcggaggagggggacataccttatcacgccccacagcaggtgcgcttccagcatccggaagagaaccgccttctgtccccgcccatcatggtgaacaaggagacccagttcccttcctgtgacaatctggtcctctgcagaccccagtcgtcccccctcctgcagcccccagcagctcagggtaccccagagccctgtgtgcagggtcctcatgctgccagagtccgggggctggccttcctgccacaccagacggtcaccatcagatttccctgcccagtgagtttggacgcaaaatgccagccatgcctgctgaccagaaccatcagaagcacctgcctcgtccacatagagggtgactcagtgaagaccaaacgtgtaagtgcccggaccaacaaagccagggctccggagacaccattgtccagaaggtatgaccaggcagttacgagaccatccagagcccaaacccagggccctgtgaaagcagagacccccaaagcccccttccagatatgtccagggcccatgatcaccaagactctactccagacatatccagtggtctccgtgaccctgccacagacatatccagcgtccacgatgaccaccaccccacccaagactagcccagttcccaaagtaacaataatcaagaccccagcccagatgtatccggggcccacagtgaccaaaactgcacctcacacatgccccatgcccacaatgaccaagatccaggtacaccccacagcctccagaactggcaccccacggcagacatgccctgcgaccatcacggcaaagaaccgacctcaggtttcccttctggcttccatcatgaagagcctgccccaggtatgcccggggcctgcgatggcaaagaccccaccccagatgcacccggtcaccaccccagccaaaaacccattgcaaacatgtctgtcagccacaatgtccaagacttcatcccagaggagcccagttggggtgaccaagccctcaccccagacccgcctgccagccatgataaccaagaccccagcccagttacgctcggtggccaccatcctcaagactctgtgtctggcctctccaacagtggcaaatgtcaaggctccaccccaagtggcggtagcagccggaactcccaacacctcaggctccatccatgagaacccacccaaggccaaggccaccgtgaatgtgaagcaggctgcaaaggtggtgaaagcctcatccccctcctatttggctgaggggaagatcaggtgcctggctcaaccacatccgggaactggggtccccagggctgcagctgagcttcctttggaagccgagaaaatcaagactggcacccagaaacaggcgaaaacagacatggcatttaagaccagtgtggcagtggaaatggctggggctccatcctggacaaaagttgctgaggaaggggacaagccacctcacgtgtatgtgcctgtagacatggctgtcaccctgccccggggacagctggctgccccactgaccaatgcctcatcccagagacatccaccctgcctgtcccagagaccactggccgccccgctgaccaaggcctcatctcagggacatctgcccactgagctgaccaagaccccatccctggcccatctggacacctgtctgagcaagatgcattcccagacacatctggccacaggtgccgtgaaggtccagtcccaagcgcctctagccacctgtctgaccaagacgcagtcccgggggcagccgatcacagacataaccacgtgcctcatcccagcgcaccaggctgctgatctcagcagcaacacccactcccaggtgctcctaacagggtccaaggtgtccaaccacgcctgccagcgcctcggtggcctcagcgccccaccctgggccaagccagaggacagacagacccagccacagccccacggacacgtgccggggaagaccactcaggggggaccatgcccggcagcctgtgaggtccagggtatgctggtgccgccgatggcacccaccggccattccacatgcaacgttgagtcctggggagacaacggagccacacgtgcccagccatcaatgcccggccaggcggtgccctgccaggaggacacgggccccgcggacgctggtgtggttggtggccaatcgtggaaccgcgcatgggagccagccaggggtgctgcgtcctgggacacctggcgcaacaaggcggtggtgcctcccaggcggtccggggagccaatggtgtccatgcaggctgcagaggagatccgcatcctcgcagtgatcactatccaggcgggcgtccgtggctacctggcgcgtcgcaggatccggctgtggcaccggggggccatggtcatccaagctacttggcgcggctaccgtgtgcggcggaacctggcacacctctgcagagccaccacgaccatccagtctgcctggcgcggctacagcacccgccgggaccaagcccggcactggcagatgctccaccccgtcacgtgggtggagctgggcagccgggccggggtcatgtctgaccgaagctggttccaggatggcagagccaggacagtatctgaccatcgctgcttccagtcctgccaggcacacgcttgcagcgtctgccactccctgagctccaggatcgggagcccgcccagcgtggtgatgctagtgggctccagccctcgcacctgtcatacctgtggacgcacacagcccacccgtgtggtgcagggcatgggccagggcactgagggccccggggcagtgtcttgggcctccgcctaccagctggctgccctgagtcccaggcagccgcatcgccaggacaaagcggccacagccatccagtccgcctggaggggctttaagatccgccagcagatgaggcagcagcaaatggcagcgaagatagttcaagccacctggcgaggccaccatacccggagctgtctgaagaacacagaggcgctcttgggaccagcagacccctcggccagctcacggcacatgcattggcctggcatctaggaccctggctccctgcagtggggacttcgtgggaggcactcatggctctctgggtctaatgaataaagtcctccacagcctaaaaaaaaaa

SEQ ID NO: 1907 - protein, 1180 aa, Homo sapiens
MTLQGRADLSGNQGNAAGRLATVHEPVVTQWAVHPPAPAHPSLLDKMEKAPPQPQHEGLKSKEHLPQQPAEGKTASRRVPRLRAVVESQAFKNILVDEMDMMHARAATLIQANWRGYWLRQKLISQMMAAKAIQEAWRRFNKRHILHSSKSLVKKTRAEEGDIPYHAPQQVRFQHPEENRLLSPPIMVNKETQFPSCDNLVLCRPQSSPLLQPPAAQGTPEPCVQGPHAARVRGLAFLPHQTVTIRFPCPVSLDAKCQPCLLTRTIRSTCLVHIEGDSVKTKRVSARTNKARAPETPLSRRYDQAVTRPSRAQTQGPVKAETPKAPFQICPGPMITKTLLQTYPVVSVTLPQTYPASTMTTTPPKTSPVPKVTIIKTPAQMYPGPTVTKTAPHTCPMPTMTKIQVHPTASRTGTPRQTCPATITAKNRPQVSLLASIMKSLPQVCPGPAMAKTPPQMHPVTTPAKNPLQTCLSATMSKTSSQRSPVGVTKPSPQTRLPAMITKTPAQLRSVATILKTLCLASPTVANVKAPPQVAVAAGTPNTSGSIHENPPKAKATVNVKQAAKVVKASSPSYLAEGKIRCLAQPHPGTGVPRAAAELPLEAEKIKTGTQKQAKTDMAFKTSVAVEMAGAPSWTKVAEEGDKPPHVYVPVDMAVTLPRGQLAAPLTNASSQRHPPCLSQRPLAAPLTKASSQGHLPTELTKTPSLAHLDTCLSKMHSQTHLATGAVKVQSQAPLATCLTKTQSRGQPITDITTCLIPAHQAADLSSNTHSQVLLTGSKVSNHACQRLGGLSAPPWAKPEDRQTQPQPHGHVPGKTTQGGPCPAACEVQGMLVPPMAPTGHSTCNVESWGDNGATRAQPSMPGQAVPCQEDTGPADAGVVGGQSWNRAWEPARGAASWDTWRNKAVVPPRRSGEPMVSMQAAEEIRILAVITIQAGVRGYLARRRIRLWHRGAMVIQATWRGYRVRRNLAHLCRATTTIQSAWRGYSTRRDQARHWQMLHPVTWVELGSRAGVMSDRSWFQDGRARTVSDHRCFQSCQAHACSVCHSLSSRIGSPPSVVMLVGSSPRTCHTCGRTQPTRVVQGMGQGTEGPGAVSWASAYQLAALSPRQPHRQDKAATAIQSAWRGFKIRQQMRQQQMAAKIVQATWRGHHTRSCLKNTEALLGPADPSASSRHMHWPGI

SEQ ID NO: 1908 - DNA, 2735 bp, Homo sapiens
aatgtagcctgaaactacatttctcagcggccactggaacgacctcaatctctgcctcctcgccagttcattgtggtcgttgacccggcagcgagctttggagttcatcgagggagaagtcagcgcccagctccgaggttggagcagccccgccgggcaacttgaatttctgcaaacgaacacagcaccgggagctctgcagacctgtgtcggcgcggaacccggactgagacatgccttttgaacttctcagatagaggaaccccagtgaagactgatcagttcttacaattctcaaagcatggcccataaatatgtgggtttgcagtatcacggatcagtgacatttgaggatgtggccatagccttctcccagcaggagtgggagagtctggactcttcccagaggggcttgtacagagatgtgatgttggagaactacaggaacttggtgtcaatgggacattcccgttctaaaccacatgtgatcgccttattggaacaatggaaagagcctgaagtgacagtgaggaaagatggaagaagatggtgcacaggataagaaagctccagtctacaaacaaaacatgccagaagatttttaggcgatgatgccacctgcacatggaaccaaaagatttgcagttggaagatgatacaatcggctgtaaagaaatgcccacctctgaaaactgtccatcttttgctctacatcagaaaataagtagacagaaaccacgtgaatgtcgggaatatggaaagaccctttgtcaagactcaaagcctgttcaacatgaaagaatacatagtagtgaaaaacccaacagatgtaaagaatgtgggaagaactttagtaatggacatcaactcaccatacatcagagattgcatgttggtgagaaaccctataaatatgaaaaatgtgggaaggcctttatcagtggctcagcctttgttaggcatgggagaattcacactggtgagaagccactcaaatgtaagcaatgtggaaagactattagcggtagctatcaacttacagtacataagagtattcatactgggaagaaaccatatgagtgcggggaatgttggaaagcttttctagtatatggaaagcttacccggcatcagagtactcacactggtgaaaaaccctttgggtgtgaggagtgtgggaaggccttcagtaccttttcatacctggttcaacatcagcgaattcataccagtgaaaaaccttacgaatgcaaagaatgtgggaaggcctttagcactagctcaccccttgttaagcatcagagaattcatactggcgagaaaccctatgaatgtaaggagtgtgggaagtccttcactgtgtatggacagcttactcgacatcagagtattcatactggtgagaaaccttttgaatgtaaggaatgtggaaaggcctttagacttagttccttccttcatgcacatcagcgaattcatgcagagataaagccctacggatgcaaggaatgcgggaaaaccttcagtcgtgcctcatatcttgttcaacatggaagacttcacactggcgagaagccctatgaatgtaaggagtgtggcaaggcctttagtactggctcataccttgttcagcatcagaggatccatactggggagaaaccctatgaatgtaaggaatgtggcaaagcctttattagtcgccatcagcttaccgtacatcaaagggttcatactggagagaaaccctatgagtgtaaggaatgtggcaaggccttcagagtgcacgtacatctcacacagcatcggaaaattcatactgatgtaaagccctatgaatgtaaggaatgtggaaagactcttagtcgagcctcgtaccttgtacaacatagcagaatccatactggtaagaagccctatgagtgtaaggagtgtggcaaggccttcagttctggctcataccttgttcagcatcaaagaattcatactggggagaaaccctatgaatgtaacaaatgtgggaaagcctttactgtttatggacaacttattggacatcagagtgttcacactggtgagaaaccttttgaatgtaaggaatgcgggaaggcctttagacttaattcattccttactgaacatcagcgggtacacactggtgagaaaccctttaaatgcaaaaaatgtgggaagacctttagatacagttcagcccttaaagtgcatctgagaaaacatatgagtgttataccctaagagtctgaggagtgtgggaagtgcttcgtgtgtggctcaaacattgttgaacatcggggaatttatgctggtaggaaactttcaaatgtgaagaatattggcaggtctattctcatcttataattcataatataactcagaaaacataagaatattcctttgtcatttataggtttgtaataccaatatttatactggtggaccattcagaaaaagtgggaaacgttattacttaatggttacagcactgacagcatgaacttttatatgatgcatttattctaatgtgattgtatgaacaagtgaataaaaaaccttggacctcctaaaaaaaaaaaaaaaaaaaaaaaaaaaaaaaaaaaaaaaaaaaaaaaaaaaaaaaaaaaaaaaaaaaaaaaaaaaaaaaaaaaaaaaaaaaaaaaaaaaaaaaaaaaaaaaaaaaaaaaaaaaaaaaaaaaaaaaaaaaaaaaaaaaaaaaaaaa

SEQ ID NO: 1909 - protein, 542 aa, Homo sapiens
MEPKDLQLEDDTIGCKEMPTSENCPSFALHQKISRQKPRECREYGKTLCQDSKPVQHERIHSSEKPNRCKECGKNFSNGHQLTIHQRLHVGEKPYKYEKCGKAFISGSAFVRHGRIHTGEKPLKCKQCGKTISGSYQLTVHKSIHTGKKPYECGECWKAFLVYGKLTRHQSTHTGEKPFGCEECGKAFSTFSYLVQHQRIHTSEKPYECKECGKAFSTSSPLVKHQRIHTGEKPYECKECGKSFTVYGQLTRHQSIHTGEKPFECKECGKAFRLSSFLHAHQRIHAEIKPYGCKECGKTFSRASYLVQHGRLHTGEKPYECKECGKAFSTGSYLVQHQRIHTGEKPYECKECGKAFISRHQLTVHQRVHTGEKPYECKECGKAFRVHVHLTQHRKIHTDVKPYECKECGKTLSRASYLVQHSRIHTGKKPYECKECGKAFSSGSYLVQHQRIHTGEKPYECNKCGKAFTVYGQLIGHQSVHTGEKPFECKECGKAFRLNSFLTEHQRVHTGEKPFKCKKCGKTFRYSSALKVHLRKHMSVIP

SEQ ID NO: 1910 - DNA, 3302 bp, Homo sapiens
gggtgcctgacagtgtggatatgacatcagccatggccagaggggcttatggcaggcctggctctgatttttgccatggaacagagggcaaggacttaccttctgagcataacgtttctgtagaaggagtggcacaggacaggagtcccgaggcaactctgtgcccccagaagacctgcccctgtgacatatgtggcctacgtttgaaagacattttgcatttggctgaacaccagacaacacatcccaggcagaaaccatttgtgtgtgaggcatatgtgaaaggctctgagttcagtgcaaaccttccccagaaacaggtgcagcagaacgtacacaaccctatcagaacggaggagggccaggcttcccctgtaaagacctgcagagaccacacatcagatcagctttccacctgcagggagggtgggaaggactttgtggccacagcagggtttctgcagtgtgaggtcactcccagcgatggggagccgcacgaggccaccgaaggtgtggtggattttcacattgcactaaggcataacaagtgctgtgaatctggggatgccttcaataacaaatccactcttgttcagcaccagagaatccacagcagagaaaggccttatgaatgcagcaaatgtggaatcttcttcacttacgccgctgacctcactcaacaccagaaagttcacaatagaggaaaaccgtatgagtgctgtgaatgtggaaaattcttcagccagcactccagccttgttaaacatcgcagggttcacaccggtgaaagccctcacgtgtgtggtgactgtgggaaattcttcagccgaagctccaacctcattcagcataagagggttcacactggtgaaaagccatatgagtgcagcgactgtgggaagttcttcagccagcgttccaacctcattcatcataagagggttcatacgggcagaagtgcccatgagtgcagtgaatgtgggaaatctttcaactgcaactccagcctaattaaacattggagagttcacactggagaaagaccttacaagtgtaacgaatgtgggaaattcttcagccacattgccagcctcattcaacatcagatagttcacactggcgagcggcctcacgggtgtggtgagtgtgggaaagccttcagccgaagctctgacctcatgaaacatcagcgagttcacactggtgagcggccttatgaatgcaatgaatgtgggaagttatttagccagagctccagcctcaatagccatcggagacttcacactggtgaacggccttaccagtgcagtgaatgtgggaaattctttaaccaaagctccagcctcaataaccaccggagacttcacaccggcgagcggccttatgagtgcagcgaatgtgggaaaaccttcaggcagaggtccaatctgaggcagcacctgaaagttcacaaaccagacaggccttacgaatgcagcgaatgtgggaaagccttcaaccaaaggcctaccctcattcggcatcagaagattcacatcagagaaaggagcatggagaatgtgctccttccctgttcacagcacacaccagagataagctctgagaacagaccttatcagggcgctgtcaactacaagttgaaacttgttcatccaagtacccaccctggggaggttccctaggaatgctagctgtgttggaagctttctggagacaagttacattctcttactgtagagtttatcagcgttttttcactgctggggttgtgatagaagccatgtcagcaccacacactgcagctctccaaagagtgtgtccaccactccactgtgctcagggaaggcagacctctcctctctctttccaatccctaaagggaattaggagtagtctgaagccttgggaagatgtcattcccgccctgtatggctggtttagccatggacatgaccagcttttggctgtgaagacctgagcagggttttgccaacagcttgttctagagaaggtttccctttttctgggacattgttggtctcatgttatgcctgtgaaggatttgtccagccttcatgttactctacacaacaacttatctcctgtgtattgccctggttcatgtgatgataatggccttatgataaagccgcctttagtcttccatgttctgatcactgtgtggggtggttcaagagcagagttaagatctaccaaactgaaggggtctccagattatcttggaggggacaggaggatggcagagaaacaactgtcaatccagatttgacctcatttgcattgccaccaaggcctcctaggaaaaattgtaggaatttatgggtataatattgtggtctgaatggcgtgaatttttatcccgaggagggggcagttgtgacaacctccagtgcatgtgggaacagcatgaattgggtcccttattcccagggggtgccccatattccccaatactgtaaagcagatgctgtttagcacctgccaaggagccatatgccctgaagttcagcattaggcaggtatctcttaactgtaagacataccaggcccagctgggaccataatttgtacagaaacactggatgtgattaatagggagtaggcgagattatagcaaaccagcagaaatggaactctgctaaatgtgcatccgtgaatgctcccttgaatgtggctgtgcaggattcagggtttgcagaaattctcaggacctcagacctctgtcctatgactaatgttactggcagagcaaataatctaaaggttttggttttgtggattaccatctccgtgctgtgcatctgaaggccagtgctgtgctggcaggaaaatagggactgagaaaaagcagatcctatactatagggactgtagtatctatgacgtagccagccattctttgctcccaaggcaagaagaaagagatgacagagtcaatatagggttgccaaatcggattttctaaaatgagtaggaagttggatttttatgtgcaacagtttcttttaatgctttgttgatatgtgattgtcatgcaataattattcatatttggtaagttttgtacatatattatgtacactcagggaaccaataccataatcatgataatgaacgtatccatcacctgcaaagctacctcatgcccctttacattccctccttgccttccctaggaaaccgttgatttacattttttactttagatttgtttgccttttctagaattaacacaattggaatcataaagtatttatactctcaaaaaaaaaaaaaaaaaa

SEQ ID NO: 1911 - protein, 553 aa, Homo sapiens
MTSAMARGAYGRPGSDFCHGTEGKDLPSEHNVSVEGVAQDRSPEATLCPQKTCPCDICGLRLKDILHLAEHQTTHPRQKPFVCEAYVKGSEFSANLPQKQVQQNVHNPIRTEEGQASPVKTCRDHTSDQLSTCREGGKDFVATAGFLQCEVTPSDGEPHEATEGVVDFHIALRHNKCCESGDAFNNKSTLVQHQRIHSRERPYECSKCGIFFTYAADLTQHQKVHNRGKPYECCECGKFFSQHSSLVKHRRVHTGESPHVCGDCGKFFSRSSNLIQHKRVHTGEKPYECSDCGKFFSQRSNLIHHKRVHTGRSAHECSECGKSFNCNSSLIKHWRVHTGERPYKCNECGKFFSHIASLIQHQIVHTGERPHGCGECGKAFSRSSDLMKHQRVHTGERPYECNECGKLFSQSSSLNSHRRLHTGERPYQCSECGKFFNQSSSLNNHRRLHTGERPYECSECGKTFRQRSNLRQHLKVHKPDRPYECSECGKAFNQRPTLIRHQKIHIRERSMENVLLPCSQHTPEISSENRPYQGAVNYKLKLVHPSTHPGEVP

SEQ ID NO: 1912 - DNA, 2715 bp, Homo sapiens
gtcgggtgggggcggcggccgcggaaggccaggccggtgccctgcggggacgcccagcgcagcccagccccgcgcagcccagccctgccctgccctgccctgccctgccctgccctgcgcccggggcgcgcccaccgcgccgcatccatgttcgacaccacaccccactctggccggagcacgccaagcagctccccatcgctccggaaacggctgcagctcctgcccccaagccggcccccacctgagccagaaccaggcaccatggtggagaagggatcagatagctcctcagagaagggtggggtgcctgggacccccagcacccagagcctaggcagccggaacttcatccgcaacagcaagaagatgcagagctggtacagtatgctgagccccacttataagcagcgtaatgaggacttccggaaactgttcagcaaactccccgaagcagaacgcctcattgtggattactcctgcgccctgcagcgtgagatcctgctccagggccgcctctacctctctgagaactggatctgcttctacagcaacatcttccgctgggagaccacgatctccatccagctgaaggaagtgacatgtctgaagaaggaaaagacggccaagctgatccccaacgccatccagatctgcacggagagcgagaagcatttcttcacttcctttggggcccgtgaccgctgcttcctcctcatcttccgcctctggcagaatgcactgcttgaaaagacgctgagtccccgcgagctctggcacctggtgcatcagtgctacggctcagagctgggcctcaccagtgaggatgaggactatgtctcccccttgcagctgaacggtctggggacccccaaggaagtgggagatgtgatcgccctgagcgacatcacctcctcgggggcagctgaccgcagccaggagccaagcccagtgggttcgcgccgtggccatgtcacgcccaacctttcccgagccagcagcgacgcagaccatggggcagaggaggacaaggaggagcaggtagacagccagccagacgcctcctccagccagacagtgaccccggtggctgaacccccgagcacagagcccacccagcctgacgggcccaccaccctgggccccttggatctgctgcccagtgaggagctattgacagacacaagtaactcctcttcatccactggggaggaagcagacttggctgccctgcttcccgacctctccggccgcctcctcatcaactctgtcttccatgtgggcgctgagcggctccagcagatgctcttctcggactcgcccttcctccagggcttcctacagcagtgcaagttcacagacgtgaccctgagcccctggagtggggacagcaagtgccaccagcgccgggtgctgacgtacaccatccccatcagcaacccactgggccccaagagcgcctccgtggtggagacacagacgctgttccggcgcggcccccaggccggcgggtgtgtggtggactccgaggtgctgacgcagggcatcccctaccaggactacttctacactgcccaccgctactgcatcctgggtctggcccggaacaaggcgcggctccgagtgtcttctgagatccgctaccgaaagcagccgtggagcctggtgaagtcgctcattgagaagaactcgtggagcggcattgaagactatttccaccatctggagcgagagctcgccaaggctgagaagctgtctctggaggaaggcgggaaggatgcccggggcttgctatccggcctgcggcggcggaagcggcccctgagctggcgggctcacggggacgggccccagcacccagatcctgacccctgtgcccgggccggcattcacacctcgggctccctcagctcccgcttctccgaaccatctgtggaccagggccccggggcaggcatccccagtgccctggttctcatcagcattgtgatctgtgtgagccttatcatcctcatcgccctcaacgtcctgctcttctaccgcctctggtccctggaaaggacagcccacacctttgagtcctggcacagcctggccctggccaagggcaagttcccccagacggccacagagtgggccgagatcctggcgctgcagaagcaattccacagcgtggaggtgcacaagtggaggcagatcctgcgggcctccgtggagctcctggatgagatgaagttctcgctggagaagctgcaccaaggcatcacagtctcagaccctccctttgacacccagccccggcccgatgacagcttttcctgaggaccccggccacgcagctgttcccccacatggacagatggacacacagagcctcggcggccactgctggcacggtgtgagcgccaggcatctcccacccgcccctcccgacggcccaaccaggggctgtgcagacgtggggaccacggaaccgagatgcactttagaccagggagctggcccggcctctggcaggccccccactaacttattttgcccggctgaggttgtggggggcgcctcctggggtgcacgattccctcagctctgggtttaatgtattatatttatttggggccgacagtgccccaataaagggtcagaagtgaaaaaaaaaaaaaaaaaaaaaaaaaaaaaaaaaaaaaaaaaaaaaaaaaaaaaaaaaaaaaaaaa

SEQ ID NO: 1913 - protein, 724 aa, Homo sapiens
MFDTTPHSGRSTPSSSPSLRKRLQLLPPSRPPPEPEPGTMVEKGSDSSSEKGGVPGTPSTQSLGSRNFIRNSKKMQSWYSMLSPTYKQRNEDFRKLFSKLPEAERLIVDYSCALQREILLQGRLYLSENWICFYSNIFRWETTISIQLKEVTCLKKEKTAKLIPNAIQICTESEKHFFTSFGARDRCFLLIFRLWQNALLEKTLSPRELWHLVHQCYGSELGLTSEDEDYVSPLQLNGLGTPKEVGDVIALSDITSSGAADRSQEPSPVGSRRGHVTPNLSRASSDADHGAEEDKEEQVDSQPDASSSQTVTPVAEPPSTEPTQPDGPTTLGPLDLLPSEELLTDTSNSSSSTGEEADLAALLPDLSGRLLINSVFHVGAERLQQMLFSDSPFLQGFLQQCKFTDVTLSPWSGDSKCHQRRVLTYTIPISNPLGPKSASVVETQTLFRRGPQAGGCVVDSEVLTQGIPYQDYFYTAHRYCILGLARNKARLRVSSEIRYRKQPWSLVKSLIEKNSWSGIEDYFHHLERELAKAEKLSLEEGGKDARGLLSGLRRRKRPLSWRAHGDGPQHPDPDPCARAGIHTSGSLSSRFSEPSVDQGPGAGIPSALVLISIVICVSLIILIALNVLLFYRLWSLERTAHTFESWHSLALAKGKFPQTATEWAEILALQKQFHSVEVHKWRQILRASVELLDEMKFSLEKLHQGITVSDPPFDTQPRPDDSFS

SEQ ID NO: 1914 - DNA, 1521 bp, Homo sapiens
gctgggcccccggcggtaaccggagcgggggggccgcgccccccctcctcccccctcgccggtcccagagccgcagctgctgcgcccgcgcgctcccggggacattctaaccgccgccaggtcccgccgcctctcgccccgctattaataccggcggcccgggaggggggcgcagcacgcgccgcgcagccatggggaggctgctggccttagtggtcggcgcggcactggtgtcctcagcctgcgggggctgcgtggaggtggactcggagaccgaggccgtgtatgggatgaccttcaaaattctttgcatctcctgcaagcgccgcagcgagaccaacgctgagaccttcaccgagtggaccttccgccagaagggcactgaggagtttgtcaagatcctgcgctatgagaatgaggtgttgcagctggaggaggatgagcgcttcgagggccgcgtggtgtggaatggcagccggggcaccaaagacctgcaggatctgtctatcttcatcaccaatgtcacctacaaccactcgggcgactacgagtgccacgtctaccgcctgctcttcttcgaaaactacgagcacaacaccagcgtcgtcaagaagatccacattgaggtagtggacaaagccaacagagacatggcatccatcgtgtctgagatcatgatgtatgtgctcattgtggtgttgaccatatggctcgtggcagagatgatttactgctacaagaagatcgctgccgccacggagactgctgcacaggagaatgcctcggaatacctggccatcacctctgaaagcaaagagaactgcacgggcgtccaggtggccgaatagccctggccctgggccccgcctcaaggaagagccagccgtaatggggactctccaggcaccgcctgcccccagcgtgggggtggccactcctgggccccagaaagcctcagagtcctgccgacggagccactggggtgggagggggcagggggcttggctcgcacccccactttcgcctcctccagctcctgccccgccggccgcgcaccgccatgcatgatgggtaaagcaatactgccgctgcccccaccctgcttctgctgcctgtttggggaggggggcggtgaggtgggggcagcggccccgcacccctcctccttgctgatttgcacacattggccgcttcagacacgcacttctggggccagcccctccccgcctcctccctgcctggcggcaggggtcgcgatgatgggctggagcagtttggggcagggggttctgggacccactccgactccccctccccggcatcatttcccctcccgcttcctccggctggacctggggtcccccctccctgtaatgcactcctgccccggcccaacctcgccctctctcaccagccttgaactgtggccacctagaaaggggcccattcagcctcgtctctttacagaagtagttttgttcatgaaataaagactcttggacttgaaaaaaaaaaaaaaaa

SEQ ID NO: 1915 - protein, 218 aa, Homo sapiens
MGRLLALVVGAALVSSACGGCVEVDSETEAVYGMTFKILCISCKRRSETNAETFTEWTFRQKGTEEFVKILRYENEVLQLEEDERFEGRVVWNGSRGTKDLQDLSIFITNVTYNHSGDYECHVYRLLFFENYEHNTSVVKKIHIEVVDKANRDMASIVSEIMMYVLIVVLTIWLVAEMIYCYKKIAAATETAAQENASEYLAITSESKENCTGVQVAE

SEQ ID NO: 1916 - DNA, 1170 bp, Homo sapiens
gctgggcccccggcggtaaccggagcgggggggccgcgccccccctcctcccccctcgccggtcccagagccgcagctgctgcgcccgcgcgctcccggggacattctaaccgccgccaggtcccgccgcctctcgccccgctattaataccggcggcccgggaggggggcgcagcacgcgccgcgcagccatggggaggctgctggccttagtggtcggcgcggcactggtgtcctcagcctgcgggggctgcgtggaggtggactcggagaccgaggccgtgtatgggatgaccttcaaaattctttgcatctcctgcaagcgccgcagcgagaccaacgctgagaccttcaccgagtggaccttccgccagaagggcactgaggagtttgtcaagatcctgcgctatgagaatgaggtgttgcagctggaggaggatgagcgcttcgagggccgcgtggtgtggaatggcagccggggcaccaaagacctgcaggatctgtctatcttcatcaccaatgtcacctacaaccactcgggcgactacgagtgccacgtctaccgcctgctcttcttcgaaaactacgagcacaacaccagcgtcgtcaagaagatccacattgaggtagtggacaaaggtgagtcgggtgctgcctgcccctttaccgtcacccaccggagagccagatggagggacagatggcaggcagtggacaggacaggctggctctgtgcctggccagccaaccgcccacagcagcgggctgagggggaggggagcagcccctcctgcccactccagctctggcctctgtttctctccagcccacggagaggtcaaagcatgcctgtcccccacagacgctccgggtacagaacccagctctgtcacctgtgctgtatgacctctggcaggtgccttctgtctctgagccaaagggttgtcctgggcttgcccgggataataatccgatgtgtttctcggggtgtggtttgagccattcttccatcatggggttcatgaggattgagcagctgcaggcacacgcctggcttccagcagagccttgcaggtggtggcgagggtggcggttcttactgttcgagtagctcagccctgctgccctctgtggtgatgaggcaagagagcgtgccacctagagcagagt

SEQ ID NO: 1917 - protein, 268 aa, Homo sapiens
MGRLLALVVGAALVSSACGGCVEVDSETEAVYGMTFKILCISCKRRSETNAETFTEWTFRQKGTEEFVKILRYENEVLQLEEDERFEGRVVWNGSRGTKDLQDLSIFITNVTYNHSGDYECHVYRLLFFENYEHNTSVVKKIHIEVVDKGESGAACPFTVTHRRARWRDRWQAVDRTGWLCAWPANRPQQRAEGEGSSPSCPLQLWPLFLSSPRRGQSMPVPHRRSGYRTQLCHLCCMTSGRCLLSLSQRVVLGLPGIIIRCVSRGVV

SEQ ID NO: 1918 - DNA, 1783 bp, Homo sapiens
tcgagcccgctttccagggaccctacctgagggcccacaggtgaggcagcctggcctagcaggccccacgccaccgcctctgcctccaggccgcccgctgctgcggggccaccatgctcctgcccaggcctggagactgacccgaccccggcactacctcgaggctccgcccccacctgctggaccccagggtcccaccctggcccaggaggtcagccagggaatcattaacaagaggcagtgacatggcgcagaaggagggtggccggactgtgccatgctgctccagacccaaggtggcagctctcactgcggggaccctgctacttctgacagccatcggggcggcatcctgggccattgtggctgttctcctcaggagtgaccaggagccgctgtacccagtgcaggtcagctctgcggacgctcggctcatggtctttgacaagacggaagggacgtggcggctgctgtgctcctcgcgctccaacgccagggtagccggactcagctgcgaggagatgggcttcctcagggcactgacccactccgagctggacgtgcgaacggcgggcgccaatggcacgtcgggcttcttctgtgtggacgaggggaggctgccccacacccagaggctgctggaggtcatctccgtgtgtgattgccccagaggccgtttcttggccgccatctgccaagactgtggccgcaggaagctgcccgtggaccgcatcgtgggaggccgggacaccagcttgggccggtggccgtggcaagtcagccttcgctatgatggagcacacctctgtgggggatccctgctctccggggactgggtgctgacagccgcccactgcttcccggagcggaaccgggtcctgtcccgatggcgagtgtttgccggtgccgtggcccaggcctctccccacggtctgcagctgggggtgcaggctgtggtctaccacgggggctatcttccctttcgggaccccaacagcgaggagaacagcaacgatattgccctggtccacctctccagtcccctgcccctcacagaatacatccagcctgtgtgcctcccagctgccggccaggccctggtggatggcaagatctgtaccgtgacgggctggggcaacacgcagtactatggccaacaggccggggtactccaggaggctcgagtccccataatcagcaatgatgtctgcaatggcgctgacttctatggaaaccagatcaagcccaagatgttctgtgctggctaccccgagggtggcattgatgcctgccagggcgacagcggtggtccctttgtgtgtgaggacagcatctctcggacgccacgttggcggctgtgtggcattgtgagttggggcactggctgtgccctggcccagaagccaggcgtctacaccaaagtcagtgacttccgggagtggatcttccaggccataaagactcactccgaagccagcggcatggtgacccagctctgaccggtggcttctcgctgcgcagcctccagggcccgaggtgatcccggtggtgggatccacgctgggccgaggatgggacgtttttcttcttgggcccggtccacaggtccaaggacaccctccctccagggtcctctcttccacagtggcgggcccactcagccccgagaccacccaacctcaccctcctgacccccatgtaaatattgttctgctgtctgggactcctgtctaggtgcccctgatgatgggatgctctttaaataataaagatggttttgatt

SEQ ID NO: 1919 - protein, 417 aa, Homo sapiens
MAQKEGGRTVPCCSRPKVAALTAGTLLLLTAIGAASWAIVAVLLRSDQEPLYPVQVSSADARLMVFDKTEGTWRLLCSSRSNARVAGLSCEEMGFLRALTHSELDVRTAGANGTSGFFCVDEGRLPHTQRLLEVISVCDCPRGRFLAAICQDCGRRKLPVDRIVGGRDTSLGRWPWQVSLRYDGAHLCGGSLLSGDWVLTAAHCFPERNRVLSRWRVFAGAVAQASPHGLQLGVQAVVYHGGYLPFRDPNSEENSNDIALVHLSSPLPLTEYIQPVCLPAAGQALVDGKICTVTGWGNTQYYGQQAGVLQEARVPIISNDVCNGADFYGNQIKPKMFCAGYPEGGIDACQGDSGGPFVCEDSISRTPRWRLCGIVSWGTGCALAQKPGVYTKVSDFREWIFQAIKTHSEASGMVTQL

SEQ ID NO: 1920 - DNA, 2363 bp, Homo sapiens
tcgagcccgctttccagggaccctacctgagggcccacaggtgaggcagcctggcctagcaggccccacgccaccgcctctgcctccaggccgcccgctgctgcggggccaccatgctcctgcccaggcctggagactgacccgaccccggcactacctcgaggctccgcccccacctgctggaccccagggtaaggacaagggcccccagactcacagttccagccctgaggacaggggttccctcatccccccacccagcctaatgcccacctcctaatagaggggttcctggggacctgaagagggggcactatgacgtctccccaagcacctaggtgttctgtcctgctcttccttcagactcagccgttggaccccagtcctttcctccccagacccaggagttccagccctcaggcccctcctccctcatactagggagtcctggcccccaaattcctcctttcccaagacttatgatttcaggtcctcagctgtctcctccctcaaaccgggatcctcagtcccctgctccaccaggctcaggcatgggggtccccatccctgcaaatccaggcgtccccccgctgctggtcagacactgaccccatccttgaacccagcccaatctgcgtccgtgatcacggcgtgctctggccaaggcccagtccctacagcctgcctggatggacgcctgggactgggggcgccaggactgggctgggctgggctcccccaggccctgcctccccgtccatctcctcacaggtcccaccctggcccaggaggtcagccagggaatcattaacaagaggcagtgacatggcgcagaaggagggtggccggactgtgccatgctgctccagacccaaggtggcagctctcactgcggggaccctgctacttctgacagccatcggggcggcatcctgggccattgtggctgttctcctcaggagtgaccaggagccgctgtacccagtgcaggtcagctctgcggacgctcggctcatggtctttgacaagacggaagggacgtggcggctgctgtgctcctcgcgctccaacgccagggtagccggactcagctgcgaggagatgggcttcctcagggcactgacccactccgagctggacgtgcgaacggcgggcgccaatggcacgtcgggcttcttctgtgtggacgaggggaggctgccccacacccagaggctgctggaggtcatctccgtgtgtgattgccccagaggccgtttcttggccgccatctgccaagactgtggccgcaggaagctgcccgtggaccgcatcgtgggaggccgggacaccagcttgggccggtggccgtggcaagtcagccttcgctatgatggagcacacctctgtgggggatccctgctctccggggactgggtgctgacagccgcccactgcttcccggagcggaaccgggtcctgtcccgatggcgagtgtttgccggtgccgtggcccaggcctctccccacggtctgcagctgggggtgcaggctgtggtctaccacgggggctatcttccctttcgggaccccaacagcgaggagaacagcaacgatattgccctggtccacctctccagtcccctgcccctcacagaatacatccagcctgtgtgcctcccagctgccggccaggccctggtggatggcaagatctgtaccgtgacgggctggggcaacacgcagtactatggccaacaggccggggtactccaggaggctcgagtccccataatcagcaatgatgtctgcaatggcgctgacttctatggaaaccagatcaagcccaagatgttctgtgctggctaccccgagggtggcattgatgcctgccagggcgacagcggtggtccctttgtgtgtgaggacagcatctctcggacgccacgttggcggctgtgtggcattgtgagttggggcactggctgtgccctggcccagaagccaggcgtctacaccaaagtcagtgacttccgggagtggatcttccaggccataaagactcactccgaagccagcggcatggtgacccagctctgaccggtggcttctcgctgcgcagcctccagggcccgaggtgatcccggtggtgggatccacgctgggccgaggatgggacgtttttcttcttgggcccggtccacaggtccaaggacaccctccctccagggtcctctcttccacagtggcgggcccactcagccccgagaccacccaacctcaccctcctgacccccatgtaaatattgttctgctgtctgggactcctgtctaggtgcccctgatgatgggatgctctttaaataataaagatggttttgatt

SEQ ID NO: 1921 - protein, 417 aa, Homo sapiens; identical to SEQ ID NO: 1919

SEQ ID NO: 1922 - DNA, 2673 bp, Homo sapiens
atgggaaccaggatccctgggagacccccaggccccctggaccctcgaacaatggaagtcctacagaaccaagtgacttggagcaaggagatcagagcctcgctcctgtacccctatgggctggagtgtggggatcaggccctccctgcagaggatgatgacttctctgaggagctgcggctgctggagcccttcatgctctttgaagccacacacgggacggcctatttctgcaccaatgggctggtgtccttcggggagcctgtggctctcttcacactggaggcatttccccaggagatgggccaggccttcgcagtcccgttctgggccaatgggtccacactgagcaggggccagatgtggtaccggcagagccgccagccagagctgccgcagcaggtgaacaccttccaggaggtgctggccctgggcagcggcccctcctgggtgctgtttcaccacaaggacatccagtggaccatgggggtggccagcggtgggagcccccaccacggcctggggggcattgcggcccaggcaggcttcaacagcggccgacagagggactacttcacccttcctggctcccggacctcaggcatcctgaatgtggcagacaccagcaatgtgggcatccccaggtgcctctttgtggaacagcagtgcctgcagccaccacactgtgggcaggaaggccgggtgtggtgctggccagagggctgccagggccacccgcacacactctccagatggcagctgtggctccagccctgccacttcgtcctggccctgcttcctggcatctgcgtggaggtggagttgaggaggggaggcccggtggcagaggccctggtgcggctggtcatccatggctgggatgtgcagggccacattctgcacctgggaccgcaggagctgagccccaactgccgtgagctgtgtgagtgcaaggaggctgggcagccaccccactgcagcccccaggcgtgtgaggacggggaggcctgcttcctgctcaccggggcctggtactgtggggtccggagaggtagcagctgggtgtcaggtgacccccattaccacagcttcaacagcacagccctcacagcccagggtgcctgtcactatgtgctgagccgcacctgtcaggccggcctgagggcacaagctttcacagtgtgggtggacaatgagtacctaagtcccacggccctcatgactggggctcggccgatcgaagtggacgtgcacggggtgaaggtgatgatggaggctcagacccccgggagggcacaggttaacaggacccaggcccacctgcccctacgcctggctggcggccaagtgcacgtctatttcagcgattctggggccatgctggagactgacgctggcctcttggtctcctacgactggagccaccatgtatccattatggtgcctgagtcctacgctggcaccctctgcagcctgtgtggggacttcaacggggacccccatgatgacttccatgcccctgatggctccctcctgcctgacccggaggtgtttgcactcagcttgaagggcctggattccccagccagttgctccaccgtgggcactgcccctctgtgcccccatgaccgagagggccggtaccagtcactggctttctgtgggctgctgggtgcccacgatgggcccttccaggcctgtgatgagctggcccaggcccaagtccacatggagaactgcatccgtgacctctgtgccacaaggggttcccggcagatcctgtgcgaggctctggggagctatgtccagcagtgccagcagcacggcctcctagtgaggccctggagacacctggtggactgcggggaatgtgagtctccgattgacttctgcctgaccgcgggctctgcccttggggagactgcccaggcagaagttgggatgaggttagcagtgggcagtagtactggctggtgcccaaaggacaaatgtctgcggcctctcacccttgtcctgctgccaaagctgacctggccccccgacagccactacgagctgtgtggcttctcctgtcccagctcctgcaccgagcctgccctgcccgacagctgtctgacaccatgccaggatggctgccagtgtgacccaggatttgtgctcagtggcacggactgcttgacccccatccagtgcagctgctccatggggggcagataccacctggccggggagccattctgggctagggagcactgtgagcaattctgccactgcgaggcttccacccatgctgtgaatggtgagacaacagccctccccgtaagcctgaatgggggcagccttgccgtccactggaatggcctcttctccctgctgcagtcagactttggcctctggctcagcacagatctcacctacagccttaccctcaccctgccccacctctacaagggtcacacctgggcagattgtgtcagccaggaggcagtgctggctcctgcaggacccccaggacccttcagccactgccactgggagatcaacccagacccatatgtttccagctgtgtcgatgatttgtgtcttgctggggatgatgaccacatcctctgcctggccctgcagacatatgccgccatctgccagggcgccaacatcaccatcaggcactag

SEQ ID NO: 1923 - protein, 890 aa, Homo sapiens
MGTRIPGRPPGPLDPRTMEVLQNQVTWSKEIRASLLYPYGLECGDQALPAEDDDFSEELRLLEPFMLFEATHGTAYFCTNGLVSFGEPVALFTLEAFPQEMGQAFAVPFWANGSTLSRGQMWYRQSRQPELPQQVNTFQEVLALGSGPSWVLFHHKDIQWTMGVASGGSPHHGLGGIAAQAGFNSGRQRDYFTLPGSRTSGILNVADTSNVGIPRCLFVEQQCLQPPHCGQEGRVWCWPEGCQGHPHTLSRWQLWLQPCHFVLALLPGICVEVELRRGGPVAEALVRLVIHGWDVQGHILHLGPQELSPNCRELCECKEAGQPPHCSPQACEDGEACFLLTGAWYCGVRRGSSWVSGDPHYHSFNSTALTAQGACHYVLSRTCQAGLRAQAFTVWVDNEYLSPTALMTGARPIEVDVHGVKVMMEAQTPGRAQVNRTQAHLPLRLAGGQVHVYFSDSGAMLETDAGLLVSYDWSHHVSIMVPESYAGTLCSLCGDFNGDPHDDFHAPDGSLLPDPEVFALSLKGLDSPASCSTVGTAPLCPHDREGRYQSLAFCGLLGAHDGPFQACDELAQAQVHMENCIRDLCATRGSRQILCEALGSYVQQCQQHGLLVRPWRHLVDCGECESPIDFCLTAGSALGETAQAEVGMRLAVGSSTGWCPKDKCLRPLTLVLLPKLTWPPDSHYELCGFSCPSSCTEPALPDSCLTPCQDGCQCDPGFVLSGTDCLTPIQCSCSMGGRYHLAGEPFWAREHCEQFCHCEASTHAVNGETTALPVSLNGGSLAVHWNGLFSLLQSDFGLWLSTDLTYSLTLTLPHLYKGHTWADCVSQEAVLAPAGPPGPFSHCHWEINPDPYVSSCVDDLCLAGDDDHILCLALQTYAAICQGANITIRH

SEQ ID NO: 1924 - DNA, 4461 bp, Homo sapiens
accttggccgggattaccctccgagttccaggccatgacaaatgacatcactcccggcccaggcttaaaatctccccatgtgaggggatgtgtttccttcagcctctgctgtctggccgctctgtctaggtcctgggccacgggagagccccgtccctcctttctgaaggccccctgacttgggcctcagtgtccccgaagatcatgatggcgtatatgaacccggggccccactattctgtcaacgccttggccctaagtggccccagtgtggatctgatgcaccaggctgtgccctacccaagcgcccccaggaagcagcggcgggagcgcaccaccttcacccggagccaactggaggagctggaggcactgtttgccaagacccagtacccagacgtctatgcccgtgaggaggtggctctgaagatcaatctgcctgagtccagggttcaggtttggttcaagaaccggagggctaaatgcaggcagcagcgacagcagcagaaacagcagcagcagcccccagggggccaggccaaggcccggcctgccaagaggaaggcgggcacgtccccaagaccctccacagatgtgtgtccagaccctctgggcatctcagattcctacagtccccctctgcccggcccctcaggctccccaaccacggcagtggccactgtgtccatctggagcccagcctcagagtcccctttgcctgaggcgcagcgggctgggctggtggcctcagggccgtctctgacctccgccccctatgccatgacctacgccccggcctccgctttctgctcttccccctccgcctatgggtctccgagctcctatttcagcggcctagacccctacctttctcccatggtgccccagctagggggcccggctcttagccccctctctggcccctccgtgggaccttccctggcccagtcccccacctccctatcaggccagagctatggcgcctacagccccgtggatagcttggaattcaaggaccccacgggcacctggaaattcacctacaatcccatggaccctctggactacaaggatcagagtgcctggaagtttcagatcttgtagaggacgcagtctccatctctctccatcgggcctcgggaccctttctcttctgaatctgcttccctgcagtttagatcccgggatggcattcctgagaaagcaacccgaaccagctgtccttctgacagctcggtgttcagcttacagagaccacccctttcctccacagggagaggctcctccctctcctgggacagctcacaggtcctagtgattctctcaaccctaacaccgtctggcacgattgtgaccgctgaagtacaccacgagctccaggcttcagaaagtggtgctgagaacttgctccaagaagaagtcaaaccaaacttgcagttgatttggggtcatgtttaggtcagaatcaccgtgcccttgaacaagcaggtaggggggcttgataacttaactttccacgtggacagaatttttttttttgttttgtttttgttttgcagacacagtctagctctgtcgcccaggctggagtgcagtggcacgatctcagctcactgcaagctctacctcccgggttcacgccattctcctgcctcagcctcccgagtagctgggactacagatgcccaccaccaggcccggctaattttttttgtatttttagtagagacggggtttcaccgtgttagccaggatggtctcgatctcctgacctcgtgatccgcccgcctcggcctcccaaagtgctaggattacaggcgtgagccaccgcgcccggcccttttttttttttttttttttaattgagacggagtctcactcttttgcttaggctggagtgcagtggtgtgatctcagctcactgactgcaacctccacctcccgggttgaagcgttgctcctgcctcaatctcccaattagctgggattacaggtgtgctccatcatgcccggctaatttttctattattagtagagacagggttttaccatgttggccaggctggtctggaacccctgacctcaagtgatccgcctgcctcggcctcccaaagtgctgggattacaggcatgagccattgtgcctggccctacacgtggacacttctttagcatatggttagggacctttctagaaattccaaagacagactttaagaagccccgtcgggaaaccttaggccaatgatgtggttacattaaaaataaattatctgggaatttcacagacttcacaaatgtcaggcttacatggtaggtttaggggaccgtttgagagacaaagatctacattcatatatgtagctatacatatatgtactttttcttcttagtttctttttaaagacattttatcactcattcgctcattagcacattgggaatgtgtgtatttggtagggaaatgaaaggcaccttgcctgttccatctctactccttttttcttttgttttaggattttctaaaggtgagacactggtggaactggggtagctgcttgggacgtaccacctatagttgtggctatttcacagagaagcagcagctagacagactcccatctgtaaataaacaagagataggaagagggggaaatagatttggaggaggcagccctacatttcaaacatacattcccttttttagatttttttttttttttttttggttttcagttttgatggtgggattggaaaatagagcttggcttgaggacattttcctggggtggcaccattatttcttgaaatagaatcttacttatggtgacactggcaagcacttgtgagaacctgaagacggattgaggtcatttgatgctcagaagttgggtgctgggtccctgccttctcagtccgagttctcctttcatttttgggtggggaggcgggttccaagagcccttcattggtggagttcacaaggcaaggtgtaaaaaaaaaagtagggcaggaagacagtggtgtgctggcagaggtctaacaatgggctctccaaggaagaggaaaaggttggttgtggagtgtttgtcagtttccgtggtgtaaatactcccaccacggctgacttcaagctagcaaccggaggtcactgaactaagagttgggaagagatagggcacaatatatgcttacgagttggtacacaccgtcagcagcagccagggtcaggagaaaggcgagatgtgaagagaggccgggaggtatcagatgacgtttccagcactagaccagaagaggtgcacacagcctagaccccctgaggggtacaccctgatctctagagcccacaaagaggtttttattcaacataaaacgtgttcatctctcataggcctgagtcatgctgggttctgggacattaagcccaggagtgggccgggtgcggtggctcacgcctgtaatcccagcactttgggaggccgaggcgggtggatcacctgaggtcaggagttcgagaccagcctggccaacatggtgaaaccctgtctctactaataatacaaaaattagccgggcatggtggcacgcgcctgtaatcccagctactcgggaggctgaggcaggagaattgctggaacccgggaggcggaggttgaagagagcagagattgtgccactgtgctctagcctgggtcacaagagcgaaactccgtctcaataataacaacaacaaaaataacccaggagtggctcaagagtccagtgtgggatgaaaatataaacagaggaagacaacatatgtcactggggaggctgggggagctagacaaaattcacacgggaggggcagggatgagacaatattgtgccctgggtctgtgcaaacgttgggaccagaatccactataagtttcattcttcggagacacggaagctctgcactggaggccgggactcaggcgtggaagagaatcttctccttattcaccggggaggctgtgtcttgtgcaaacaagtcatagaaacttgatgggagttggggagggactgaaggatgcatgcaaggttctgggaaggagtgagaagtagtgaaggccaaggggcccccatcacaggccgatggggtaagacttcgagagagcctgatcctggggtcttctgagactccaccaggagccggagagggcagggagccaaatccagctaggaggttacagattgcttttcctgggctgggctcctgagtgttggttcttccagctgtgcacaggggatttcaaacgttctacgtcctaaagccaggaagagtgacaaggcaggtggggacagaaggaagaagccaggagcctccctgagaaggtgtcaccttatctgtcctcctcttccccacacactggcctctgggtcccccttctctgtccacccacagagtgaaaccaattaaaatgttggatctca

SEQ ID NO: 1925 - protein, 299 aa, Homo sapiens [sequence omitted]

SEQ ID NO: 1926 - DNA, 1779 bp, Homo sapiens
tgatctgcctgtagctgccacagcctccagcggtggctacagttgaaaccctcacaccacgcaggaagaggtcatcatcatgtcggacgatttcttatggtttgaaggcatagctttccctactatgggtttcagatccgaaaccttaagaaaagtacgtgatgagttcgtgataagggatgaagatgtaataatattgacttaccccaaatcaggaacaaactggttggctgagattctctgcctgatgcactccaagggggatgccaagtggatccaatctgtgcccatctgggagcgatcaccctgggtagagagtgagattgggtatacagcactcagtgaaacggagagtccacgtttattctcctcccacctccccatccagttattccccaagtctttcttcagttccaaggccaaggtgatttatctcatgagaaatcccagagatgttttggtgtctggttattttttctggaaaaacatgaagtttattaagaaaccaaagtcatgggaagaatattttgaatggttttgtcaaggaactgtgctatatgggtcatggtttgaccacattcatggctggatgcccatgagagaggagaaaaacttcctgttactgagttatgaggagctgaaacaggacacaggaagaaccatagagaagatctgtcaattcctgggaaagacgttagaacccgaagaactgaacttaattctcaagaacagctcctttcagagcatgaaagaaaacaagatgtccaattattccctcctgagtgttgattatgtagtggacaaagcacaacttctgagaaaaggtgtatctggggactggaaaaatcacttcacagtggcccaagctgaagactttgataaattgttccaagagaagatggcagatcttcctcgagagctgttcccatgggaataacgtccaaaacactctggatcttatatggagaatgacattgattctcctgtccttgtacatgtacctgactggggtcattgtgtaagacttattattttatcctgaaaccttaaatatcaaacctctgcatctctgatcccttccttgttaaaagttaccacggttggccaggcgcggtggttcatgcctgtaatcccagcactatgggaggccgagacgggcggatcacgaggtcaggagactgagaccatcctggctaacacggtgaaaccccatctctactaaaaatacaaaaaacaaaaaaaattagccaggcgcattggctcatgtctgtaatcccagcactttgggaggtcgggggggtgggggaggatcacggggtcaggagatcgagaccatcctggccaacatgatgaaaccctatctctactaaaaatacaaaaattagccgggcatggtggtgcacgcctatagtcccagctactcgggaggctgaggtaggagaatcgtttgaactcaggaggcagaggttgcaatgagccaagatcgcgccactgcactccagcctgggtgacagagcgagaccgtctcaaaaagaaagaagtgactagggttcagagaaccagggttcaaagcccagggatgcaaaggttgcagtgagttgagtcatgggatcccagacttttttaaatgtttgcaatgtttcccgtttacagaatgctacaagaataatgtacgtactacctaaaaggatgtctaaatgtttgttaataaaaataagaaatagctacagtgacagattttagagcaaaaattagtaataaaaataagaaataaaatta

SEQ ID NO: 1927 - protein, 285 aa, Homo sapiens
MSDDFLWFEGIAFPTMGFRSETLRKVRDEFVIRDEDVIILTYPKSGTNWLAEILCLMHSKGDAKWIQSVPIWERSPWVESEIGYTALSETESPRLFSSHLPIQLFPKSFFSSKAKVIYLMRNPRDVLVSGYFFWKNMKFIKKPKSWEEYFEWFCQGTVLYGSWFDHIHGWMPMREEKNFLLLSYEELKQDTGRTIEKICQFLGKTLEPEELNLILKNSSFQSMKENKMSNYSLLSVDYVVDKAQLLRKGVSGDWKNHFTVAQAEDFDKLFQEKMADLPRELFPWE

SEQ ID NO: 1928 - DNA, 1031 bp, Homo sapiens
agaagctgcctttgtgtcctacagacaggctggggccaaagccattcaaccaatccccagataatccagagctcttgggagcagaaccttaaagagagatcgtggagagagccagggcccagaagaactctctcaaagagaagagggcagccaagatgacccgatggtccagttacctgttgggatggacaaccttccttctctattcctatgagtcaagtggagggatgcatgaggaatgtgtctttcctttcacctacaagggatctgtttacttcacttgcacccatattcatagcttatccccttggtgtgccaccagagccgtgtacaacggccagtggaagtactgccagagtgaagattacccacgctgtatcttccctttcatctatcgaggaaaggcttataacagctgcatctcccagggcagcttcttaggcagtctgtggtgctcagtcacctctgtcttcgatgagaaacagcagtggaaattctgtgaaacgaatgagtatgggggaaattctctcaggaagccctgcatcttcccctccatctacagaaataatgtggtctctgattgcatggaggatgaaagcaacaagctctggtgcccaaccacagagaacatggataaggatggaaagtggagtttctgtgccgacaccagaatttccgcgttggtccctggctttccttgtcactttccgttcaactataaaaacaagaattattttaactgcactaacaaaggatcaaaggagaaccttgtgtggtgtgcaacttcttacaactacgaccaagaccacacctgggtgtattgctgatgctgaggaaaggagaaatatcttcagaggaagactgccgccatactgaggctgagcacagatttgtctttttcattgcatctgtcaagcttaaataaccacctttagaaataccctctgcaccacctgcttcaatcagctggtcctttgtgaagaacgtagagagaatgcggcataaccaccaataaaggagtcttgatttaa

SEQ ID NO: 1929 - protein, 223 aa, Homo sapiens
MTRWSSYLLGWTTFLLYSYESSGGMHEECVFPFTYKGSVYFTCTHIHSLSPWCATRAVYNGQWKYCQSEDYPRCIFPFIYRGKAYNSCISQGSFLGSLWCSVTSVFDEKQQWKFCETNEYGGNSLRKPCIFPSIYRNNVVSDCMEDESNKLWCPTTENMDKDGKWSFCADTRISALVPGFPCHFPFNYKNKNYFNCTNKGSKENLVWCATSYNYDQDHTWVYC

SEQ ID NO: 1930 - DNA, 1268 bp, Homo sapiens
ccaagagaggcaggaagaggtggcaaaggagtgctggagaagataaggaggctgagctccgacagggagcagggaggaggggccatcttgagactggtgccctgcgagctccaccccacccctccatgcagttccccatgggccccgcctgcatcttcttgaggaaaggcattgctgagaaacagcgggaaagaccactgggacaagatgagattgaagagctgcgggaagcatttcttgagttcgataaggaccgagatgggttcatctcttgtaaggatctggggaatctcatgaggacgatgggttacatgcccacggagatggaactgattgagctcggccagcaaatccgcatgaacttgggtggccgtgtagactttgatgactttgtggagctgatgacccccaaattgcttgcagaaacagctgggatgatcggtgtccaggagatgcgggatgccttcaaggagtttgacacgaatggagatggggagatcaccctggtggagctacagcaggccatgcagagactcctgggggagcggctcaccccccgggagatctctgaggttgtccgggaggctgatgttaatggagacggcacagttgactttgaagagtttgtgaagatgatgtctcgctgaggaggtcctggaagctccagaccctctccacctggtcaacatggagcaagcgcttgtggagaaccaaagcccaaaagccccagatccccttaaagcagagagggagggcaggcgggagggagggcattggcatgcggcgctgtgcatggggtgagacccagagcggtatctttgccaggatgggggcgtctgcagaactaggttaagaaggaagagtctgtggatggaaataggaagcgtgggagggtccagttgccacccccaaaaattccaatgattcttgacatcttttcacttcacgtagtcctaagtccctgtgacctgccagagtctcttccccagcttccccttgggtgaaaatagtctcttctcctgttgggtatcaaaaggttcagaacgtagtctctactcttcccctgcctgcatcaactgttgcaaatcccgtttctctctcccggtaaggggacaaattatactttattcaggtgatggttacatgaacagcccagacttcaccactacgcaatatatccatgtaacaaaaccgcacttgtactccctaaatctatagaaatacaaaatgaaataaaaaggatgcaaatcaacaaaaaaaaaaaaaaa

SEQ ID NO: 1931 - protein, 173 aa, Homo sapiens
MQFPMGPACIFLRKGIAEKQRERPLGQDEIEELREAFLEFDKDRDGFISCKDLGNLMRTMGYMPTEMELIELGQQIRMNLGGRVDFDDFVELMTPKLLAETAGMIGVQEMRDAFKEFDTNGDGEITLVELQQAMQRLLGERLTPREISEVVREADVNGDGTVDFEEFVKMMSR

SEQ ID NO: 1932 - DNA, 2494 bp, Homo sapiens
cacgaggcaggggccattttacctccaggttggccctgctcaggaccaggaggaaacacctccagcccgcgacctcctcccacagggggaaaaggaaagcaggaggaccacagaagctttggcaccgaggatccccgcagtcttcacccgcggagattccggctgaaggagctgtccagcgactacaccgctaagcgcagggagcccaagcctccgcaccggattccggagcacaagctccaccgcgcatgcgcacacgccccagacccaggctcaggaggactgagaattttctgaccgcagtgcaccatgggaagctctgaagtttccataattcctgggctccagaaagaagaaaaggcggccgtggagagacgaagacttcatgtgctgaaagctctgaagaagctaaggattgaggctgatgaggccccagttgttgctgtgctgggctcaggcggaggactgcgggctcacattgcctgccttggggtcctgagtgagatgaaagaacagggcctgttggatgccgtcacgtacctcgcaggggtctctggatccacttgggcaatatcttctctctacaccaatgatggtgacatggaagctctcgaggctgacctgaaacatcgatttacccgacaggagtgggacttggctaagagcctacagaaaaccatccaagcagcgaggtctgagaattactctctgaccgacttctgggcctacatggttatctctaagcaaaccagagaactgccggagtctcatttgtccaatatgaagaagcccgtggaagaagggacactaccctacccaatatttgcagccattgacaatgacctgcaaccttcctggcaggaggcaagagcaccagagacctggttcgagttcacccctcaccacgctggcttctctgcactgggggcctttgtttccataacccacttcggaagcaaattcaagaagggaagactggtcagaactcaccctgagagagacctgactttcctgagaggtttatggggaagtgctcttggtaacactgaagtcattagggaatacatttttgaccagttaaggaatctgaccctgaaaggtttatggagaagggctgttgctaatgctaaaagcattggacaccttatttttgcccgattactgaggctgcaagaaagttcacaaggggaacatcctcccccagaagatgaaggcggtgagcctgaacacacctggctgactgagatgctcgagaattggaccaggacctccctggaaaagcaggagcagccccatgaggaccccgaaaggaaaggctcactcagtaacttgatggattttgtgaagaaaacaggcatttgcgcttcaaagtgggaatgggggaccactcacaacttcctgtacaaacacggtggcatccgggacaagataatgagcagccggaagcacctccacctggtggatgctggtttagccatcaacactcccttcccactcgtgctgcccccgacgcgggaggttcacctcatcctctccttcgacttcagtgccggagatcctttcgagaccatccgggctaccactgactactgccgccgccacaagatcccctttccccaagtagaagaggctgagctggatttgtggtccaaggcccccgccagctgctacatcctgaaaggagaaactggaccagtggtgatacattttcccctgttcaacatagatgcctgtggaggtgatattgaggcatggagtgacacatacgacacattcaagcttgctgacacctacactctagatgtggtggtgctactcttggcattagccaagaagaatgtcagggaaaacaagaagaagatccttagagagttgatgaacgtggccgggctctactacccgaaggatagtgcccgaagttgctgcttggcatagatgagcctcagcttccagggcactgtgggcctgttggtctactagggccctgaagtccacctggccttcctgttcttcactcccttcagccacacgcttcatggccttgagttcaccttggctgtcctaacagggccaatcaccagtgaccagctagactgtgattttgatagcgtcattcagaagaaggtgtccaaggagctgaaggtggtgaaatttgtcctgcaggtccctcgggagatcctggagctggagcatgagtgtctgacaatcagaagcatcatgtccaatgtccagatggccagaatgaatgtgatagttcagaccaatgccttccactgctcctttatgactgcacttctagccagtagctctgcacaagttagctctgtagaagtaagaacttgggcttaaatcatgggctatctctccacagccaagtggagctctgagaatacaacaagtgctcaataaatgcttgctgattgactgatgaaaaaaaaaaaaaaaaaaaaaaaaaaaaaaaaaaaaaaaaaaaaaaaaaaaaaaaaaaaaaaaa

SEQ ID NO: 1933 - protein, 541 aa, Homo sapiens
MGSSEVSIIPGLQKEEKAAVERRRLHVLKALKKLRIEADEAPVVAVLGSGGGLRAHIACLGVLSEMKEQGLLDAVTYLAGVSGSTWAISSLYTNDGDMEALEADLKHRFTRQEWDLAKSLQKTIQAARSENYSLTDFWAYMVISKQTRELPESHLSNMKKPVEEGTLPYPIFAAIDNDLQPSWQEARAPETWFEFTPHHAGFSALGAFVSITHFGSKFKKGRLVRTHPERDLTFLRGLWGSALGNTEVIREYIFDQLRNLTLKGLWRRAVANAKSIGHLIFARLLRLQESSQGEHPPPEDEGGEPEHTWLTEMLENWTRTSLEKQEQPHEDPERKGSLSNLMDFVKKTGICASKWEWGTTHNFLYKHGGIRDKIMSSRKHLHLVDAGLAINTPFPLVLPPTREVHLILSFDFSAGDPFETIRATTDYCRRHKIPFPQVEEAELDLWSKAPASCYILKGETGPVVIHFPLFNIDACGGDIEAWSDTYDTFKLADTYTLDVVVLLLALAKKNVRENKKKILRELMNVAGLYYPKDSARSCCLA

SEQ ID NO: 1934 - DNA, 3083 bp, Homo sapiens
cagaggcgcgcctggcggatctgagtgtgttgcccgggcagcggcgcgcgggaccaacgcaaggagcagctgacagacgaagaaaagtgctggacaggaagggagaattctgacgccaacatgcagcgaagtatcatgtcatttttccaccccaagaaagagggtaaagcaaagaagcctgagaaggaggcatccaatagcagcagagagacggagccccctccaaaggcggcactgaaggagtggaatggagtggtgtccgagagtgactctccggtgaagaggccagggaggaaggcggcccgggtcctgggcagcgaaggggaagaggaggatgaagcccttagccctgctaaaggccagaagcctgccctggactgctcacaggtctccccgccccgtcctgccacatctcctgagaacaatgcttccctctctgacacctctcccatggacagttccccatcagggattccgaagcgtcgcacagctcggaagcagctcccgaaacggaccattcaggaagtcctggaagagcagagtgaggacgaggacagagaagccaagaggaagaaggaggaggaagaagaggagaccccgaaagaaagcctcacagaggctgaagtggcaacagagaaggaaggagaagacggggaccagcccaccacgcctcccaagcccctaaagacctccaaagcagagaccccgacggaaagcgtttcagagcctgaggtggccacgaagcaggaactgcaggaggaggaagagcagaccaagcctccccgcagagctcccaagacgctcagcagcttcttcaccccccggaagccagcagtcaaaaaagaagtgaaggaagaggagccaggggctccaggaaaggagggagctgctgagggacccctggatccatctggttacaatcctgccaagaacaactatcatcccgtggaagatgcctgctggaaaccgggccagaaggttccttacctggctgtggcccggacgtttgagaagatcgaggaggtgtctgctcggctccggatggtggagacgctgagcaacttgctgcgctccgtggtggccctgtcgcctccagacctcctccctgtcctctacctcagcctcaaccaccttgggccaccccagcagggcctggagcttggcgtgggtgatggtgtccttctcaaggcagtggcccaggccacaggtcggcagctggagtccgtccgggctgaggcagccgagaaaggcgacgtggggctggtggccgagaacagccgcagcacccagaggctcatgctgccaccacctccgctcactgcctccggggtcttcagcaagttccgcgacatcgccaggctcactggcagtgcttccacagccaagaagatagacatcatcaaaggcctctttgtggcctgccgccactcagaagcccggttcatcgctaggtccctgagcggacggctgcgccttgggctggcagagcagtcggtgctggctgccctctcccaggcagtgagcctcacgcccccgggccaagaattcccaccagccatggtggatgctgggaagggcaagacagcagaggccagaaagacgtggctggaggagcaaggcatgatcctgaagcagacgttctgcgaggttcccgacctggaccgaattatccccgtgctgctggagcacggcctggaacgtctcccggagcactgcaagctgagcccagggattcccctgaaaccaatgttggcccatcccacccggggcatcagcgaggtcctgaaacgctttgaggaggcagctttcacctgcgaatacaaatatgacgggcagagggcacagatccacgccctggaaggcggggaggtgaagatcttcagcaggaatcaggaagacaacactgggaagtacccggacatcatcagccgcatccccaagattaaactcccatcggtcacatccttcatcctggacaccgaagccgtggcttgggaccgggaaaagaagcagatccagccattccaagtgctcaccacccgcaaacgcaaggaggtggatgcgtctgagatccaggtgcaggtgtgtttgtacgccttcgacctcatctacctcaatggagagtccctggtacgtgagcccctttcccggcgccggcagctgctccgggagaactttgtggagacagagggcgagtttgtcttcgccacctccctggacaccaaggacatcgagcagatcgccgagttcctggagcagtcagtgaaagactcctgcgaggggctgatggtgaagaccctggatgttgatgccacctacgagatcgccaagagatcgcacaactggctcaagctgaagaaggactaccttgatggcgtgggtgacaccctggacctggtggtgatcggcgcctacctgggccgggggaagcgggccggccggtacgggggcttcctgctggcctcctacgacgaggacagtgaggagctgcaggccatatgcaagcttggaactggcttcagtgatgaggagctggaggagcatcaccagagcctcaaggcgctggtgctgcccagcccacgcccttacgtgcggatagatggcgctgtgattcccgaccactggctggaccccagcgctgtgtgggaggtgaagtgcgctgacctctccctctctcccatctaccctgctgcgcggggcctggtggatagtgacaagggcatctcccttcgcttccctcggtttattcgagtccgtgaagacaagcagccggagcaggccaccaccagtgctcaggtggcctgtttgtaccggaagcaaagtcagattcagaaccaacaaggcgaggactcaggctctgaccctgaagatacctactaagccctcgccctcctagggcctgggtacagggcatgagttggacggaccccagggttattattgcctttgctttttagcaaatctgctgtggcaggctgtggattttgagagtcaggggaggggtgtgtgtgtgagggggtggcttactccggagtctgggattcatcccgtcatttctttcaataaataattattggatagct

SEQ ID NO: 1935 - protein, 919 aa, Homo sapiens
MQRSIMSFFHPKKEGKAKKPEKEASNSSRETEPPPKAALKEWNGVVSESDSPVKRPGRKAARVLGSEGEEEDEALSPAKGQKPALDCSQVSPPRPATSPENNASLSDTSPMDSSPSGIPKRRTARKQLPKRTIQEVLEEQSEDEDREAKRKKEEEEEETPKESLTEAEVATEKEGEDGDQPTTPPKPLKTSKAETPTESVSEPEVATKQELQEEEEQTKPPRRAPKTLSSFFTPRKPAVKKEVKEEEPGAPGKEGAAEGPLDPSGYNPAKNNYHPVEDACWKPGQKVPYLAVARTFEKIEEVSARLRMVETLSNLLRSVVALSPPDLLPVLYLSLNHLGPPQQGLELGVGDGVLLKAVAQATGRQLESVRAEAAEKGDVGLVAENSRSTQRLMLPPPPLTASGVFSKFRDIARLTGSASTAKKIDIIKGLFVACRHSEARFIARSLSGRLRLGLAEQSVLAALSQAVSLTPPGQEFPPAMVDAGKGKTAEARKTWLEEQGMILKQTFCEVPDLDRIIPVLLEHGLERLPEHCKLSPGIPLKPMLAHPTRGISEVLKRFEEAAFTCEYKYDGQRAQIHALEGGEVKIFSRNQEDNTGKYPDIISRIPKIKLPSVTSFILDTEAVAWDREKKQIQPFQVLTTRKRKEVDASEIQVQVCLYAFDLIYLNGESLVREPLSRRRQLLRENFVETEGEFVFATSLDTKDIEQIAEFLEQSVKDSCEGLMVKTLDVDATYEIAKRSHNWLKLKKDYLDGVGDTLDLVVIGAYLGRGKRAGRYGGFLLASYDEDSEELQAICKLGTGFSDEELEEHHQSLKALVLPSPRPYVRIDGAVIPDHWLDPSAVWEVKCADLSLSPIYPAARGLVDSDKGISLRFPRFIRVREDKQPEQATTSAQVACLYRKQSQIQNQQGEDSGSDPEDTY

SEQ ID NO: 1936 - DNA, 2042 bp, Homo sapiens
gcaggcagagagatgaggaaactgagacccagaaaggtggaagcacttgtctaaggtcacgcctccaggaagcagtgtgtccacgactccagtccaagtggtcaggctccagagcccacagtcccaggggtccatgatgccgagctgcaatcgttcctgcagctgcagccgcggccccagcgtggaggatggcaagtggtatggggtccgctcctacctgcacctcttctatgaggactgtgcaggcactgctctcagcgacgaccctgagggacctccggtcctgtgcccccgccggccctggccctcactgtgttggaagatcagcctgtcctcggggaccctgcttctgctgctgggtgtggcggctctgaccactggctatgcagtgccccccaagctggagggcatcggtgagggtgagttcctggtgttggatcagcgggcagccgactacaaccaggccctgggcacctgtcgcctggcaggcacagcgctctgtgtggcagctggagttctgctcgccatctgcctcttctgggccatgataggctggctgagccaggacaccaaggcagagcccttggaccccgaagccgacagccacgtggaggtcttcggggatgagccagagcagcagttgtcacccattttccgcaatgccagtggccagtcatggttctcgccacccgccagcccctttgggcaatcttctgtgcagactatccagcccaagagggactcctgagctgcccacatggcctaagatgtgggtcctggatccttcccccttctcaccataaccccctctcagtgtttccccaacttctccctttagagcccaactccaggtcaaatctggagctcaaatcccagtgctccctccccaggagtggggccccaactcttccaagataccagcattcctcaagtcctcccaaaacttcctacccacaccctcttcccaaggccctcaggggcagaaaacatctccttcaacccgtccccactccttcctctgcatgaccttgggcaaacccttgccctttcaagccatcagctcctgcctctctgccatgagggctttggatcagattcctcttctcgccaggatgaggacacgcactgccctccatagacacagatgaaggggtgggggtcattcagctcgaatgggtcccagatgctcacttggcctttccctgcaggatgagtgaagacgtttgcctctcacagtgtgtcttctacctgcattttggcatcagagccccccagcccacccaccacaggcaattactagccctagttgataggtgaggtgggtgaagaaggctggaggtgacatgtccgaggtcacacaacaaagcagcatgcaggaactagaaacacatcttcagcctcctcctgggccagctcttgtgctacaggtggggcggagccagcccctcaccttcctggttccctgagggtcctcagggtggaggacaggtttggcccagaaagactagccagaggcctgatggtcccaggtggctctggatatactttggatatggatttaaatggtctctaagagccgggggtagggggcaggaaaagtgggttgtctttgcccctcaaagtccacctacctagaaaccaagcccacggtcttggccgtgaccctgataataaatgggctctctcagaggcgccagcccctccctccccagccggaggcgtcatctctcttctgtaccactagagggagctctgatgcagctggagagcagcgctcaaggctctcgcccctcccctccctaacccttaccttcagtctccaccagcctgaagggcctcctaggggatcctcaggcggcccccaccagggcacaccctactgtccttgtgcctcacgccccctcctcatcctgcaccccttccatcccaccttccctttcaataaacagctgggatggaaaaaaaaaaaaagaaaaaaaaaaaaaaaaaaaaaaaaaaaaaaaaaaaaaaaaaaaaaaaaaaaaaaaaaaaaaaaaaaaaaa

SEQ ID NO: 1937 - protein, 204 aa, Homo sapiens
MMPSCNRSCSCSRGPSVEDGKWYGVRSYLHLFYEDCAGTALSDDPEGPPVLCPRRPWPSLCWKISLSSGTLLLLLGVAALTTGYAVPPKLEGIGEGEFLVLDQRAADYNQALGTCRLAGTALCVAAGVLLAICLFWAMIGWLSQDTKAEPLDPEADSHVEVFGDEPEQQLSPIFRNASGQSWFSPPASPFGQSSVQTIQPKRDS

SEQ ID NO: 1938 - DNA, 2469 bp, Homo sapiens
gacagagcaagactctgtctcaaaaaaaaaaaaaaaaagagcaaattttttttccaaggtgatagggagagtccgtggctgatgtctgcactgaccagacgcccctagggggccagcgagggcgggtcccaggtgcagcggatgcagaggagagaggcccgggcgcggcgcgggggatggtgcgatcccgggcccgagggcatcagacggcggctgattagctccggtttgcatcacccggaccgggggattagctccggtttgcatcacccggaccgggggattagctccggtttgcatcacccggaccgggggccgggcgcgcacgagactcgcagcggaagtggaggcggctccgcgcgcgtccgctgctaggacccgggcagggctggagctgggctgggatcccgagctcggcagcagcgcagcgggccggcccacctgctggtgccctggaggctctgagccccggcggcgcccgggcccacgcggaacgacggggcgagatgcgagccacccctctggctgctcctgcgggttccctgtccaggaagaagcggttggagttggatgacaacttagataccgagcgtcccgtccagaaacgagctcgaagtgggccccagcccagactgcccccctgcctgttgcccctgagcccacctactgctccagatcgtgcaactgctgtggccactgcctcccgtcttgggccctatgtcctcctggagcccgaggagggcgggcgggcctaccaggccctgcactgccctacaggcactgagtatacctgcaaggtgtaccccgtccaggaagccctggccgtgctggagccctatgcgcggctgcccccgcacaagcatgtggctcggcccactgaggtcctggctggtacccagctcctctacgcctttttcactcggacccatggggacatgcacagcctggtgcgaagccgccaccgtatccctgagcctgaggctgccgtgctcttccgccagatggccaccgccctggcgcactgtcaccagcacggtctggtcctgcgtgatctcaagctgtgtcgctttgtcttcgctgaccgtgagaggaagaagctggtgctggagaacctggaggactcctgcgtgctgactgggccagatgattccctgtgggacaagcacgcgtgcccagcctacgtgggacctgagatactcagctcacgggcctcatactcgggcaaggcagccgatgtctggagcctgggcgtggcgctcttcaccatgctggccggccactaccccttccaggactcggagcctgtcctgctcttcggcaagatccgccgcggggcctacgccttgcctgcaggcctctcggcccctgcccgctgtctggttcgctgcctccttcgtcgggagccagctgaacggctcacagccacaggcatcctcctgcacccctggctgcgacaggacccgatgcccttagccccaacccgatcccatctctgggaggctgcccaggtggtccctgatggactggggctggacgaagccagggaagaggagggagacagagaagtggttctgtatggctaggaccaccctactacacgctcagctgccaacagtggattgagtttgggggtagctccaagccttctcctgcctctgaactgagccaaaccttcagtgccttccagaagggagaaaggcagaagcctgtgtggagtgtgctgtgtacacatctgctttgttccacacacatgcagttcctgcttgggtgcttatcaggtgccaagccctgttctcggtgctgggagtacagcagtgagcaaaggagacaatattccctgctcacagagatgacaaactggcatccttgagctgacaacacttttccatgaccataggtcactgtctacactgggtacactttgtaccagtgtcggcctccactgatgctggtgctcaggcacctctgtccaaggacaatccctttcacaaacaaaccagctgcctttgtatcttgtaccttttcagagaaagggaggtatccctgtgccaaaggctccaggcctctcccctgcaactcaggacccaagcccagctcactctgggaactgtgttcccagcatctctgtcctcttgattaagagattctccttccaggcctaagcctgggatttgggccagagataagaatccaaactatgaggctagttcttgtctaactcaagactgttctggaatgagggtccaggcctgtcaaccatggggcttctgacctgagcaccaaggttgagggacaggattaggcagggtctgtcctgtggccacctggaaagtcccaggtgggactcttctggggacacttggggtccacaatcccaggtccatactctaggttttggataccatgagtatgtatgtttacctgtgcctaataaaggagaattatgaaataaaaaaaaaaaaaaaaaaa

SEQ ID NO: 1939 - protein, 358 aa, Homo sapiens
MRATPLAAPAGSLSRKKRLELDDNLDTERPVQKRARSGPQPRLPPCLLPLSPPTAPDRATAVATASRLGPYVLLEPEEGGRAYQALHCPTGTEYTCKVYPVQEALAVLEPYARLPPHKHVARPTEVLAGTQLLYAFFTRTHGDMHSLVRSRHRIPEPEAAVLFRQMATALAHCHQHGLVLRDLKLCRFVFADRERKKLVLENLEDSCVLTGPDDSLWDKHACPAYVGPEILSSRASYSGKAADVWSLGVALFTMLAGHYPFQDSEPVLLFGKIRRGAYALPAGLSAPARCLVRCLLRREPAERLTATGILLHPWLRQDPMPLAPTRSHLWEAAQVVPDGLGLDEAREEEGDREVVLYG

SEQ ID NO: 1940 - DNA, 2570 bp, Homo sapiens
gggagtccggggacccgcgatcagccccggaggacggggtggggtcgccccaaacaggagcgccgggaccgctgggaccccgcactcggcgtccgccgccgccgggtagccgggcagtggaggtcccggatgaggcgacaatttttccggccccccctcccagtcccgccccacttccggggccgccactttcactttctcttccgccgaagccgctccccttgcgaagaactggggcctcccgggaggagagagggctttgccttgaaacccgggacgccaggggcgctcccgcaagtgggggtcctccgggacttggaacgccccggctgggtggtgtccgggcgtcctttccccgcttcttcccacctcggctggtcccgtttcctcctgcgcccagtgcggacctgtctcggcgcccgctgccctctcaccgccccacgcaggatcccggcctggtcaccgggcagtgtgatgcttcccgactgccgcggggacagcgaggcacacacagggcttgggccgcgccggaggccacacggcctggctgagttgctcctggtctcccgcctctcccaggcgacccggaggtagcatttcccaggaggcacggtcccccccagggggatgggcacagccacgccagatggacgagaagaccaagaaaggctgtgggtgagcgtggaggatgctcagatgcacaccgtcaccatctggctcacagtgcgccctgatatgacagtggcgtctctcaaggacatggtttttctggactatggcttcccaccagtcttgcagcagtgggtgattgggcagcggctggcacgagaccaggagaccctgcactcccatggggtgcggcagaatggggacagtgcctacctctatctgctgtcagcccgcaacacctccctcaaccctcaggagctgcagcgggagcggcagctgcggatgctggaagatctgggcttcaaggacctcacgctgcagccgcggggccctctggagccaggccccccaaagcccggggtcccccaggaacccggacgggggcagccagatgcagtgcctgagcccccaccggtgggctggcagtgccccgggtgcaccttcatcaacaagcccacgcggcctggctgtgagatgtgctgccgggcgcgccccgaggcctaccaggtccccgcctcataccagcccgacgaggaggagcgagcgcgcctggcgggcgaggaggaggcgctgcgtcagtaccagcagcggaagcagcagcagcaggaggggaactacctgcagcacgtccagctggaccagaggagcctggtgctgaacacggagcccgccgagtgccccgtgtgctactcggtgctggcgcccggcgaggccgtggtgctgcgtgagtgtctgcacaccttctgcagggagtgcctgcagggcaccatccgcaacagccaggaggcggaggtctcctgccccttcattgacaacacctactcgtgctcgggcaagctgctggagagggagatcaaggcgctcctgacccctgaggattaccagcgatttctagacctgggcatctccattgctgaaaaccgcagtgccttcagctaccattgcaagaccccagattgcaagggatggtgcttctttgaggatgatgtcaatgagttcacctgccctgtgtgtttccacgtcaactgcctgctctgcaaggccatccatgagcagatgaactgcaaggagtatcaggaggacctggccctgcgggctcagaacgatgtggctgcccggcagacgacagagatgctgaaggtgatgctgcagcagggcgaggccatgcgctgcccccagtgccagatcgtggtacagaagaaggacggctgcgactggatccgctgcaccgtctgccacaccgagatctgctgggtcaccaagggcccacgctggggccctgggggcccaggagacaccagcgggggctgccgctgcagggtaaatgggattccttgccacccaagctgtcagaactgccactgagctaaagatggtggggccacatgctgacccagccccacatccacattctgttagaatgtagctcagggagcttcgtggacggccttgcttgctgtagcgttgtaggggccctgcctgcactgcggttgtccacggtcacatctgccccagtgcctttgtccttcccttggggcttgccggccagacttctctcccctgcggctcccacctctgcctgaccccagccttaaacatagcccctggccagaggccttgctgggtggagcctctgtgtgactccatactcctcccaccacaacactcatctgtcaaacaccaagcactctcagcctccccgccttcagctgtcagctttctggggctaacttctctgcctttgtggttggaggcctgaggcctcttggaactcttgctaacctgttcagagccaggaaggagactgcacagttttgaaagcacagcccgtcaggtccggctctgcgtctccctctctgcagcctgtgtaagctattataattaaaatggttttccgggaa

SEQ ID NO: 1941 - protein, 468 aa, Homo sapiens
MGTATPDGREDQERLWVSVEDAQMHTVTIWLTVRPDMTVASLKDMVFLDYGFPPVLQQWVIGQRLARDQETLHSHGVRQNGDSAYLYLLSARNTSLNPQELQRERQLRMLEDLGFKDLTLQPRGPLEPGPPKPGVPQEPGRGQPDAVPEPPPVGWQCPGCTFINKPTRPGCEMCCRARPEAYQVPASYQPDEEERARLAGEEEALRQYQQRKQQQQEGNYLQHVQLDQRSLVLNTEPAECPVCYSVLAPGEAVVLRECLHTFCRECLQGTIRNSQEAEVSCPFIDNTYSCSGKLLEREIKALLTPEDYQRFLDLGISIAENRSAFSYHCKTPDCKGWCFFEDDVNEFTCPVCFHVNCLLCKAIHEQMNCKEYQEDLALRAQNDVAARQTTEMLKVMLQQGEAMRCPQCQIVVQKKDGCDWIRCTVCHTEICWVTKGPRWGPGGPGDTSGGCRCRVNGIPCHPSCQNCH

SEQ ID NO: 1942 - DNA, 2715 bp, Homo sapiens
gggagtccggggacccgcgatcagccccggaggacggggtggggtcgccccaaacaggagcgccgggaccgctgggaccccgcactcggcgtccgccgccgccgggtagccgggcagtggaggtcccggatgaggcgacaatttttccggccccccctcccagtcccgccccacttccggggccgccactttcactttctcttccgccgaagccgctccccttgcgaagaactggggcctcccgggaggagagagggctttgccttgaaacccgggacgccaggggcgctcccgcaagtgggggtcctccgggacttggaacgccccggctgggtggtgtccgggcgtcctttccccgcttcttcccacctcggctggtcccgtttcctcctgcgcccagtgcggacctgtctcggcgcccgctgccctctcaccgccccacgcaggatcccggcctggtcaccgggcagtgtgatgcttcccgactgccgcggggacagcgaggcacacacagggcttgggccgcgccggaggccacacggcctggctgagttgctcctggtctcccgcctctcccaggcgacccggaggtagcatttcccaggaggcacggtcccccccagggggatgggcacagccacgccagatggacgagaagaccaagaaagcagaggaaatggccctgagcctcacccgagcagtggcgggcggggatgaacaggtggcaatgaagtgtgccatctggctggcagagcaacgggtgcccctgagtgtgcaactgaagcctgaggtctccccaacgcaggacatcaggctgtgggtgagcgtggaggatgctcagatgcacaccgtcaccatctggctcacagtgcgccctgatatgacagtggcgtctctcaaggacatggtttttctggactatggcttcccaccagtcttgcagcagtgggtgattgggcagcggctggcacgagaccaggagaccctgcactcccatggggtgcggcagaatggggacagtgcctacctctatctgctgtcagcccgcaacacctccctcaaccctcaggagctgcagcgggagcggcagctgcggatgctggaagatctgggcttcaaggacctcacgctgcagccgcggggccctctggagccaggccccccaaagcccggggtcccccaggaacccggacgggggcagccagatgcagtgcctgagcccccaccggtgggctggcagtgccccgggtgcaccttcatcaacaagcccacgcggcctggctgtgagatgtgctgccgggcgcgccccgaggcctaccaggtccccgcctcataccagcccgacgaggaggagcgagcgcgcctggcgggcgaggaggaggcgctgcgtcagtaccagcagcggaagcagcagcagcaggaggggaactacctgcagcacgtccagctggaccagaggagcctggtgctgaacacggagcccgccgagtgccccgtgtgctactcggtgctggcgcccggcgaggccgtggtgctgcgtgagtgtctgcacaccttctgcagggagtgcctgcagggcaccatccgcaacagccaggaggcggaggtctcctgccccttcattgacaacacctactcgtgctcgggcaagctgctggagagggagatcaaggcgctcctgacccctgaggattaccagcgatttctagacctgggcatctccattgctgaaaaccgcagtgccttcagctaccattgcaagaccccagattgcaagggatggtgcttctttgaggatgatgtcaatgagttcacctgccctgtgtgtttccacgtcaactgcctgctctgcaaggccatccatgagcagatgaactgcaaggagtatcaggaggacctggccctgcgggctcagaacgatgtggctgcccggcagacgacagagatgctgaaggtgatgctgcagcagggcgaggccatgcgctgcccccagtgccagatcgtggtacagaagaaggacggctgcgactggatccgctgcaccgtctgccacaccgagatctgctgggtcaccaagggcccacgctggggccctgggggcccaggagacaccagcgggggctgccgctgcagggtaaatgggattccttgccacccaagctgtcagaactgccactgagctaaagatggtggggccacatgctgacccagccccacatccacattctgttagaatgtagctcagggagcttcgtggacggccttgcttgctgtagcgttgtaggggccctgcctgcactgcggttgtccacggtcacatctgccccagtgcctttgtccttcccttggggcttgccggccagacttctctcccctgcggctcccacctctgcctgaccccagccttaaacatagcccctggccagaggccttgctgggtggagcctctgtgtgactccatactcctcccaccacaacactcatctgtcaaacaccaagcactctcagcctccccgccttcagctgtcagctttctggggctaacttctctgcctttgtggttggaggcctgaggcctcttggaactcttgctaacctgttcagagccaggaaggagactgcacagttttgaaagcacagcccgtcaggtccggctctgcgtctccctctctgcagcctgtgtaagctattataattaaaatggttttccgggaa

SEQ ID NO: 1943 - protein, 500 aa, Homo sapiens
MALSLTRAVAGGDEQVAMKCAIWLAEQRVPLSVQLKPEVSPTQDIRLWVSVEDAQMHTVTIWLTVRPDMTVASLKDMVFLDYGFPPVLQQWVIGQRLARDQETLHSHGVRQNGDSAYLYLLSARNTSLNPQELQRERQLRMLEDLGFKDLTLQPRGPLEPGPPKPGVPQEPGRGQPDAVPEPPPVGWQCPGCTFINKPTRPGCEMCCRARPEAYQVPASYQPDEEERARLAGEEEALRQYQQRKQQQQEGNYLQHVQLDQRSLVLNTEPAECPVCYSVLAPGEAVVLRECLHTFCRECLQGTIRNSQEAEVSCPFIDNTYSCSGKLLEREIKALLTPEDYQRFLDLGISIAENRSAFSYHCKTPDCKGWCFFEDDVNEFTCPVCFHVNCLLCKAIHEQMNCKEYQEDLALRAQNDVAARQTTEMLKVMLQQGEAMRCPQCQIVVQKKDGCDWIRCTVCHTEICWVTKGPRWGPGGPGDTSGGCRCRVNGIPCHPSCQNCH

SEQ ID NO: 1944 - DNA, 4456 bp, Homo sapiens
ctgcgcgcctgcgcgccgctggccgacggaggggagcctgccgatgccgagcgggtgctacgtcccgcggtcggagccgcgtcttctcccggctccgccaccagccggggctcgggtgggggcccggggccccggggcatggccctccggagtgcgcagggcgacggccccacctccggccactgggacggcggcgcggagaaggcagactttaacgccaaaaggaaaaagaaagtggcagagatacaccaggctctgaacagtgatcccactgatgtggctgcccttagacgcatggctatcagtgaaggagggctcctgactgatgagatcagacgaaaagtgtggcccaagctcctcaatgtcaatgccaatgacccacctcctatatcagggaagaacctacggcagatgagcaaggactaccaacaagtgttgctggacgtccggcggtcattgcggcggttccctcctggcatgccagaggaacagagagaagggctccaggaagaactgattgacatcatcctcctcatcttggagcgcaaccctcagctgcactactaccagggctaccatgacattgtggtcacatttctgctggtggtaggcgagaggctggcaacatccctggtagaaaaattatctacccaccacctcagggattttatggatccaacaatggacaacaccaagcatatattaaactatctgatgcccatcattgaccaggtgaatccagagctccatgacttcatgcagagtgctgaggtagggaccatctttgccctcagctggctcatcacctggtttgggcatgtcctgtctgacttcaggcacgtcgtgcggttatatgacttcttcctggcctgccacccactgatgccgatttactttgcagccgtgattgtgttgtatcgcgagcaggaagtcctggactgtgactgtgacatggcctcggtccaccacctgttgtcccagatccctcaggacttgccctatgagacactgatcagcagagcaggagacctttttgttcagtttcccccatccgaacttgctcgggaggccgctgcccaacagcaagctgagaggacggcagcctctactttcaaagactttgagctggcatcagcccagcagaggcctgatatggtgctgcggcagcggtttcggggacttctgcggcctgaagatcgaacaaaagatgtcctgaccaagccaaggaccaaccgctttgtgaaattggcagtgatggggctgacagtggcacttggagcggctgcactggctgtggtgaaaagtgccctggaatgggcccctaagtttcagctgcagctgtttccctgaaagccagagaagaccttcctcttacatcacattaaggtctcacccttccatggaaggattgggaggggtggaatttcctttattaaaagggtttctgtccagagttttttattcctgccaccctgccctgcccgtttgtgtttgcctttacttcagaggccagtagcagagcctacctgacacagaggggacctgggggcctggcacagaatcttatgcctctcccagtgggcttttggatgggctctctgccacctccctggtgttggaggaagtgggtttctgaagcttgcagctgcttttgcaacctgctgggcctgggctgccctagttaccgggaacctcctagtcaccccatagaaggtgaactggaacatgggatgccctcttactgctcctgcttgcctgcatcagatggacacagaaggagggggctgctgctgaaggagtcaggcttgggatggagagcaagaggccaaaggactcgtctgggagcatgatcggcccctcttactagcagctccatcagctgatcagaaatcagagacagaagggaactaggttactcgttaaatcctacctattttcagcctagaaatcacatgggcgtttccagtcaagtgggaaggaagctcatttttagggcctagacctagactagttttgcctgcctttttttcctccctgctttcttctacaagccacacaacattgcttataaaaggtacttttattactatttttagaatatatacaccccatatgtaaattaccctcacttttaaagtaataatagttccttcacggaaaaaaaaatagttctcatcagaaggatgagcttctaagatcctgaattttactttctacttgattaacattttcgctttagccagagttgctatttgcaaacagctttccacttccaaagtgccactttctgaccggtttttcttcctgttttcctcaaatcatcctactcccaaataggcacccactcactaccttggcgtcgttttttgggtctgacttgactcgtcaactgctggtctctcccacctggttggaaatgtcgttggaaacttgcaaagactctccagaccttagggaacaagaggcatcactcagtccttctgggacagcttccctgtaagcaaagccaggtttgttttagattcactctggcctgaaaaaaaaagtgccttttgctgctttaaagaattggggtatatggtatgaagcagccatgtacttgtattttcctggtctttcctgggcactcttctctcttggcagatgttttcttaaagtgaacacaccagaagcactctaccccaccatatccagtcctctttgcatgcctgttgtgtgcagggtggagggtgtcccacgtgccagagcagctgggagccctgtccgctgagttacactaagcactttatttttatttattttattattattttcttttttctgagatggagtctcactctgttgcccaggctggagtgcagtggtgcagtctcagctcactgcaacctccgcctcccaagttcaggcaattctcgctgcctcagcctcccgagtagctgggactacaggcacctgctaccacgcctgactaatttttgtatttttagtagagatggggtttcgccacgttggccaggctggtctcgaactcctgacctcaggtgatctgcccgtctcgtcctcccaaagtgctgggattacaggtgtgagccaccacgcccagccaccactacgcactttaaaaccaaaaaaagctcaaagggatggatcattgtccatggctcaggagccccactgtggggtaagtgtgatgtcgatggattaatttagacagtggtgtattcatcagggcaaaggaaattcttccagaggtgatgatgcggcagatattcccagtgctctcccaaagcaagctggccctcttgtcatcctctcagtgggcggcaccagctgcccctccttccacaagtactcaagcctgtttgtaaatactgaaggaattgatggggttgaggaaaggaggtgcatgtgaccagggtcccaaggccacagcttttcagatcctaggaagcaagtggcatttgcttgagttgtggcctcggaaggagaatgtttatctgttttctaactttgctgacaccaggattctccctgtcattgagaagaaagcattatctaattaccttcaggtggtttacttattctgtaaagaatatgtgtaaatattttgtacagagccctgtatcaaataaacagccatatgtggttactaatcacctcttctgtcattccgtccttggccaccgctcagtgggaatggtctctgatctggatgctcccaccttccatgtcaggcccagaactgtgccatggtctgtggactcctggtcagccttgactggctaggagaccttgggcagtacctacagtcttgctgtttctgtttcatctgcaagaattatgacccacacactccagctgcagcccagggcactgtgatattttatacgtgtgtagatgtttttgtccacagttcctggttcatcactcccataaccctttgttataatgttgggacactgcaggcctcagaaaacggaatctctgtctgtgaccttctcctgccccatttcacttgctcaacaccagactttaatctgactgtagctcataagaccctcattccagagagggtgctgccccatacccggaaggaggaacgctgcacagagaggccaagaagcatctggacagacaggccttgctgggtttagaccttatgctttttgtccagtttcatctcaacacagctgccatgcttcagccatgcctatccaatgacgtctccataaaaggcccaggaacacgggagcttctgaagagctgaacatgtggagggaggggaacgagaacttgtccatgtgccaagagggtggcgcacccccactccatggggacagaagctccagcatttgcccaggacccgtccagacctcaccctgtgtgtatcttcatctggctgtttacttatttgtatccttttctaataatgtttgtaataaactggtaaacataa

SEQ ID NO: 1945 - protein, 403 aa, Homo sapiens
MALRSAQGDGPTSGHWDGGAEKADFNAKRKKKVAEIHQALNSDPTDVAALRRMAISEGGLLTDEIRRKVWPKLLNVNANDPPPISGKNLRQMSKDYQQVLLDVRRSLRRFPPGMPEEQREGLQEELIDIILLILERNPQLHYYQGYHDIVVTFLLVVGERLATSLVEKLSTHHLRDFMDPTMDNTKHILNYLMPIIDQVNPELHDFMQSAEVGTIFALSWLITWFGHVLSDFRHVVRLYDFFLACHPLMPIYFAAVIVLYREQEVLDCDCDMASVHHLLSQIPQDLPYETLISRAGDLFVQFPPSELAREAAAQQQAERTAASTFKDFELASAQQRPDMVLRQRFRGLLRPEDRTKDVLTKPRTNRFVKLAVMGLTVALGAAALAVVKSALEWAPKFQLQLFP

SEQ ID NO: 1946 - DNA, 2732 bp, Homo sapiens
cccgcctcctggtaggagggggtttccgcttccggcagcagcggctgcagcctcgctctggtccctgcggctggcggccgagccgtgtgtctcctcctccatcgccgccatattgtctgtgtgagcagaggggagagcggccgccgccgctgccgcttccaccacagtttgaagaaaacaggtctgaaacaaggtcttacccccagctgcttctgaacacagtgactgccagatctccaaacatcaagtccagctttgtccgccaacctgtctgacatgtcgggacccgtgccaagcagggccagagtttacacagatgttaatacacacagacctcgagaatactgggattacgagtcacatgtggtggaatggggaaatcaagatgactaccagctggttcgaaaattaggccgaggtaaatacagtgaagtatttgaagccatcaacatcacaaataatgaaaaagttgttgttaaaattctcaagccagtaaaaaagaagaaaattaagcgtgaaataaagattttggagaatttgagaggaggtcccaacatcatcacactggcagacattgtaaaagaccctgtgtcacgaacccccgccttggtttttgaacacgtaaacaacacagacttcaagcaattgtaccagacgttaacagactatgatattcgattttacatgtatgagattctgaaggccctggattattgtcacagcatgggaattatgcacagagatgtcaagccccataatgtcatgattgatcatgagcacagaaagctacgactaatagactggggtttggctgagttttatcatcctggccaagaatataatgtccgagttgcttcccgatacttcaaaggtcctgagctacttgtagactatcagatgtacgattatagtttggatatgtggagtttgggttgtatgctggcaagtatgatctttcggaaggagccatttttccatggacatgacaattatgatcagttggtgaggatagccaaggttctggggacagaagatttatatgactatattgacaaatacaacattgaattagatccacgtttcaatgatatcttgggcagacactctcgaaagcgatgggaacgctttgtccacagtgaaaatcagcaccttgtcagccctgaggccttggatttcctggacaaactgctgcgatatgaccaccagtcacggcttactgcaagagaggcaatggagcacccctatttctacactgttgtgaaggaccaggctcgaatgggttcatctagcatgccagggggcagtacgcccgtcagcagcgccaatatgatgtcagggatttcttcagtgccaaccccttcaccccttggacctctggcaggctcaccagtgattgctgctgccaacccccttgggatgcctgttccagctgccgctggcgctcagcagtaacggccctatctgtctcctgatgcctgagcagaggtgggggagtccaccctctccttgatgcagcttgcgcctggcggggaggggtgaaacacttcagaagcaccgtgtctgaaccgttgcttgtggatttatagtagttcagtcataaaaaaaaaattataataggctgattttcttttttctttttttttttaactcgaacttttcataactcaggggattccctgaaaaattacctgcaggtggaatatttcatggacaaatttttttttctcccctcccaaatttagttcctcatcacaaaagaacaaagataaaccagcctcaatcccggctgctgcatttaggtggagacttcttcccattcccaccattgttcctccaccgtcccacactttagggggttggtatctcgtgctcttctccagagattacaaaaatgtagcttctcaggggaggcaggaagaaaggaaggaaggaaagaaggaagggaggacccaatctataggagcagtggactgcttgctggtcgcttacatcactttactccataagcgcttcagtggggttatcctagtggctcttgtggaagtgtgtcttagttacatcaagatgttgaaaatctacccaaaatgcagacagatactaaaaacttctgttcagtaagaatcatgtcttactgatctaaccctaaatccaactcatttatacttttatttttagttcagtttaaaatgttgataccttccctcccaggctccttaccttggtcttttccctgttcatctcccaacatgctgtgctccatagctggtaggagagggaaggcaaaatctttcttagttttctttgtcttggccattttgaattcatttagttactgggcataacttactgctttttacaaaagaaacaaacattgtctgtacaggtttcatgctagagctaatgggagatgtggccacactgacttccattttaagctttctaccttcttttcctccgaccgtccccttccctcacatgccatccagtgagaagacctgctcctcagtcttgtaaatgtatcttgagaggtaggagcagagccactatctccattgaagctgaaatggtagacctgtaattgtgggaaaactataaactctcttgttacagccccgccaccccttgctgtgtgtatatatataatactttgtccttcatatgtgaaagatccagtgttggaattctttggtgtaaataaacgtttggttttatttatcaaaaaaaaaaaaaaa

SEQ ID NO: 1947 - protein, 391 aa, Homo sapiens
MSGPVPSRARVYTDVNTHRPREYWDYESHVVEWGNQDDYQLVRKLGRGKYSEVFEAINITNNEKVVVKILKPVKKKKIKREIKILENLRGGPNIITLADIVKDPVSRTPALVFEHVNNTDFKQLYQTLTDYDIRFYMYEILKALDYCHSMGIMHRDVKPHNVMIDHEHRKLRLIDWGLAEFYHPGQEYNVRVASRYFKGPELLVDYQMYDYSLDMWSLGCMLASMIFRKEPFFHGHDNYDQLVRIAKVLGTEDLYDYIDKYNIELDPRFNDILGRHSRKRWERFVHSENQHLVSPEALDFLDKLLRYDHQSRLTAREAMEHPYFYTVVKDQARMGSSSMPGGSTPVSSANMMSGISSVPTPSPLGPLAGSPVIAAANPLGMPVPAAAGAQQ

SEQ ID NO: 1948 - DNA, 2849 bp, Homo sapiens
cccgcctcctggtaggagggggtttccgcttccggcagcagcggctgcagcctcgctctggtccctgcggctggcggccgagccgtgtgtctcctcctccatcgccgccatattgtctgtgtgagcagaggggagagcggccgccgccgctgccgcttccaccacagctctatcaaggcttgtcaagcagtgtgctcatcacatggtaaatcatgcagcgtggaacctcataaaatctccaagaaacatcattcacccatactgactagtttcacatctctttgtttgaagaaaacaggtctgaaacaaggtcttacccccagctgcttctgaacacagtgactgccagatctccaaacatcaagtccagctttgtccgccaacctgtctgacatgtcgggacccgtgccaagcagggccagagtttacacagatgttaatacacacagacctcgagaatactgggattacgagtcacatgtggtggaatggggaaatcaagatgactaccagctggttcgaaaattaggccgaggtaaatacagtgaagtatttgaagccatcaacatcacaaataatgaaaaagttgttgttaaaattctcaagccagtaaaaaagaagaaaattaagcgtgaaataaagattttggagaatttgagaggaggtcccaacatcatcacactggcagacattgtaaaagaccctgtgtcacgaacccccgccttggtttttgaacacgtaaacaacacagacttcaagcaattgtaccagacgttaacagactatgatattcgattttacatgtatgagattctgaaggccctggattattgtcacagcatgggaattatgcacagagatgtcaagccccataatgtcatgattgatcatgagcacagaaagctacgactaatagactggggtttggctgagttttatcatcctggccaagaatataatgtccgagttgcttcccgatacttcaaaggtcctgagctacttgtagactatcagatgtacgattatagtttggatatgtggagtttgggttgtatgctggcaagtatgatctttcggaaggagccatttttccatggacatgacaattatgatcagttggtgaggatagccaaggttctggggacagaagatttatatgactatattgacaaatacaacattgaattagatccacgtttcaatgatatcttgggcagacactctcgaaagcgatgggaacgctttgtccacagtgaaaatcagcaccttgtcagccctgaggccttggatttcctggacaaactgctgcgatatgaccaccagtcacggcttactgcaagagaggcaatggagcacccctatttctacactgttgtgaaggaccaggctcgaatgggttcatctagcatgccagggggcagtacgcccgtcagcagcgccaatatgatgtcagggatttcttcagtgccaaccccttcaccccttggacctctggcaggctcaccagtgattgctgctgccaacccccttgggatgcctgttccagctgccgctggcgctcagcagtaacggccctatctgtctcctgatgcctgagcagaggtgggggagtccaccctctccttgatgcagcttgcgcctggcggggaggggtgaaacacttcagaagcaccgtgtctgaaccgttgcttgtggatttatagtagttcagtcataaaaaaaaaattataataggctgattttcttttttctttttttttttaactcgaacttttcataactcaggggattccctgaaaaattacctgcaggtggaatatttcatggacaaatttttttttctcccctcccaaatttagttcctcatcacaaaagaacaaagataaaccagcctcaatcccggctgctgcatttaggtggagacttcttcccattcccaccattgttcctccaccgtcccacactttagggggttggtatctcgtgctcttctccagagattacaaaaatgtagcttctcaggggaggcaggaagaaaggaaggaaggaaagaaggaagggaggacccaatctataggagcagtggactgcttgctggtcgcttacatcactttactccataagcgcttcagtggggttatcctagtggctcttgtggaagtgtgtcttagttacatcaagatgttgaaaatctacccaaaatgcagacagatactaaaaacttctgttcagtaagaatcatgtcttactgatctaaccctaaatccaactcatttatacttttatttttagttcagtttaaaatgttgataccttccctcccaggctccttaccttggtcttttccctgttcatctcccaacatgctgtgctccatagctggtaggagagggaaggcaaaatctttcttagttttctttgtcttggccattttgaattcatttagttactgggcataacttactgctttttacaaaagaaacaaacattgtctgtacaggtttcatgctagagctaatgggagatgtggccacactgacttccattttaagctttctaccttcttttcctccgaccgtccccttccctcacatgccatccagtgagaagacctgctcctcagtcttgtaaatgtatcttgagaggtaggagcagagccactatctccattgaagctgaaatggtagacctgtaattgtgggaaaactataaactctcttgttacagccccgccaccccttgctgtgtgtatatatataatactttgtccttcatatgtgaaagatccagtgttggaattctttggtgtaaataaacgtttggttttatttatcaaaaaaaaaaaaaaa

SEQ ID NO: 1949 - protein, 391 aa, Homo sapiens; identical to SEQ ID NO: 1947

SEQ ID NO: 1950 - DNA, 2522 bp, Homo sapiens
cccgcctcctggtaggagggggtttccgcttccggcagcagcggctgcagcctcgctctggtccctgcggctggcggccgagccgtgtgtctcctcctccatcgccgccatattgtctgtgtgagcagaggggagagcggccgccgccgctgccgcttccaccacagaaatcaagatgactaccagctggttcgaaaattaggccgaggtaaatacagtgaagtatttgaagccatcaacatcacaaataatgaaaaagttgttgttaaaattctcaagccagtaaaaaagaagaaaattaagcgtgaaataaagattttggagaatttgagaggaggtcccaacatcatcacactggcagacattgtaaaagaccctgtgtcacgaacccccgccttggtttttgaacacgtaaacaacacagacttcaagcaattgtaccagacgttaacagactatgatattcgattttacatgtatgagattctgaaggccctggattattgtcacagcatgggaattatgcacagagatgtcaagccccataatgtcatgattgatcatgagcacagaaagctacgactaatagactggggtttggctgagttttatcatcctggccaagaatataatgtccgagttgcttcccgatacttcaaaggtcctgagctacttgtagactatcagatgtacgattatagtttggatatgtggagtttgggttgtatgctggcaagtatgatctttcggaaggagccatttttccatggacatgacaattatgatcagttggtgaggatagccaaggttctggggacagaagatttatatgactatattgacaaatacaacattgaattagatccacgtttcaatgatatcttgggcagacactctcgaaagcgatgggaacgctttgtccacagtgaaaatcagcaccttgtcagccctgaggccttggatttcctggacaaactgctgcgatatgaccaccagtcacggcttactgcaagagaggcaatggagcacccctatttctacactgttgtgaaggaccaggctcgaatgggttcatctagcatgccagggggcagtacgcccgtcagcagcgccaatatgatgtcagggatttcttcagtgccaaccccttcaccccttggacctctggcaggctcaccagtgattgctgctgccaacccccttgggatgcctgttccagctgccgctggcgctcagcagtaacggccctatctgtctcctgatgcctgagcagaggtgggggagtccaccctctccttgatgcagcttgcgcctggcggggaggggtgaaacacttcagaagcaccgtgtctgaaccgttgcttgtggatttatagtagttcagtcataaaaaaaaaattataataggctgattttcttttttctttttttttttaactcgaacttttcataactcaggggattccctgaaaaattacctgcaggtggaatatttcatggacaaatttttttttctcccctcccaaatttagttcctcatcacaaaagaacaaagataaaccagcctcaatcccggctgctgcatttaggtggagacttcttcccattcccaccattgttcctccaccgtcccacactttagggggttggtatctcgtgctcttctccagagattacaaaaatgtagcttctcaggggaggcaggaagaaaggaaggaaggaaagaaggaagggaggacccaatctataggagcagtggactgcttgctggtcgcttacatcactttactccataagcgcttcagtggggttatcctagtggctcttgtggaagtgtgtcttagttacatcaagatgttgaaaatctacccaaaatgcagacagatactaaaaacttctgttcagtaagaatcatgtcttactgatctaaccctaaatccaactcatttatacttttatttttagttcagtttaaaatgttgataccttccctcccaggctccttaccttggtcttttccctgttcatctcccaacatgctgtgctccatagctggtaggagagggaaggcaaaatctttcttagttttctttgtcttggccattttgaattcatttagttactgggcataacttactgctttttacaaaagaaacaaacattgtctgtacaggtttcatgctagagctaatgggagatgtggccacactgacttccattttaagctttctaccttcttttcctccgaccgtccccttccctcacatgccatccagtgagaagacctgctcctcagtcttgtaaatgtatcttgagaggtaggagcagagccactatctccattgaagctgaaatggtagacctgtaattgtgggaaaactataaactctcttgttacagccccgccaccccttgctgtgtgtatatatataatactttgtccttcatatgtgaaagatccagtgttggaattctttggtgtaaataaacgtttggttttatttatcaaaaaaaaaaaaaaa

SEQ ID NO: 1951 - protein, 255 aa, Homo sapiens
MYEILKALDYCHSMGIMHRDVKPHNVMIDHEHRKLRLIDWGLAEFYHPGQEYNVRVASRYFKGPELLVDYQMYDYSLDMWSLGCMLASMIFRKEPFFHGHDNYDQLVRIAKVLGTEDLYDYIDKYNIELDPRFNDILGRHSRKRWERFVHSENQHLVSPEALDFLDKLLRYDHQSRLTAREAMEHPYFYTVVKDQARMGSSSMPGGSTPVSSANMMSGISSVPTPSPLGPLAGSPVIAAANPLGMPVPAAAGAQQ

SEQ ID NO: 1952 - DNA, 1712 bp, Homo sapiens
atgctgggggaggggctggcggcctcgacggcagctgcggaactaggccgagggacaaaggctaagtttttccatggtttggactggatatcggtggaactctggtcaagctggtatattttgaacccaaagacatcactgctgaagaagaagaggaagaagtggaaagtcttaaaagcattcggaagtacctgacctccaatgtggcttatgggtctacaggcattcgggacgtgcacctcgagctgaaggacctgactctgtgtggacgcaaaggcaatctgcactttatacgctttcccactcatgacatgcctgcttttattcaaatgggcagagataaaaacttctcgagtctccacactgtcttttgtgccactggaggtggagcgtacaaatttgagcaggattttctcacaataggtgatcttcagctttgcaaactggatgaactagattgcttgatcaaaggaattttatacattgactcagtcggattcaatggacggtcacagtgctattactttgaaaaccctgctgattctgaaaagtgtcagaagttaccatttgatttgaaaaatccgtatcctctgcttctggtgaacattggctcaggggttagcatcttagcagtatattccaaagataattacaaacgggtcacaggtactagtcttggaggaggaactttttttggtctctgctgtcttcttactggctgtaccacttttgaagaagctcttgaaatggcatctcgtggagatagcaccaaagtggataaactagtacgagatatttatggaggggactatgagaggtttggactgccaggctgggctgtggcttcaagctttggaaacatgatgagcaaggagaagcgagaggctgtcagtaaagaggacctggccagagcgactttgatcaccatcaccaacaacattggctcaatagcaagaatgtgtgcccttaatgaaaacattaaccaggtggtatttgttggaaatttcttgagaattaatacgatcgccatgcggcttttggcatatgctttggattattggtccaaggggcagttgaaagcacttttttcggaacacgagggttattttggagctgttggagcactccttgagctgttgaagatcccgtgatcattacctggggaggggttcctgaaaccttccacaatgggatctgtggactttcatttttttaagagacttactcaatttcatgactgtactacctgaaacaaagtgagaaaggacaggtgtatttttctaagtcatcaagataaatccttaagaattcagtctaaattagcaaccaggaaggaaaaatatattaaaaacaacaaaaaagtggcacatgtccaggcagtgtgaggatttgctgtatataagttgcctgctttgtatttttgaaatctctgcatcactcattggaagtgcttctgaagagagctgctctgtgttcagttgactggttttgtgtcctgtttgaacttgctgaatgtaaggcaggctactatgcgttataatctaatcacaatttgtcaatatggtcttggcaatcatctgtgcattactctggtttgcattaagcctgtgtgtgaacttactgtaaaacatgttttatttcaaggttctgcaaaattaattgggcaggttaattgtgtacctgaaacttaacaagcagtttttggaagggca

SEQ ID NO: 1953 - protein, 279 aa, Homo sapiens
MPAFIQMGRDKNFSSLHTVFCATGGGAYKFEQDFLTIGDLQLCKLDELDCLIKGILYIDSVGFNGRSQCYYFENPADSEKCQKLPFDLKNPYPLLLVNIGSGVSILAVYSKDNYKRVTGTSLGGGTFFGLCCLLTGCTTFEEALEMASRGDSTKVDKLVRDIYGGDYERFGLPGWAVASSFGNMMSKEKREAVSKEDLARATLITITNNIGSIARMCALNENINQVVFVGNFLRINTIAMRLLAYALDYWSKGQLKALFSEHEGYFGAVGALLELLKIP

SEQ ID NO: 1954 - DNA, 2280 bp, Homo sapiens
gggtggatgaggaggctcgggcccttccacccacgcgtccattgggcggcgccgccatcactctcttctgggctacaccgccttctcttcctccgcggaacccggatcccctcctccaccaccctctccccgccccgtcacgatagcctctcattggacggaggcacggtcaatcctcctcgagttagggagccgactggacgcgaggcctttgggccgtccccagcctcgtcggattggcttcctgcgcgttggcgcaacggaagaggcggccggccgagggcgcgcctctgctctggctggactgccgcggaggaggcgagaaggaatccgacgctggggggcttgctcgggcggcagcgactgctgctgcggatgggagggggccggctcggcgcgcccatggagcgccacggcagggcttccgccacctccgtctcgtcggctggggagcaggcggccggggaccccgaagggcggcggcaggagccactgcggcgccgggcgagcagcgcgtcggtgcccgcggtcggggcctcggctgagggcacgaggcgggatcgactgggctcttacagcggccccacctcggtctcccgccagcgcgtcgaaagcctgaggaaaaagcggccgctttttccatggtttggactggatatcggtggaactctggtcaagctggtatattttgaacccaaagacatcactgctgaagaagaagaggaagaagtggaaagtcttaaaagcattcggaagtacctgacctccaatgtggcttatgggtctacaggcattcgggacgtgcacctcgagctgaaggacctgactctgtgtggacgcaaaggcaatctgcactttatacgctttcccactcatgacatgcctgcttttattcaaatgggcagagataaaaacttctcgagtctccacactgtcttttgtgccactggaggtggagcgtacaaatttgagcaggattttctcacaataggtgatcttcagctttgcaaactggatgaactagattgcttgatcaaaggaattttatacattgactcagtcggattcaatggacggtcacagtgctattactttgaaaaccctgctgattctgaaaagtgtcagaagttaccatttgatttgaaaaatccgtatcctctgcttctggtgaacattggctcaggggttagcatcttagcagtatattccaaagataattacaaacgggtcacaggtactagtcttggaggaggaactttttttggtctctgctgtcttcttactggctgtaccacttttgaagaagctcttgaaatggcatctcgtggagatagcaccaaagtggataaactagtacgagatatttatggaggggactatgagaggtttggactgccaggctgggctgtggcttcaagctttggaaacatgatgagcaaggagaagcgagaggctgtcagtaaagaggacctggccagagcgactttgatcaccatcaccaacaacattggctcaatagcaagaatgtgtgcccttaatgaaaacattaaccaggtggtatttgttggaaatttcttgagaattaatacgatcgccatgcggcttttggcatatgctttggattattggtccaaggggcagttgaaagcacttttttcggaacacgagggttattttggagctgttggagcactccttgagctgttgaagatcccgtgatcattacctggggaggggttcctgaaaccttccacaatgggatctgtggactttcatttttttaagagacttactcaatttcatgactgtactacctgaaacaaagtgagaaaggacaggtgtatttttctaagtcatcaagataaatccttaagaattcagtctaaattagcaaccaggaaggaaaaatatattaaaaacaacaaaaaagtggcacatgtccaggcagtgtgaggatttgctgtatataagttgcctgctttgtatttttgaaatctctgcatcactcattggaagtgcttctgaagagagctgctctgtgttcagttgactggttttgtgtcctgtttgaacttgctgaatgtaaggcaggctactatgcgttataatctaatcacaatttgtcaatatggtcttggcaatcatctgtgcattactctggtttgcattaagcctgtgtgtgaacttactgtaaaacatgttttatttcaaggttctgcaaaattaattgggcaggttaattgtgtacctgaaacttaacaagcagtttttggaagggca

SEQ ID NO: 1955 - protein, 570 aa, Homo sapiens
MRRLGPFHPRVHWAAPPSLSSGLHRLLFLRGTRIPSSTTLSPPRHDSLSLDGGTVNPPRVREPTGREAFGPSPASSDWLPARWRNGRGGRPRARLCSGWTAAEEARRNPTLGGLLGRQRLLLRMGGGRLGAPMERHGRASATSVSSAGEQAAGDPEGRRQEPLRRRASSASVPAVGASAEGTRRDRLGSYSGPTSVSRQRVESLRKKRPLFPWFGLDIGGTLVKLVYFEPKDITAEEEEEEVESLKSIRKYLTSNVAYGSTGIRDVHLELKDLTLCGRKGNLHFIRFPTHDMPAFIQMGRDKNFSSLHTVFCATGGGAYKFEQDFLTIGDLQLCKLDELDCLIKGILYIDSVGFNGRSQCYYFENPADSEKCQKLPFDLKNPYPLLLVNIGSGVSILAVYSKDNYKRVTGTSLGGGTFFGLCCLLTGCTTFEEALEMASRGDSTKVDKLVRDIYGGDYERFGLPGWAVASSFGNMMSKEKREAVSKEDLARATLITITNNIGSIARMCALNENINQVVFVGNFLRINTIAMRLLAYALDYWSKGQLKALFSEHEGYFGAVGALLELLKIP

SEQ ID NO: 1956 - DNA, 1763 bp, Homo sapiens
ccgcgcgcggacactgtccccgcacggtggtccctcgttggtgcgtggcctgacatccggctggaggcctcgggtgctccgaaagcggtaccttcgggggcccccccgcacccattgtttttccatggtttggactggatatcggtggaactctggtcaagctggtatattttgaacccaaagacatcactgctgaagaagaagaggaagaagtggaaagtcttaaaagcattcggaagtacctgacctccaatgtggcttatgggtctacaggcattcgggacgtgcacctcgagctgaaggacctgactctgtgtggacgcaaaggcaatctgcactttatacgctttcccactcatgacatgcctgcttttattcaaatgggcagagataaaaacttctcgagtctccacactgtcttttgtgccactggaggtggagcgtacaaatttgagcaggattttctcacaataggtgatcttcagctttgcaaactggatgaactagattgcttgatcaaaggaattttatacattgactcagtcggattcaatggacggtcacagtgctattactttgaaaaccctgctgattctgaaaagtgtcagaagttaccatttgatttgaaaaatccgtatcctctgcttctggtgaacattggctcaggggttagcatcttagcagtatattccaaagataattacaaacgggtcacaggtactagtcttggaggaggaactttttttggtctctgctgtcttcttactggctgtaccacttttgaagaagctcttgaaatggcatctcgtggagatagcaccaaagtggataaactagtacgagatatttatggaggggactatgagaggtttggactgccaggctgggctgtggcttcaagctttggaaacatgatgagcaaggagaagcgagaggctgtcagtaaagaggacctggccagagcgactttgatcaccatcaccaacaacattggctcaatagcaagaatgtgtgcccttaatgaaaacattaaccaggtggtatttgttggaaatttcttgagaattaatacgatcgccatgcggcttttggcatatgctttggattattggtccaaggggcagttgaaagcacttttttcggaacacgagggttattttggagctgttggagcactccttgagctgttgaagatcccgtgatcattacctggggaggggttcctgaaaccttccacaatgggatctgtggactttcatttttttaagagacttactcaatttcatgactgtactacctgaaacaaagtgagaaaggacaggtgtatttttctaagtcatcaagataaatccttaagaattcagtctaaattagcaaccaggaaggaaaaatatattaaaaacaacaaaaaagtggcacatgtccaggcagtgtgaggatttgctgtatataagttgcctgctttgtatttttgaaatctctgcatcactcattggaagtgcttctgaagagagctgctctgtgttcagttgactggttttgtgtcctgtttgaacttgctgaatgtaaggcaggctactatgcgttataatctaatcacaatttgtcaatatggtcttggcaatcatctgtgcattactctggtttgcattaagcctgtgtgtgaacttactgtaaaacatgttttatttcaaggttctgcaaaattaattgggcaggttaattgtgtacctgaaacttaacaagcagtttttggaagggca

SEQ ID NO: 1957 - protein, 279 aa, Homo sapiens; identical to SEQ ID NO: 1953

SEQ ID NO: 1958 - DNA, 1692 bp, Homo sapiens
ctggggtttgggggaccgagccgctccgggttcgggatgctgaggagaccgcgggcccgcgccagcctcccacacacacacactctcccggcgcctcggccggccgggcgcggtgtgcaggggtgaggcggtgtctccaggctgaggagggacgcggaggagggtccggcgcggccccgggactggagggtgagtccctcacaaagggcggagcggggctgtcacctggagatcacggagggaagttcatccatgagctcggatttcccacattacaacttcaggatgcctaatattggattccagaatctgcctctcaacatatatattgtggtttttggtactgctatatttgtcttcatccttagtttactcttctgttgctacttgattaggctaagacatcaagcacacaaagaattttatgcctacaaacaggttatattaaaagagaaagtaaaagaattgaatttacatgagctctgtgcagtgtgcctagaagacttcaagcctcgagatgagttggggatttgcccatgtaagcacgccttccacagaaagtgccttattaagtggctggaggttcgtaaagtgtgtcccctgtgcaacatgccagttctacagctggcccagttgcacagtaagcaggaccgtggaccccctcaggggccccttcctggggcagagaacattgtatagcttaccgcaaggatcagactgttgctggacacgacgtctgtgtggagccaggaggaacacatgtggtgtctgtatggctgctctctacctaggacaccagctgccacttcttttgcctcatgaagaactcttgggccagccaaactgggaacctaggtgtctgggtcttgtgacaaccaaagcactttgacactaccccctgccgagagaagaggagtggatgagcctgcgggtttgcctcaagaaacttcatgagggtctcttactaactccattacactctctctcctggagcctcatctccatgtcaagcaggagggtaaagaagggaactaagagcaggtctttcaagccacacccccacctgcggatggatgggtttctctgtaggccatgcaggcctttgtcgcagcaaaccttcccagcagcccttgagccaagtaaaaccagcacaaccagccaccagtggttggtgaggcagtgcccacaaggctcatgttgtatgcctttgataaggccatcttggctttgagtagcagtgttcctcgtcacccatttccccctcaggattacaacacctgctatcaaatcatctaagctgaaaacatgagatgcgcttggaaaggcctagtcagaagccatttcctcttatcatttccctctcctatgcaccagtaaggcccgtccagagccccagcagggagtgggccctgagtccacactgtccctgagtgatccaggaggctgcccacatccccacatgtgcactgtggttccagtgtagctgctgtgagcccactgccactgcctcagaagggagccactgtgaacctcttggctccaaagagcagtggctttttgagaatggcccatacttctggcccggctggatgaagggaatgccgaccctttggcctctccccctccttccatctcttctctctcttgccctatctctctttctacttcagaaaaaaaaaaaaaaaaaaaaaa

SEQ ID NO: 1959 - protein, 148 aa, Homo sapiens
MSSDFPHYNFRMPNIGFQNLPLNIYIVVFGTAIFVFILSLLFCCYLIRLRHQAHKEFYAYKQVILKEKVKELNLHELCAVCLEDFKPRDELGICPCKHAFHRKCLIKWLEVRKVCPLCNMPVLQLAQLHSKQDRGPPQGPLPGAENIV

SEQ ID NO: 1960 - DNA, 5896 bp, Homo sapiens
ctgcggccggcccgcgagctaggctgggtttttttttttctcccctccctcccccctttttccatgcagctgatctaaaagggaataaaaggctgcgcataatcataataataaaagaaggggagcgcgagagaaggaaagaaagccgggaggtggaagaggagggggagcgtctcaaagaagcgatcagaataataaaaggaggccgggctctttgccttctggaacgggccgctcttgaaagggcttttgaaaagtggtgttgttttccagtcgtgcatgctccaatcggcggagtatattagagccgggacgcggcggccgcaggggcagcggcgacggcagcaccggcggcagcaccagcgcgaacagcagcggcggcgtcccgagtgcccgcggcgcgcggcgcagcgatgcgttccccacggacgcgcggccggtccgggcgccccctaagcctcctgctcgccctgctctgtgccctgcgagccaaggtgtgtggggcctcgggtcagttcgagttggagatcctgtccatgcagaacgtgaacggggagctgcagaacgggaactgctgcggcggcgcccggaacccgggagaccgcaagtgcacccgcgacgagtgtgacacatacttcaaagtgtgcctcaaggagtatcagtcccgcgtcacggccggggggccctgcagcttcggctcagggtccacgcctgtcatcgggggcaacaccttcaacctcaaggccagccgcggcaacgaccgcaaccgcatcgtgctgcctttcagtttcgcctggccgaggtcctatacgttgcttgtggaggcgtgggattccagtaatgacaccgttcaacctgacagtattattgaaaaggcttctcactcgggcatgatcaaccccagccggcagtggcagacgctgaagcagaacacgggcgttgcccactttgagtatcagatccgcgtgacctgtgatgactactactatggctttggctgcaataagttctgccgccccagagatgacttctttggacactatgcctgtgaccagaatggcaacaaaacttgcatggaaggctggatgggccccgaatgtaacagagctatttgccgacaaggctgcagtcctaagcatgggtcttgcaaactcccaggtgactgcaggtgccagtatggctggcaaggcctgtactgtgataagtgcatcccacacccgggatgcgtccacggcatctgtaatgagccctggcagtgcctctgtgagaccaactggggcggccagctctgtgacaaagatctcaattactgtgggactcatcagccgtgtctcaacgggggaacttgtagcaacacaggccctgacaaatatcagtgttcctgccctgaggggtattcaggacccaactgtgaaattgctgagcacgcctgcctctctgatccctgtcacaacagaggcagctgtaaggagacctccctgggctttgagtgtgagtgttccccaggctggaccggccccacatgctctacaaacattgatgactgttctcctaataactgttcccacgggggcacctgccaggacctggttaacggatttaagtgtgtgtgccccccacagtggactgggaaaacgtgccagttagatgcaaatgaatgtgaggccaaaccttgtgtaaacgccaaatcctgtaagaatctcattgccagctactactgcgactgtcttcccggctggatgggtcagaattgtgacataaatattaatgactgccttggccagtgtcagaatgacgcctcctgtcgggatttggttaatggttatcgctgtatctgtccacctggctatgcaggcgatcactgtgagagagacatcgatgaatgtgccagcaacccctgtttgaatgggggtcactgtcagaatgaaatcaacagattccagtgtctgtgtcccactggtttctctggaaacctctgtcagctggacatcgattattgtgagcctaatccctgccagaacggtgcccagtgctacaaccgtgccagtgactatttctgcaagtgccccgaggactatgagggcaagaactgctcacacctgaaagaccactgccgcacgaccccctgtgaagtgattgacagctgcacagtggccatggcttccaacgacacacctgaaggggtgcggtatatttcctccaacgtctgtggtcctcacgggaagtgcaagagtcagtcgggaggcaaattcacctgtgactgtaacaaaggcttcacgggaacatactgccatgaaaatattaatgactgtgagagcaacccttgtagaaacggtggcacttgcatcgatggtgtcaactcctacaagtgcatctgtagtgacggctgggagggggcctactgtgaaaccaatattaatgactgcagccagaacccctgccacaatgggggcacgtgtcgcgacctggtcaatgacttctactgtgactgtaaaaatgggtggaaaggaaagacctgccactcacgtgacagtcagtgtgatgaggccacgtgcaacaacggtggcacctgctatgatgagggggatgcttttaagtgcatgtgtcctggcggctgggaaggaacaacctgtaacatagcccgaaacagtagctgcctgcccaacccctgccataatgggggcacatgtgtggtcaacggcgagtcctttacgtgcgtctgcaaggaaggctgggaggggcccatctgtgctcagaataccaatgactgcagccctcatccctgttacaacagcggcacctgtgtggatggagacaactggtaccggtgcgaatgtgccccgggttttgctgggcccgactgcagaataaacatcaatgaatgccagtcttcaccttgtgcctttggagcgacctgtgtggatgagatcaatggctaccggtgtgtctgccctccagggcacagtggtgccaagtgccaggaagtttcagggagaccttgcatcaccatggggagtgtgataccagatggggccaaatgggatgatgactgtaatacctgccagtgcctgaatggacggatcgcctgctcaaaggtctggtgtggccctcgaccttgcctgctccacaaagggcacagcgagtgccccagcgggcagagctgcatccccatcctggacgaccagtgcttcgtccacccctgcactggtgtgggcgagtgtcggtcttccagtctccagccggtgaagacaaagtgcacctctgactcctattaccaggataactgtgcgaacatcacatttacctttaacaaggagatgatgtcaccaggtcttactacggagcacatttgcagtgaattgaggaatttgaatattttgaagaatgtttccgctgaatattcaatctacatcgcttgcgagccttccccttcagcgaacaatgaaatacatgtggccatttctgctgaagatatacgggatgatgggaacccgatcaaggaaatcactgacaaaataatcgatcttgttagtaaacgtgatggaaacagctcgctgattgctgccgttgcagaagtaagagttcagaggcggcctctgaagaacagaacagatttccttgttcccttgctgagctctgtcttaactgtggcttggatctgttgcttggtgacggccttctactggtgcctgcggaagcggcggaagccgggcagccacacacactcagcctctgaggacaacaccaccaacaacgtgcgggagcagctgaaccagatcaaaaaccccattgagaaacatggggccaacacggtccccatcaaggattacgagaacaagaactccaaaatgtctaaaataaggacacacaattctgaagtagaagaggacgacatggacaaacaccagcagaaagcccggtttgccaagcagccggcgtatacgctggtagacagagaagagaagccccccaacggcacgccgacaaaacacccaaactggacaaacaaacaggacaacagagacttggaaagtgcccagagcttaaaccgaatggagtacatcgtatagcagaccgcgggcactgccgccgctaggtagagtctgagggcttgtagttctttaaactgtcgtgtcatactcgagtctgaggccgttgctgacttagaatccctgtgttaatttaagttttgacaagctggcttacactggcaatggtagtttctgtggttggctgggaaatcgagtgccgcatctcacagctatgcaaaaagctagtcaacagtaccctggttgtgtgtccccttgcagccgacacggtctcggatcaggctcccaggagcctgcccagccccctggtctttgagctcccacttctgccagatgtcctaatggtgatgcagtcttagatcatagttttatttatatttattgactcttgagttgtttttgtatattggttttatgatgacgtacaagtagttctgtatttgaaagtgcctttgcagctcagaaccacagcaacgatcacaaatgactttattatttatttttttaattgtatttttgttgttgggggaggggagactttgatgtcagcagttgctggtaaaatgaagaatttaaagaaaaaaatgtcaaaagtagaactttgtatagttatgtaaataattcttttttattaatcactgtgtatatttgatttattaacttaataatcaagagccttaaaacatcattcctttttatttatatgtatgtgtttagaattgaaggtttttgatagcattgtaagcgtatggctttatttttttgaactcttctcattacttgttgcctataagccaaaattaaggtgtttgaaaatagtttattttaaaacaataggatgggcttctgtgcccagaatactgatggaattttttttgtacgacgtcagatgtttaaaacaccttctatagcatcacttaaaacacgttttaaggactgactgaggcagtttgaggattagtttagaacaggtttttttgtttgtttgttttttgtttttctgctttagacttgaaaagagacaggcaggtgatctgctgcagagcagtaagggaacaagttgagctatgacttaacatagccaaaatgtgagtggttgaatatgattaaaaatatcaaattaattgtgtgaacttggaagcacaccaatctgactttgtaaattctgatttcttttcaccattcgtacataatactgaaccacttgtagatttgattttttttttaatctactgcatttagggagtattctaataagctagttgaatacttgaaccataaaatgtccagtaagatcactgtttagatttgccatagagtacactgcctgccttaagtgaggaaatcaaagtgctattacgaagttcaagatcaaaaaggcttataaaacagagtaatcttgttggttcaccattgagaccgtgaagatactttgtattgtcctattagtgttatatgaacatacaaatgcatctttgatgtgttgttcttggcaataaattttgaaaagtaatatttattaaatttttttgtatgaaaacatggaacagtgtggctcttctgagcttacgtagttctaccggctttgccgtgtgcttctgccaccctgctgagtctgttctggtaatcggggtataataggctctgcctgacagagggatggaggaagaactgaaaggcttttcaaccacaaaactcatctggagttctcaaagacctggggctgctgtgaagctggaactgcgggagccccatctaggggagccttgattcccttgttattcaacagcaagtgtgaatactgcttgaataaacaccactggattaatggaaaaaaaaaaaaaaaa

SEQ ID NO: 1961 - protein, 1218 aa, Homo sapiens
MRSPRTRGRSGRPLSLLLALLCALRAKVCGASGQFELEILSMQNVNGELQNGNCCGGARNPGDRKCTRDECDTYFKVCLKEYQSRVTAGGPCSFGSGSTPVIGGNTFNLKASRGNDRNRIVLPFSFAWPRSYTLLVEAWDSSNDTVQPDSIIEKASHSGMINPSRQWQTLKQNTGVAHFEYQIRVTCDDYYYGFGCNKFCRPRDDFFGHYACDQNGNKTCMEGWMGPECNRAICRQGCSPKHGSCKLPGDCRCQYGWQGLYCDKCIPHPGCVHGICNEPWQCLCETNWGGQLCDKDLNYCGTHQPCLNGGTCSNTGPDKYQCSCPEGYSGPNCEIAEHACLSDPCHNRGSCKETSLGFECECSPGWTGPTCSTNIDDCSPNNCSHGGTCQDLVNGFKCVCPPQWTGKTCQLDANECEAKPCVNAKSCKNLIASYYCDCLPGWMGQNCDININDCLGQCQNDASCRDLVNGYRCICPPGYAGDHCERDIDECASNPCLNGGHCQNEINRFQCLCPTGFSGNLCQLDIDYCEPNPCQNGAQCYNRASDYFCKCPEDYEGKNCSHLKDHCRTTPCEVIDSCTVAMASNDTPEGVRYISSNVCGPHGKCKSQSGGKFTCDCNKGFTGTYCHENINDCESNPCRNGGTCIDGVNSYKCICSDGWEGAYCETNINDCSQNPCHNGGTCRDLVNDFYCDCKNGWKGKTCHSRDSQCDEATCNNGGTCYDEGDAFKCMCPGGWEGTTCNIARNSSCLPNPCHNGGTCVVNGESFTCVCKEGWEGPICAQNTNDCSPHPCYNSGTCVDGDNWYRCECAPGFAGPDCRININECQSSPCAFGATCVDEINGYRCVCPPGHSGAKCQEVSGRPCITMGSVIPDGAKWDDDCNTCQCLNGRIACSKVWCGPRPCLLHKGHSECPSGQSCIPILDDQCFVHPCTGVGECRSSSLQPVKTKCTSDSYYQDNCANITFTFNKEMMSPGLTTEHICSELRNLNILKNVSAEYSIYIACEPSPSANNEIHVAISAEDIRDDGNPIKEITDKIIDLVSKRDGNSSLIAAVAEVRVQRRPLKNRTDFLVPLLSSVLTVAWICCLVTAFYWCLRKRRKPGSHTHSASEDNTTNNVREQLNQIKNPIEKHGANTVPIKDYENKNSKMSKIRTHNSEVEEDDMDKHQQKARFAKQPAYTLVDREEKPPNGTPTKHPNWTNKQDNRDLESAQSLNRMEYIV

SEQ ID NO: 1962 - DNA, 4425 bp, Homo sapiens
actatcgagaagcagatgacaggctcaggccttaccagggatgcacttgccacattttggaaagactacataaaaaacctttaaaaattggagccctttgggcctcaggtatccaaagagcacattttttggaaactcaacactcaggaaggtcgcatagagccagtttatgcagatgtcatccatactgtagggccaatagccaggggccatattaatggttcccacaaggaagaccttgcaaattgctataaatcatctctgaagctcgtgaaagaaaataacatccgatcagttgcatttccctgcatctcaacaggcatttatggctttcccaacgagcctgctgcagtcattgccctcaacaccattaaggaatggcttgccaagaatcaccatgaggtggatcggatcattttctgtgtcttcttagaagttgacttcaaaatctacaaaaagaaaatgaatgagtttttctccgtagacgataataatgaagaagaagaggatgttgaaatgaaagaagattcagatgagaacggtccagaggagaagcaaagtgtggaagaaatggaagagcagagccaagatgcagatggtgtcaacactgtcactgtgcccggccctgcttcagaagaggcagttgaagactgtaaagatgaagattttgcaaaggatgaaaatattacaaaaggcggtgaagtgacagatcattctgtgcgtgaccaagatcatcccgatggacaagagaatgattcaacgaagaatgaaataaaaattgaaacagaatcgcagagctcatatatggaaacagaagaactttcatcaaaccaagaagatgccgtgattgtggagcaaccagaagtgattccattaacagaggaccaagaagaaaaagaaggtgaaaaagctccaggcgaggacacacctaggatgcctgggaaaagtgaaggctccagtgacctagaaaatactccaggtcctgatgttgaaatgaatagtcaggttgacaaggtaaatgacccaacagagagtcaacaagaagatcaactaatagcaggggcacaagatgaagcgaaggaacaaagaaatggaactaaatgacaatcctcagcatcgcaaggcctctcctggctctgggggagctcgggaagatagcagcacacgctgtggaggagggtgggggtggggggaaggcaagtcccatggaaggacggggaatcctttactctaatttctccagctgcattttgttccgtttatctgcagaaaaagaaagaaaaaaaagaaaaaaaaagtttcctttaatttggtggagggacccatgttgacgcatctttcaggcattatccttgtaatttctgtcttttctcttacaactttgccccagggtcacagtggcttgattgaacactcacatgtgtatcctggcccctgtctgctttcttggttatttcacaaagctggtcacacagtggtttattcaaaggaaggggaggaagacagtggtttgataagctgcaggataaattttaggaatcaatgagcccagcagcagtataatccccagacagaggaggcaggatagaaaatgggcaaaagcctcggaaaccacttggaaaaggtctggacaatgaggtgaaaatattttcttcagggttcccaaggcacaatttgttccaagtggctaatgagaaatatggaagctgaattttttccagagcagagtgcagaggcataacagaagggtgggccctggcagccatctgggtctcttccttcctaaccatggtggcaggtgcatccttctttgacactgactttcagcagagcttacttggttcatgaggtcttcacatggagactaccagcaagaggtgactctctgctgcataactgtaaaggatggccctttgctaggtgttacagttaaaagctaagaaaaggggcagtgcatttaggacccaaacatatgcctatgaatatcaaaagctcctcctgaaattgctgtgagttttccataaaagaatatcctgtcttcacccaaggcttgacagcccacagagtggtctcatttgaaattacaggaaattagagcttttgcttgcagttctgccttcctggcctgtgtttaaatgctgtcacttgtttatgccaagttcaaggctgattcaatggttggtcccctcacccagaaaaccctgaaggggaggatacagctctgaaggggggcagcagtactaaaaacccaagatgccagtggtatagtgggcacaagggatggcgaccatgaggatgccaggcatcatcaccaatatctatcctagagccagtataaggccagatgcctacttcccacagcctccccgggttccaaagtcatgtcattgttttcagtggaaacatatcgtttgttgcatatcttcttaaatccatcttccttgtaagggctttagaactaaaacttacttatattgtttttccttaacagagggagaaaaatagtggattattatttctaaaataaaaggatgttctgctttctaaatatcccatcaaaatcttcagttttgcacttttttgatggaaaattcatcttatcttcctatgactttggttttagcctttctgaatttgttaccccttctggatggcttatttgatatactggaatagttaacaagctatacttcagcatatgcactatattctaacaaattttttttaataaaatcaagacatcagcaagaatgacatttacgtgacctcataatgtgggattatggccttctgttgctattccagtttgatatggaagcatctatatcctctattgccgttagatgttgttgcttttcagaaaagtaacgaaaaggctcattttaaagaatccaagaaacgatgtcatccaaatattgacagtttctacatttcatgccatctttataactcaattgaaagttgccgtcattcttgtgaagtatttgacaagtgcaatctgctagaagctcgtttttcttgtgactcccaaatgttagtgctacttagcctcagtaatgagttacagttgaaaaaaacatgagggaaacagagggacagagattttctaatgaacaatgatggaagagacctaatgtccttgctagaaacagccaggatggaaattatccagccctggcattctccttatcatcaatgacagtcattttattcatttatttcaaatgtgggtgggctagaagtggaaggagggaattctctctgcctaaaaattctagaagaatgaaagtaatctttgtatccaggaaactaagagaatgaggaataaatatcttcagcccgactcctgaatttgtttattcttccatctataattagattgtgttttcatttttgctttgtcatgctttttggttgttatttggctatacagttttatgctttaaaacaaatgataaagttaatttccaattcaatagtgaaatattaacaatctaactatagccagatcaaagacacctgaacacagaaaacctttatttgctggtgctgccattgcacaggctgtacaatgaaatagatttgaaaagctgattgattttcccgcacataaattctggatgtcaatttccaaccaaactccaatacagctatgtggcatgaagagttacaggagggagggaggaaaatagccctatgttagtcatgtttgcatacagaggatcaaagtaggccttcaccataatagttctaattaaaatggtcctcgctgtaggagagacaaaggggcttttcctctagctggtaactattcagatgatggacaagtcttctttcataaaagattacaaagaaggcatccgaatcactgtctgtgatactgggtcacatattaatcactgcagctaattgtaaatctttctatgaaacactgaaaagcctctttgtgaattaatacagttctgcttgatgcacttgatttgaaaagacatttctctgtatgtggcgcatgtcggctttgctttgaaaaataacaaagttagcagaatatgttcaatatattttcttggggaatagggtttttattacatgattcattaaggatttgccttaccctgacatttgtgatataaaggaaaatcagaaaaaaagtaattttcttgatcaagatatgtttttacttaatgcaaataaatgtagtctgttgcttgcaaggaaaaaaaaatggcttctgatatctggtataaactgctaaataggataatacgtgcctcttttgttaaaccggcatttaaatgctggactgcttctaaatctgtttgtttcttttcatctgtgccatacactaaaaaacaactgttgccttcatactatatttgttagagcagaatacaaataaaatttgtttgagaggataatgtgaaa

SEQ ID NO: 1963 - protein, 213 aa, Homo sapiens
MNEFFSVDDNNEEEEDVEMKEDSDENGPEEKQSVEEMEEQSQDADGVNTVTVPGPASEEAVEDCKDEDFAKDENITKGGEVTDHSVRDQDHPDGQENDSTKNEIKIETESQSSYMETEELSSNQEDAVIVEQPEVIPLTEDQEEKEGEKAPGEDTPRMPGKSEGSSDLENTPGPDVEMNSQVDKVNDPTESQQEDQLIAGAQDEAKEQRNGTK

SEQ ID NO: 1964 - DNA, 4863 bp, Homo sapiens
gaggcgtgacctagttgacaggctctgaggtgctgctgtggcggcgtccgcggggctgaggcgggtgggagccggagccgagcgcgggctgagggaggagggcggcgactggagagcggcgagcggcgagcagcgcaggacgcagagcctctttcactttttccctgctgagtgccccctcccacccctcccactccacacacaccctgtttgcccgtgagcctggggaacttgcagcttaaagccagccacccccacggcaacatgtaccccagcaacaagaagaaaaaggtgtggagagaggagaaagaacgtttattgaagatgaccttagaagagagacgcaaagaatacctaagagactatattcccctgaacagcattctatcatggaaggaggagatgaagggcaagggccaaaatgatgaagaaaatactcaggaaacatcccaggtgaagaaaagtttgactgaaaaagtttctctctatagaggtgacatcacattgctagaggtagatgctatagtcaatgccgcaaatgccagtcttcttggaggaggaggtgtggatggctgtattcatagagcagccggcccctgtttgctagctgaatgtcgtaacctgaatggctgtgatactggacatgcaaaaatcacatgtggctatgaccttcctgcaaaatatgtcatccatactgtagggccaatagccaggggccatattaatggttcccacaaggaagaccttgcaaattgctataaatcatctctgaagctcgtgaaagaaaataacatccgatcagttgcatttccctgcatctcaacaggcatttatggctttcccaacgagcctgctgcagtcattgccctcaacaccattaaggaatggcttgccaagaatcaccatgaggtggatcggatcattttctgtgtcttcttagaagttgacttcaaaatctacaaaaagaaaatgaatgagtttttctccgtagacgataataatgaagaagaagaggatgttgaaatgaaagaagattcagatgagaacggtccagaggagaagcaaagtgtggaagaaatggaagagcagagccaagatgcagatggtgtcaacactgtcactgtgcccggccctgcttcagaagaggcagttgaagactgtaaagatgaagattttgcaaaggatgaaaatattacaaaaggcggtgaagtgacagatcattctgtgcgtgaccaagatcatcccgatggacaagagaatgattcaacgaagaatgaaataaaaattgaaacagaatcgcagagctcatatatggaaacagaagaactttcatcaaaccaagaagatgccgtgattgtggagcaaccagaagtgattccattaacagaggaccaagaagaaaaagaaggtgaaaaagctccaggcgaggacacacctaggatgcctgggaaaagtgaaggctccagtgacctagaaaatactccaggtcctgatgcaggggcacaagatgaagcgaaggaacaaagaaatggaactaaatgacaatcctcagcatcgcaaggcctctcctggctctgggggagctcgggaagatagcagcacacgctgtggaggagggtgggggtggggggaaggcaagtcccatggaaggacggggaatcctttactctaatttctccagctgcattttgttccgtttatctgcagaaaaagaaagaaaaaaaagaaaaaaaaagtttcctttaatttggtggagggacccatgttgacgcatctttcaggcattatccttgtaatttctgtcttttctcttacaactttgccccagggtcacagtggcttgattgaacactcacatgtgtatcctggcccctgtctgctttcttggttatttcacaaagctggtcacacagtggtttattcaaaggaaggggaggaagacagtggtttgataagctgcaggataaattttaggaatcaatgagcccagcagcagtataatccccagacagaggaggcaggatagaaaatgggcaaaagcctcggaaaccacttggaaaaggtctggacaatgaggtgaaaatattttcttcagggttcccaaggcacaatttgttccaagtggctaatgagaaatatggaagctgaattttttccagagcagagtgcagaggcataacagaagggtgggccctggcagccatctgggtctcttccttcctaaccatggtggcaggtgcatccttctttgacactgactttcagcagagcttacttggttcatgaggtcttcacatggagactaccagcaagaggtgactctctgctgcataactgtaaaggatggccctttgctaggtgttacagttaaaagctaagaaaaggggcagtgcatttaggacccaaacatatgcctatgaatatcaaaagctcctcctgaaattgctgtgagttttccataaaagaatatcctgtcttcacccaaggcttgacagcccacagagtggtctcatttgaaattacaggaaattagagcttttgcttgcagttctgccttcctggcctgtgtttaaatgctgtcacttgtttatgccaagttcaaggctgattcaatggttggtcccctcacccagaaaaccctgaaggggaggatacagctctgaaggggggcagcagtactaaaaacccaagatgccagtggtatagtgggcacaagggatggcgaccatgaggatgccaggcatcatcaccaatatctatcctagagccagtataaggccagatgcctacttcccacagcctccccgggttccaaagtcatgtcattgttttcagtggaaacatatcgtttgttgcatatcttcttaaatccatcttccttgtaagggctttagaactaaaacttacttatattgtttttccttaacagagggagaaaaatagtggattattatttctaaaataaaaggatgttctgctttctaaatatcccatcaaaatcttcagttttgcacttttttgatggaaaattcatcttatcttcctatgactttggttttagcctttctgaatttgttaccccttctggatggcttatttgatatactggaatagttaacaagctatacttcagcatatgcactatattctaacaaattttttttaataaaatcaagacatcagcaagaatgacatttacgtgacctcataatgtgggattatggccttctgttgctattccagtttgatatggaagcatctatatcctctattgccgttagatgttgttgcttttcagaaaagtaacgaaaaggctcattttaaagaatccaagaaacgatgtcatccaaatattgacagtttctacatttcatgccatctttataactcaattgaaagttgccgtcattcttgtgaagtatttgacaagtgcaatctgctagaagctcgtttttcttgtgactcccaaatgttagtgctacttagcctcagtaatgagttacagttgaaaaaaacatgagggaaacagagggacagagattttctaatgaacaatgatggaagagacctaatgtccttgctagaaacagccaggatggaaattatccagccctggcattctccttatcatcaatgacagtcattttattcatttatttcaaatgtgggtgggctagaagtggaaggagggaattctctctgcctaaaaattctagaagaatgaaagtaatctttgtatccaggaaactaagagaatgaggaataaatatcttcagcccgactcctgaatttgtttattcttccatctataattagattgtgttttcatttttgctttgtcatgctttttggttgttatttggctatacagttttatgctttaaaacaaatgataaagttaatttccaattcaatagtgaaatattaacaatctaactatagccagatcaaagacacctgaacacagaaaacctttatttgctggtgctgccattgcacaggctgtacaatgaaatagatttgaaaagctgattgattttcccgcacataaattctggatgtcaatttccaaccaaactccaatacagctatgtggcatgaagagttacaggagggagggaggaaaatagccctatgttagtcatgtttgcatacagaggatcaaagtaggccttcaccataatagttctaattaaaatggtcctcgctgtaggagagacaaaggggcttttcctctagctggtaactattcagatgatggacaagtcttctttcataaaagattacaaagaaggcatccgaatcactgtctgtgatactgggtcacatattaatcactgcagctaattgtaaatctttctatgaaacactgaaaagcctctttgtgaattaatacagttctgcttgatgcacttgatttgaaaagacatttctctgtatgtggcgcatgtcggctttgctttgaaaaataacaaagttagcagaatatgttcaatatattttcttggggaatagggtttttattacatgattcattaaggatttgccttaccctgacatttgtgatataaaggaaaatcagaaaaaaagtaattttcttgatcaagatatgtttttacttaatgcaaataaatgtagtctgttgcttgcaaggaaaaaaaaatggcttctgatatctggtataaactgctaaataggataatacgtgcctcttttgttaaaccggcatttaaatgctggactgcttctaaatctgtttgtttcttttcatctgtgccatacactaaaaaacaactgttgccttcatactatatttgttagagcagaatacaaataaaatttgtttgagaggataatgtgaaa

SEQ ID NO: 1965 - protein, 425 aa, Homo sapiens
MYPSNKKKKVWREEKERLLKMTLEERRKEYLRDYIPLNSILSWKEEMKGKGQNDEENTQETSQVKKSLTEKVSLYRGDITLLEVDAIVNAANASLLGGGGVDGCIHRAAGPCLLAECRNLNGCDTGHAKITCGYDLPAKYVIHTVGPIARGHINGSHKEDLANCYKSSLKLVKENNIRSVAFPCISTGIYGFPNEPAAVIALNTIKEWLAKNHHEVDRIIFCVFLEVDFKIYKKKMNEFFSVDDNNEEEEDVEMKEDSDENGPEEKQSVEEMEEQSQDADGVNTVTVPGPASEEAVEDCKDEDFAKDENITKGGEVTDHSVRDQDHPDGQENDSTKNEIKIETESQSSYMETEELSSNQEDAVIVEQPEVIPLTEDQEEKEGEKAPGEDTPRMPGKSEGSSDLENTPGPDAGAQDEAKEQRNGTK

SEQ ID NO: 1966 - DNA, 4745 bp, Homo sapiens
gagctgaggaggagctgaaaatgcagatttagcatcaagcacagacctacactcgctctttctctccggtacacacagctccccacattcgcacccctgcccgcgcgccgggccgcctgactgcacggcttcccctccagccagatgctggagaacacacactgattcgctgctttccaagaccctgttcagtctctttctctatacaaagatttttttaaaaactatatataagaattctttatttgcaccctccctccgagtcccctgctccgccagcctgcgcgcctcctagcaccacttttcactcccaaagaaggatgaagggtggttgtgtctcccagtggaaggcggccgccgggttcctcttctgtgtcatggtttttgcatctgctgagcgaccggtcttcacgaatcattttcttgtggagttgcataaagggggagaggacaaagctcgccaagttgcagcagaacacggctttggagtccgaaagcttccctttgctgaaggtctgtaccacttttatcacaatggccttgcaaaggccaagagaagacgcagcctacaccacaagcagcagctggagagagaccccagggtaaagatggctttgcagcaggaaggatttgaccgaaaaaagcgaggttacagagacatcaatgagatcgacatcaacatgaacgatcctctttttacaaagcagtggtatctgatcaatactgggcaagctgatggcactcctggccttgatttgaatgtggctgaagcctgggagctgggatacacagggaaaggtgttaccattggaattatggatgatgggattgactatctccacccggacctggcctccaactataatgccgaagcaagttacgacttcagcagcaacgacccctatccttaccctcggtacacagatgactggtttaacagccacgggacccgatgtgcaggagaagtttctgctgccgccaacaacaatatctgtggagttggagtagcatacaactccaaggttgcaggcatccggatgctggaccagccattcatgacagacatcatcgaggcctcctccatcagtcatatgccacagctgattgacatctacagcgccagctggggccccacagacaacggcaagacagtggatgggccccgggagctcacgctgcaggccatggccgatggcgtgaacaagggccgcggcggcaaaggcagcatctacgtgtgggcctccggggacggcggcagctatgacgactgcaactgcgacggctacgcctccagcatgtggaccatctccatcaactcagccatcaacgacggcaggactgccctgtacgacgagagctgctcttccaccttggcttccaccttcagcaacgggaggaaaaggaaccccgaggccggtgtggcaaccacagatttgtacggcaactgcactctgaggcattctgggacatctgcagctgcccccgaggcagctggtgtgtttgcactggctctggaggctaacctgggtctgacctggcgggacatgcagcatctgactgtgctcacctccaaacggaaccagcttcacgacgaggtccatcagtggcggcgcaatggggtcggcctggaatttaatcacctctttggctacggggtccttgatgcaggtgccatggtgaaaatggctaaagactggaaaaccgtgcctgagagattccactgtgtgggaggctccgtgcaggaccctgagaaaataccatccactggcaagttggtgctgacactcacaaccgacgcctgtgaggggaaggaaaattttgtccgctacctggagcatgtccaggctgtcatcacggtcaacgcaaccagaagaggagacctgaacatcaacatgacttcccctatgggcaccaagtccattttgctgagccggcgtccaagggatgacgactccaaggtgggctttgacaagtggcctttcatgaccactcacacgtggggggaagacgcccgaggcacctggaccctggagctgggatttgtcggcagcgccccgcagaagggggtgctgaaggagtggaccctgatgctgcatggcactcagagtgccccgtacatcgaccaggtggtgcgggattaccagtccaagttggccatgtccaagaaagaggagctggaggaagagctggacgaagccgtggagagaagcctgaaaagcatccttaacaagaactagcgctgcacatccgcctttcccaccgccctccctccccagctccgcctctgtcctcgctccacgtttcaggcaggcacctagcaattccatcacccgtacaggcaattccgtcttcttaatctgaagcttcactcactgtcaatgattattttcattacaatggaaacaatcttttttactctatgccccaaatatagcgttcccaacaacatccatgtcctatgtgtgactctaaattctttatttctgtcattcaaatgggtgatatcctgaaaaaaaaaaaaaaaaaaaaactgggacagctttcccctcatttttttttttgtttctgagaaaagaacgtattttaaaagccacatagagtgactccaagaacaattgtccatggtctcaaacaaggggctgttacataacaagaaaatcaaagctgaggacagggtgtgagcgccacatctctgaaagcacaggagacactgtgctataaatcctttggggagcgatgttttgaatttagtgagatttaccagggatgtagattaaggtgatgtgattcaaaagatgccattcatagagagccctagttactgcatggggaaagagatccaggaagcatgagtgctggatattttactaccaatgccaagataattcactctactcagccggcgtggcaaatataaaacttacagagcgtggctgtgctctcaccagctgctgctctgagttatgttaaaatccgctagagcagcccaaatttttctcagtttgtatagagttcatcccagccccaattttctggggctcctcacatagctacccaaaagagaaaaaaaattaagacaagcctggcaacacacctggtgaagagtagtttactagcttttcaaacaagaatgtcccttttcctaagtcactttgaggtgtctcaatctgatctgagtgagaggcgacaggagtatttttttttttttacagctttacacacacagatgtgggctttgatttccaagtaatataatggaagagaaatctcatactcccccacagtttgatgtcattaatgtgttgggaaaaaggcctctgtcccggaagagtcatgggaggtgaaaggggcacgtttgaagatgcgagcgctatcttcacatagttctccagttgtatggagcctcttctgccaagagagggccatgcaattcatcccagaggaacctgaggcctgaaggaggtgagagaagacctctgtgaggaaagcacacagtcaccttctcggcaactaagcagtccctgagaccatttaacatgcaacccgaaggttatggtcaatcccaaaagtcaccactccattcccaactagacattaccaaagtgacctacccagagattgcttctcatccccagtcccaatgcacatccattcccaagaaatgctttgtcttcagcctctccaggcaccatctcccttcctgtgggagcagagagcttagcctggagcacctttccttcaagccagcaacacagagcactaggttcaattccctgaaggtggccactttaagagagaaatctgaaaaccccatttgctttcttttctcccatattggcatggatttctgtcttctctaacaccttgtgaccttctctatatcatgctttaaagtgtaataatatgattttttaaaagaaatttattacttgttgcaaaggtctttttaaaccagtttagatttcaagaaaaaataaatggaaatcatcgaaaattcatttcacattaatggtctaaaaataaaccaaaggacattatgtgtgcatgtgtgtataagtgcacacagaaatatatatacatatgtagactatatacatgtgtgtatatatgtgtatatatacatacacttgtataaatgtatatacacatatacctataatgtgtgtatgtgtatttattgaagaaacagataccatactcatttctaaaagaatattcagagaatatcaagatgattctggctgaaaaaggccagtggaaattcaggtgaaaatgttcatcaattcccattgcatcacctctgtaatttttcagctctctgtataaacattaaatgtcttatatagcagcaaaaatataaaatagttgtccatattttcacaggtgtggtgtaatttataaaattagaaagcaacttatcagctacttaagagaaatggcaagttttgatatgagtatacaatatataaaaatatatatagtgctatatatataaatatttggtctctatttcattttttgcatcagtattaatactaaaatatgtctcgctagtgatgtttttatgatatccctgatcctaactgaagagacagttatttatagtcatttattttaaaaaatgaaaataagtgaataataattaggttaacattgttgctccctgtgacaaaattttataagcaaatttcaaaagacatgttgtaaattaggaggctcaacaataaaacattatgctccagaaa

SEQ ID NO: 1967 - protein, 638 aa, Homo sapiens
MKGGCVSQWKAAAGFLFCVMVFASAERPVFTNHFLVELHKGGEDKARQVAAEHGFGVRKLPFAEGLYHFYHNGLAKAKRRRSLHHKQQLERDPRVKMALQQEGFDRKKRGYRDINEIDINMNDPLFTKQWYLINTGQADGTPGLDLNVAEAWELGYTGKGVTIGIMDDGIDYLHPDLASNYNAEASYDFSSNDPYPYPRYTDDWFNSHGTRCAGEVSAAANNNICGVGVAYNSKVAGIRMLDQPFMTDIIEASSISHMPQLIDIYSASWGPTDNGKTVDGPRELTLQAMADGVNKGRGGKGSIYVWASGDGGSYDDCNCDGYASSMWTISINSAINDGRTALYDESCSSTLASTFSNGRKRNPEAGVATTDLYGNCTLRHSGTSAAAPEAAGVFALALEANLGLTWRDMQHLTVLTSKRNQLHDEVHQWRRNGVGLEFNHLFGYGVLDAGAMVKMAKDWKTVPERFHCVGGSVQDPEKIPSTGKLVLTLTTDACEGKENFVRYLEHVQAVITVNATRRGDLNINMTSPMGTKSILLSRRPRDDDSKVGFDKWPFMTTHTWGEDARGTWTLELGFVGSAPQKGVLKEWTLMLHGTQSAPYIDQVVRDYQSKLAMSKKEELEEELDEAVERSLKSILNKN

SEQ ID NO: 1968 - DNA, 2112 bp, Homo sapiens
acttgagctgtctctgctgcctctccaggggccacctggcctcaggaccccaggcaagcaccgtgggttgggaaccaacctggtggaaaactaaaatcagcccatcttcaggtctaccgcggcggatgaagcctcacgcagaacagatacagttgcttggcaagcagggggctgcagtttctcaactttgccctttggtgcttgtaagtggacatatctgcagagaagaaaggagacattttcaaagaattgctcttactgcctcctccttgtcctgtggctctcagctcaaatggcacctcctccaagaagccttccctgattttctacccttctctgtgctcccagtttcctggactgcccgtgccacagacgtgctggcactgtctgttgacatggcttgctctctacttccccactggactgggcactctgcaagggcaaagactgtgtttggcccctctttgtggctgcagctgtgccttgcacaggttcaggcacagtacgggtgttcactaatgtttgctgaatgaatcaatgaacaaatattcccttccagttctgctccacctctggactcctgccccacaggggagaaaccctttttgaaagcacctgtgacatagttcaagatcaccaatgtcgggcgagggtaggacatgcaccctggagtccagccatacctcagcacagccctcctgcccacatcgccaaggccctgtcagaggcatgacaaacagcttggctgatggcttataatgtcaaagatgatggaaacagggaggcgacggctgaaagaatgggttggggacgcttgtcataactttatttgtgggagacacactgtctaccttgattctccaaactgccctaaaaagaacatacatttttacagaggaggaaaccgaagcttgaagaggagaaatgacatatccaagtgccccatgaaggaggacaaaagcccaggaggcagctgtcgcatcatcctcttcctttccctgcacatccgctacatcccttggtcctactgatttcacctgccgtttcctctatgtccaacgttactcagtccaagtccccaagcatttcctgcctcgacagttattctaccccatcctcccctgctgctctcaaactcctccttcttttttttttttgagacagactcttgatgcccaggctggagtgcaatggcgcgatctcggctcactgcaacctccgcctcccaggttcgggtggctctcttgcctcggcctcccaagtagctgggattgcagcgtgcgccaccacacccagctgatttttgtatatttggtagagataaagggtttcaccatgttggccaggctggtcttcaactcttgacctcaggtgatgtgcccgccttggcctcccaaagtgctgggattacaggcttgagccactgcgccagcaaactcattcttcttcttacagactctcttatttgagttcacctaaaagcctgagataaggaattggatgtacagaatttatttgcatggccatcccaggaaacacttggaagtaggggagtgggaaaggaagacagggaggggtaggcagccaggaaaagggttatcgagcaggttacactgtggataacgggggcttgattccaccagacctctgggagcccatgaataacacctcggagttctcctgcctgcggagttggggagcagggtatttatctactaggtcctatgggggcaggggtgttcattctcaggcacctctgacctgcttcacaggcgggaagagtgtgctccagagttgttaaagaaagtctttaggtaaagagacacagtgggctgggcacagtggctcacgcctgtaatcccaacactttgggaggccaaggcgggtggatcacctgaggtcaggagttcgggaccagcctgaccaacatggtgaaaccccgtctctgttaaaaatacaaagatcagctgggagtggtggtgggtgcctgtagtcccagctccttgggaggctggggcaggagaatcacctgaaccagggaggcggaggttgcagtgagccgagattgcgccactgcactccagcctgggtgacagagtaagactctgtctt

SEQ ID NO: 1969 - protein, 135 aa, Homo sapiens
MKPHAEQIQLLGKQGAAVSQLCPLVLVSGHICREERRHFQRIALTASSLSCGSQLKWHLLQEAFPDFLPFSVLPVSWTARATDVLALSVDMACSLLPHWTGHSARAKTVFGPSLWLQLCLAQVQAQYGCSLMFAE

SEQ ID NO: 1970 - DNA, 1897 bp, Homo sapiens
actttacggcagtgtggctggagccgcggctgacgggcccgcggtctgggcgtgagtgcagggaagtggagtatttgctgggccgggtaccatggacgtgggcgaacttctgagctaccagcccaataggggcacaaaacgtccccgggatgatgaagaggaggagcagaagatgcgtcggaaacaaactggtactcgagaacgcggccgctatcgggaagaagaaatgactgtggtggaggaagcggatgatgacaaaaaaaggctgctgcagattattgacagagatggggaagaggaagaggaagaggaggagccattggatgaaagctcagtgaagaaaatgatcctcacatttgaaaagagatcatataaaaaccaagaattgcggattaagtttccagacaatccagagaagttcatggaatccgagctggacctaaatgacatcattcaggagatgcacgtggtggccaccatgccagacctgtaccaccttctggtggagctgaatgctgtacagtcgcttctcggcttgctcggacacgataatacagatgtgtccatagctgtggtcgatttgcttcaggaattaacagatatagacaccctccatgagagtgaagagggagcagaagtgctcatcgatgctctggtggatgggcaggtggtagcactgctggtacagaatctggagcgcctggatgagtctgtgaaagaggaggcagatggcgtccacaacactctggctattgtggaaaacatggctgagttccggcctgagatgtgtacagagggtgcccagcagggtcttctacagtggctgttgaagaggctgaaggcaaagatgccttttgatgccaacaaactgtattgcagtgaagtgctggccatattgctccaggacaatgatgaaaacagggaattgcttggggagctggatggaatcgatgtgcttcttcagcagttatccgtgtttaaaagacacaatcccagcacggctgaggagcaggagatgatggagaatctgtttgattccctctgctcctgtctaatgcttagttccaatcgtgagcgcttcctgaagggcgagggtcttcagctgatgaatctcatgctcagggaaaagaagatctcccggagcagtgccctgaaagtgctggaccatgccatgattggccccgaaggcacagacaactgccataagtttgttgacattcttggcttacgaaccatctttcccctctttatgaaatctcccaggaagatcaagaaagtgggaaccactgagaaggaacatgaagagcatgtctgttcgatcctggcttccctcctgcggaacctgagagggcagcagcggacccggcttctgaataaattcactgaaaatgacagtgagaaggttgacagactaatggagttgcattttaaatatctgggtgcaatgcaggtggcggacaagaagattgaaggggaaaaacacgacatggtccggcgaggagagatcatcgacaatgacaccgaggaggagttctacctccggcgcctggatgcggggctctttgttctccagcacatctgctacatcatggccgagatctgcaatgccaatgtcccccagattcgccagagggttcaccagatcctaaacatgcgaggaagctccatcaaaattgtcaggcatatcatcaaggagtatgcagagaacatcggggacggccggagcccggagttccgggagaacgagcaaaagcgcatcctgggcttgctggagaacttctagaggcaccttggccctgcgcatcatggactctctcagcttccctcccaggatcagtttctacacaactctgtgtggcttttggacaaattaaagctagttttggtaaaaaaaaaa

SEQ ID NO: 1971 - protein, 563 aa, Homo sapiens
MDVGELLSYQPNRGTKRPRDDEEEEQKMRRKQTGTRERGRYREEEMTVVEEADDDKKRLLQIIDRDGEEEEEEEEPLDESSVKKMILTFEKRSYKNQELRIKFPDNPEKFMESELDLNDIIQEMHVVATMPDLYHLLVELNAVQSLLGLLGHDNTDVSIAVVDLLQELTDIDTLHESEEGAEVLIDALVDGQVVALLVQNLERLDESVKEEADGVHNTLAIVENMAEFRPEMCTEGAQQGLLQWLLKRLKAKMPFDANKLYCSEVLAILLQDNDENRELLGELDGIDVLLQQLSVFKRHNPSTAEEQEMMENLFDSLCSCLMLSSNRERFLKGEGLQLMNLMLREKKISRSSALKVLDHAMIGPEGTDNCHKFVDILGLRTIFPLFMKSPRKIKKVGTTEKEHEEHVCSILASLLRNLRGQQRTRLLNKFTENDSEKVDRLMELHFKYLGAMQVADKKIEGEKHDMVRRGEIIDNDTEEEFYLRRLDAGLFVLQHICYIMAEICNANVPQIRQRVHQILNMRGSSIKIVRHIIKEYAENIGDGRSPEFRENEQKRILGLLENF

SEQ ID NO: 1972 - DNA, 6633 bp, Homo sapiens
cggcgccgcgcggccgcgctagaatggaggcgcccagcggcagcgagcccggcggcgacggggccggggactgcgcccacccggacccccgggcccctggcgccgcggcgcccagctccggccccggcccgtgcgcggccgcccgggagtccgagcgccagctgcgcctccgcctctgcgtcctcaacgagatcttgggcaccgagagggactacgtgggcaccttgcgcttcttgcagtcggcattcctgcatcgcatccggcagaacgtggccgactcagtggagaagggcctcacggaggagaatgtcaaggtcctgttctcgaacatcgaagacatcctggaagttcataaggatttcttggccgccttggagtattgtttacacccggagccgcagtctcagcatgaacttgggaatgttttcttaaaattcaaggacaagttctgcgtgtacgaggagtattgcagcaaccatgagaaagccctgaggctgctggtggagctgaacaagatccctaccgtgcgcgccttccttttgagctgcatgcttctgggaggccggaagaccacggacatccctttggaaggctacctgttgtctccgatccagaggatctgcaagtacccgctcctccttaaggagctggccaagaggactcccggcaagcacccagaccaccccgcggtccagagtgccctgcaggccatgaagaccgtttgctccaacatcaatgagaccaagcggcagatggagaagctggaagccctggagcagctgcagtcccacatcgaaggctgggagggttccaacctcacagacatctgcactcagctcctcctgcaagggactttgttaaagatctctgcgggcaacatccaggaaagggccttcttcctcttcgacaaccttctcgtctactgcaagcggaaatccagggtcaccgggagcaagaagtccaccaagaggaccaaatccatcaacggctccctctacatcttcaggggtcgaatcaacactgaagtcatggaggtggagaatgtggaagatgggacagcggattaccatagcaacggctataccgtcaccaacggctggaagatccacaacacggccaagaataagtggtttgtctgcatggccaagacggcagaggagaagcagaagtggctggatgccatcatccgcgagcgggagcagcgcgagagcctgaagctgggcatggagcgtgatgcctacgtcatgattgcggagaagggggagaagctgtaccacatgatgatgaacaagaaggtgaacctcatcaaggaccgccggagaaagctgagcactgtccccaagtgctttcttggcaatgagttcgttgcctggctcctagaaattggtgaaatcagcaagacggaagaaggagtcaacttgggccaagccctgttggagaatggcatcatccaccatgtttccgacaagcaccagttcaagaatgagcaggtgatgtatcgcttccgctacgacgatggcacctacaaggcccgaagtgagctggaggacatcatgtccaagggtgtgaggctttactgccgtcttcacagcctctacaccccggtgatcaaagaccgtgattaccacctgaagacctacaagtcagtgcttcccgggagcaagctggtggactggctgctggctcagggagactgccagactcgggaggaggcagtggcgctcggcgtgggtctgtgcaacaatggcttcatgcaccacgtgctggagaagagcgagttcagggatgagtcccagtacttccgctttcatgctgacgaggagatggaggggaccagcagcaagaacaaacagcttcgcaacgacttcaagctggtggagaacattctggccaagcgcctgctgatcctgccccaggaggaggactatggctttgacatcgaggagaagaacaaggctgtggtggtgaagtccgtccagaggggctcgctggctgaggtggctggcctgcaggtggggaggaagatctactccatcaatgaggacctggtgttcctgcggccgttttcagaggtggagtccatcctcaaccagtccttctgctcccgccgccctctgcgcctcctggtggccacgaaggccaaagagatcatcaaaatccccgaccagccggacacactgtgcttccagattcgtggagctgccccaccgtacgtctatgctgtggggagaggctctgaggccatggctgcagggctctgtgctggtcagtgcattctgaaggtcaatggcagcaacgtgatgaacgatggtgcccctgaggtcctggagcacttccaggcattccggagtcggcgcgaagaggccctgggcctgtaccagtggatctaccacacccatgaggatgcccaggaagcacgagccagtcaggaggcctccactgaggaccccagtggcgagcaggcccaggaggaagaccaggctgattcagccttcccactgctgtccctgggtccccggctgagcctgtgtgaggacagccccatggtcaccctgactgtggacaacgtgcacctggaacacggcgtggtgtatgagtatgtgagcacggcaggcgtcaggtgccatgtgctggagaagatcgtggagccccgcggctgcttcggcctcaccgccaagatcctcgaggcctttgctgccaatgacagcgtcttcgtggagaactgcaggcggctcatggccctgagcagcgccatcgtgaccatgccccactttgagttccgcaacatctgtgacaccaagctggagagcattggccagaggattgcctgctaccaggagtttgcagcccaactgaagagcagggtcagcccacccttcaaacaagcccccctggagccccacccgctgtgtggcctggacttctgccccaccaattgccacatcaacctcatggaagtgtcctaccccaagaccaccccctcagtgggcaggtccttcagcatccgctttggacgcaaaccctccctcatcggccttgacccggagcaaggccacctgaaccccatgtcgtacacccagcactgcatcaccaccatggctgctccctcctggaagtgcttgcctgctgcagagggtgatccccaaggccagggtctccatgatggcagcttcgggccagccagtgggacccttggtcaggaagaccggggcctcagcttcctactcaagcaggaggaccgtgagatccaggatgcctacctgcagctcttcaccaagctggatgtggccctgaaggagatgaagcaatatgtcacccagatcaacaggctgctgtccaccatcacagagcccacctcgggtgggtcctgcgacgcatccttggctgaggaggcctcctccctgcccctggtcagtgaagagagcgagatggacaggagtgaccatgggggcatcaagaaggtgtgcttcaaggtggccgaggaggaccaggaggactcaggccacgacaccatgagttatcgcgactcctacagcgagtgtaacagcaatcgagactcggtcctgtcctacaccagcgtgagaagtaacagctcctacttgggcagcgacgagatggggtctggagatgagctgccctgtgacatgcggatcccatctgacaagcaggacaagcttcatggctgcctggagcacctctttaaccaggtggactccatcaatgctctcctcaaggggccagtcatgagccgggctttcgaagagaccaagcatttccctatgaaccacagcttacaagagtttaaacagaaagaagagtgtacaatccgtggccggagcctgatccagattagcatccaggaggacccctggaacctccccaactccatcaagaccctggtggacaacattcagagatatgtggaagatgggaagaaccagctgctcctggccttgctgaagtgcacagacacggagctgcagctgcgcagagacgcgatcttctgccaggccctggtggccgccgtgtgcaccttctccgagcagctgctggcggccctgggctaccgctacaacaacaatggcgagtacgaggagagcagccgcgacgccagccgcaagtggctggagcaggtggcggccacgggcgtcctgctgcactgccagtccctgctctcgccagccacagtgaaggaggaacggaccatgctggaggacatctgggtgacgctgtcagagctggacaatgtcaccttctcctttaagcagctggacgagaactatgtggccaacaccaacgtcttctaccacattgagggcagccggcaggcgctgaaggtcatcttctacctcgacagctaccacttctccaagctgccctcccgcctggagggtggggccagcctgaggctgcacacagcgctgttcacgaaagtgctggagaacgtggaggggctgccttctccaggcagccaggccgcggaggatttgcagcaggacatcaacgcgcagtccctggagaaagttcagcagtattaccgcaaactcagggcattttacctggagcggtctaacctgcccacggatgccagcaccacggcggtaaagatagaccagctgatccgccccatcaatgccctggatgagctctgccgcctcatgaagtcctttgtccacccaaagcctggtgctgctgggagtgtgggcgccggcctcatccccatctcctcggagctctgctaccgcctgggggcctgccagatggtcatgtgtggcacaggcatgcagaggagcaccctgagcgtgtccctggagcaggcggccatcttggcacggagccacgggttgctgcccaagtgcatcatgcaggccacggacatcatgcggaagcagggcccaagggtggagattctggccaaaaacctgcgagtcaaggaccagatgccccagggtgctccgcgcctctaccgcctctgccagccgccggtggatggggacctctgaacacccaaatgccccacgctgggccgcggcctctggagctgggatttgggaggacacagcaggcagcgctggccttctccagggatggcccaaggcttccgcagccgcccgttccgggacctgcccagcgtcctccctgcctccttccgggacaagcctggccaccctcgctgtgatgacgagctggctgattggccctgggccggcccattcttcacacgcctgccagaagctggaggggtgctggagacccatagagctgatgggagcagctggtgcctggccttcggctcctgcgtccccagaacccaagggaacgtcatggaggccacatggggccacccggctccctcgggatggctccgcctgcacttttgaaaccccggtttccttcaacgtccacattccaggtgaccacacgtgtctcctcctcctcatcttagcttccaggttcaccctaaccctgtactaacctgcttggtggacttggaaaagacttggctctgtcgggaaaggagagacggggcctccatcacgcctgttaccagaggatccccgagagccacaccagctctggacatcaccgcccctggaactggggccaccagccctgggcacgagatttgctctgactttatttatatggcatgaaatctctggtttattttgggattttttgttgttggtgttgtcaaagtttgttttttctaaagttgtgtgattatatatttgacattttacatttcaaagaaaggtatgttgtctaacaggggaccaacagaaggtagtattgacaactgttcctgcttctactaaaaaaaaaagagcacaaaagaaaaactaaattattgaaaaattaaaaaatgtcattgtttcctgtttgttaatattagggttgtaaggtgtcgttttgaggtatcgactgtgattccttcccccaccctccattctccagcggttggccggtgttagaactcgctctctttgagtgactggctacaagggcctgagaggtggccagccagggttggagctggaggggatggagccccacctgaggtgccgtgtcacacgggttagagggtcactgggaaacaccgggcggtggcttctgtgatttattttcttgatggtaacttctcagagcagggcgattgggacatcaccagccagagcacaggaagccaccctgcctgctggggaggagggacccacacaagccccctcggcagtttgtccccccagcttcggtatgccttcagggaaaggtcacagctggggaggaagcggggggacgcctgtcacccctggcaggtggtgagttcaggtgggggctccctgctgcccccaggcctgggagcttgaagccctcccggcatctggcatccgagcctcccgccctccagggtgcgcttccctctcttgccgcagcatacacgagggcaggcagtggccttgtcactgtatcttgcatcagagacaaaggaggacccgctttagccctgctgcgggaaatgggggagggcccagggccagcgcattgtgcactggtttactttaaaatgtacagattcttctcgttaaattcttgatagattttttattattattaaaagtcagtttataatac

SEQ ID NO: 1973 - protein, 1659 aa, Homo sapiens
MEAPSGSEPGGDGAGDCAHPDPRAPGAAAPSSGPGPCAAARESERQLRLRLCVLNEILGTERDYVGTLRFLQSAFLHRIRQNVADSVEKGLTEENVKVLFSNIEDILEVHKDFLAALEYCLHPEPQSQHELGNVFLKFKDKFCVYEEYCSNHEKALRLLVELNKIPTVRAFLLSCMLLGGRKTTDIPLEGYLLSPIQRICKYPLLLKELAKRTPGKHPDHPAVQSALQAMKTVCSNINETKRQMEKLEALEQLQSHIEGWEGSNLTDICTQLLLQGTLLKISAGNIQERAFFLFDNLLVYCKRKSRVTGSKKSTKRTKSINGSLYIFRGRINTEVMEVENVEDGTADYHSNGYTVTNGWKIHNTAKNKWFVCMAKTAEEKQKWLDAIIREREQRESLKLGMERDAYVMIAEKGEKLYHMMMNKKVNLIKDRRRKLSTVPKCFLGNEFVAWLLEIGEISKTEEGVNLGQALLENGIIHHVSDKHQFKNEQVMYRFRYDDGTYKARSELEDIMSKGVRLYCRLHSLYTPVIKDRDYHLKTYKSVLPGSKLVDWLLAQGDCQTREEAVALGVGLCNNGFMHHVLEKSEFRDESQYFRFHADEEMEGTSSKNKQLRNDFKLVENILAKRLLILPQEEDYGFDIEEKNKAVVVKSVQRGSLAEVAGLQVGRKIYSINEDLVFLRPFSEVESILNQSFCSRRPLRLLVATKAKEIIKIPDQPDTLCFQIRGAAPPYVYAVGRGSEAMAAGLCAGQCILKVNGSNVMNDGAPEVLEHFQAFRSRREEALGLYQWIYHTHEDAQEARASQEASTEDPSGEQAQEEDQADSAFPLLSLGPRLSLCEDSPMVTLTVDNVHLEHGVVYEYVSTAGVRCHVLEKIVEPRGCFGLTAKILEAFAANDSVFVENCRRLMALSSAIVTMPHFEFRNICDTKLESIGQRIACYQEFAAQLKSRVSPPFKQAPLEPHPLCGLDFCPTNCHINLMEVSYPKTTPSVGRSFSIRFGRKPSLIGLDPEQGHLNPMSYTQHCITTMAAPSWKCLPAAEGDPQGQGLHDGSFGPASGTLGQEDRGLSFLLKQEDREIQDAYLQLFTKLDVALKEMKQYVTQINRLLSTITEPTSGGSCDASLAEEASSLPLVSEESEMDRSDHGGIKKVCFKVAEEDQEDSGHDTMSYRDSYSECNSNRDSVLSYTSVRSNSSYLGSDEMGSGDELPCDMRIPSDKQDKLHGCLEHLFNQVDSINALLKGPVMSRAFEETKHFPMNHSLQEFKQKEECTIRGRSLIQISIQEDPWNLPNSIKTLVDNIQRYVEDGKNQLLLALLKCTDTELQLRRDAIFCQALVAAVCTFSEQLLAALGYRYNNNGEYEESSRDASRKWLEQVAATGVLLHCQSLLSPATVKEERTMLEDIWVTLSELDNVTFSFKQLDENYVANTNVFYHIEGSRQALKVIFYLDSYHFSKLPSRLEGGASLRLHTALFTKVLENVEGLPSPGSQAAEDLQQDINAQSLEKVQQYYRKLRAFYLERSNLPTDASTTAVKIDQLIRPINALDELCRLMKSFVHPKPGAAGSVGAGLIPISSELCYRLGACQMVMCGTGMQRSTLSVSLEQAAILARSHGLLPKCIMQATDIMRKQGPRVEILAKNLRVKDQMPQGAPRLYRLCQPPVDGDL

SEQ ID NO: 1974 - DNA, 3579 bp, Homo sapiens
tcaggctcgctgtcgcgccattttgccggggtttgaatgtgaggcggagcggcggcaggagcgggtagtgccagctacggtccgcggctggggttccctcctccgtttctgtatccccacgagatcctatagcaatggaactcagcgatgcaaatctgcaaacactaacagaatatttaaagaaaacacttgatcctgatcctgccatccgacgtccagctgagaaatttcttgaatctgttgaaggaaatcagaattatccactgttgcttttgacattactggagaagtcccaggataatgttatcaaagtatgtgcttcagtaacattcaaaaactatattaaaaggaactggagaattgttgaagatgaaccaaacaaaatttgtgaagccgatcgagtggccattaaagccaacatagtgcacttgatgcttagcagcccagagcaaattcagaagcagttaagtgatgcaattagcattattggcagagaagattttccacagaaatggcctgacttgctgacagaaatggtgaatcgctttcagagtggagatttccatgttattaatggagtcctccgtacagcacattcattatttaaaagataccgtcatgaatttaagtcaaacgagttatggactgaaattaagcttgttctggatgcctttgctttgcctttgactaatctttttaaggccactattgaactctgcagtacccatgcaaatgatgcctctgccctgaggattctgttttcttccctgatcctgatctcaaaattgttctatagtttaaactttcaggatctccctgaattttttgaagataatatggaaacttggatgaataattttcatactctcttaacattggataataagcttttacaaactgatgatgaagaggaagccggcttattggagctcttaaaatcccagatttgtgataatgccgcactctatgcacaaaagtacgatgaagaattccagcgatacctgcctcgttttgttacagccatctggaatttactagttacaacgggtcaagaggttaaatatgatttgttggtaagtaatgcaattcaatttctggcttcagtttgtgagagacctcattataagaatctatttgaggaccagaacacgctgacaagtatctgtgaaaaggttattgtgcctaacatggaatttagagctgctgatgaagaagcatttgaagataattctgaggagtacataaggagagatttggaaggatctgatattgatactagacgcagggctgcttgtgatctggtacgaggattatgcaagttttttgagggacctgtgacaggaatcttctctggttatgttaattccatgctgcaggaatacgcaaaaaatccatctgtcaactggaaacacaaagatgcagccatctacctagtgacatctttggcatcaaaagcccaaacacagaagcatggaattacacaagcaaatgaacttgtaaacctaactgagttctttgtgaatcacatcctccctgatttaaaatcagctaatgtgaatgaatttcctgtccttaaagctgacggtatcaaatatattatgatttttagaaatcaagtgccaaaagaacatcttttagtctcgattcctctcttgattaatcatcttcaagctgaaagtattgttgttcatacttacgcagctcatgctcttgaacggctctttactatgcgagggcctaacaatgccactctctttacagctgcagaaatcgcaccgtttgttgagattctgctaacaaaccttttcaaagctctcacacttcctggctcttcagaaaatgaatatattatgaaagctatcatgagaagtttttctctcctacaagaagccataatcccctacatccctactctcatcactcagcttacacagaagctattagctgttagtaagaacccaagcaaacctcactttaatcactacatgtttgaagcaatatgtttatccataagaataacttgcaaagctaaccctgctgctgttgtaaattttgaggaggctttgtttttggtgtttactgaaatcttacaaaatgatgtgcaagaatttattccatacgtctttcaagtgatgtctttgcttctggaaacacacaaaaatgacatcccgtcttcctatatggccttatttcctcatctccttcagccagtgctttgggaaagaacaggaaatattcctgctctagtgaggcttcttcaagcattcttagaacgcggttcaaacacaatagcaagtgctgcagctgacaaaattcctgggttactaggtgtctttcagaagctgattgcatccaaagcaaatgaccaccaaggtttttatcttctaaacagtataatagagcacatgcctcctgaatcagttgaccaatataggaaacaaatcttcattctgctattccagagacttcagaattccaaaacaaccaagtttatcaagagttttttagtctttattaatttgtattgcataaaatatggggcactagcactacaagaaatatttgatggtatacaaccaaaaatgtttggaatggttttggaaaaaattattattcctgaaattcagaaggtatctggaaatgtagagaaaaagatctgtgcggttggcataaccaaattactaacagaatgtcccccaatgatggacactgagtataccaaactgtggactccattattacagtctttgattggtctttttgagttacccgaagatgataccattcctgatgaggaacattttattgacatagaagatacaccaggatatcagactgccttctcacagttggcatttgctgggaaaaaagagcatgatcctgtaggtcaaatggtgaataaccccaaaattcacctggcacagtcacttcacaagttgtctaccgcctgtccaggaagggttccatcaatggtgagcaccagcctgaatgcagaagcgctccagtatctccaagggtaccttcaggcagccagtgtgacactgctttaaactgcatttttctaatgggctaaacccagatggtttcctaggaaatcacaggcttctgagcacagctgcattaaaacaaaggaagttctccttttgaacttgtcacgaattccatcttgtaaaggatattaaatgttgctttaacctgaaccttgagcaaattagttggtttgtgtgatcatacagttatgtgggtggcttctagtttgcaacttcaagggacaagtattaatagttcagtgtatggcgttggtttgtgttgagcgtttgcacggtttggataatcttaaattttgacggacactgtggagactttctgttactaaatccttttgttttgaagctgttgctatttgtatttctcttgtcctttatattttttgtctgtttatttacgcttttattggaaatgtgaataagtaaagaattacttgtgttacttgccaagcagtgcacatttcatagtttcaaatctgtaatcagcaataaaaatcctaaaatatgtacctaaaaaaaaaaaaaaaaaaaa

SEQ ID NO: 1975 - protein, 971 aa, Homo sapiens
MELSDANLQTLTEYLKKTLDPDPAIRRPAEKFLESVEGNQNYPLLLLTLLEKSQDNVIKVCASVTFKNYIKRNWRIVEDEPNKICEADRVAIKANIVHLMLSSPEQIQKQLSDAISIIGREDFPQKWPDLLTEMVNRFQSGDFHVINGVLRTAHSLFKRYRHEFKSNELWTEIKLVLDAFALPLTNLFKATIELCSTHANDASALRILFSSLILISKLFYSLNFQDLPEFFEDNMETWMNNFHTLLTLDNKLLQTDDEEEAGLLELLKSQICDNAALYAQKYDEEFQRYLPRFVTAIWNLLVTTGQEVKYDLLVSNAIQFLASVCERPHYKNLFEDQNTLTSICEKVIVPNMEFRAADEEAFEDNSEEYIRRDLEGSDIDTRRRAACDLVRGLCKFFEGPVTGIFSGYVNSMLQEYAKNPSVNWKHKDAAIYLVTSLASKAQTQKHGITQANELVNLTEFFVNHILPDLKSANVNEFPVLKADGIKYIMIFRNQVPKEHLLVSIPLLINHLQAESIVVHTYAAHALERLFTMRGPNNATLFTAAEIAPFVEILLTNLFKALTLPGSSENEYIMKAIMRSFSLLQEAIIPYIPTLITQLTQKLLAVSKNPSKPHFNHYMFEAICLSIRITCKANPAAVVNFEEALFLVFTEILQNDVQEFIPYVFQVMSLLLETHKNDIPSSYMALFPHLLQPVLWERTGNIPALVRLLQAFLERGSNTIASAAADKIPGLLGVFQKLIASKANDHQGFYLLNSIIEHMPPESVDQYRKQIFILLFQRLQNSKTTKFIKSFLVFINLYCIKYGALALQEIFDGIQPKMFGMVLEKIIIPEIQKVSGNVEKKICAVGITKLLTECPPMMDTEYTKLWTPLLQSLIGLFELPEDDTIPDEEHFIDIEDTPGYQTAFSQLAFAGKKEHDPVGQMVNNPKIHLAQSLHKLSTACPGRVPSMVSTSLNAEALQYLQGYLQAASVTLL

SEQ ID NO: 1976 - DNA, 3540 bp, Homo sapiens
acttcctgccgggctgcgggcgcctgagcggctcttcagcgtttgcgccggcggctgccgcgtctctctcggctcccgcttcctttgaccgcctcccccccccggcccggcggcgcccgcctcctccacggccactccgcctcttccctcccttcgtcccttcttcctctcccttttttccttcttccttcccctcctcgccgccaccgcccaggaccgccggccgggggacgagctcggagcagcagccaggtggagttttgctcttgtcgcccaggctggagtgcagtggcgtgatctcggctcactgcaacctccacctcccaggttcaagcgattttcccacttcagcctcccgataagctgagattacagagtttattaaccacttaacctctcagaactgaacaaagacaacattgttcctggaacgccctctttttaaaaaagaaagcataacccctactgtagaactaaatgcactgtgcatgaaacttggaaaaaaaccaatgtataagcctgttgacccttactctcggatgcagtccacctataactacaacatgagaggaggtgcttatcccccgaggtacttttacccatttccagttccacctttactttatcaagtggaactttctgtgggaggacagcaatttaatggcaaaggaaagacaagacaggctgcgaaacacgatgctgctgccaaagcgttgaggatcctgcagaatgagcccctgccagagaggctggaggtgaatggaagagaatccgaagaagaaaatctcaataaatctgaaataagtcaagtgtttgagattgcacttaaacggaacttgcctgtgaatttcgagtctttccctctgaaacaggtggcccgggagagtggcccaccccacatgaagaactttgtgaccaaggtttcggttggggagtttgtgggggaaggtgaagggaaaagcaagaagatttcaaagaaaaatgccgccatagctgttcttgaggagctgaagaagttaccgcccctgcctgcagttgaacgagtaaagcctagaatcaaaaagaaaacaaaacccatagtcaagccacagacaagcccagaatatggccaggggatcaatccgattagccgactggcccagatccagcaggcaaaaaaggagaaggagccagagtacacgctcctcacagagcgaggcctcccgcgccgcagggagtttgtgatgcaggtgaaggttggaaaccacactgcagaaggaacgggcaccaacaagaaggtggccaagcgcaatgcagccgagaacatgctggagatccttggtttcaaagtcccgcaggcgcagcccaccaaacccgcactcaagtcagaggagaagacacccataaagaaaccaggggatggaagaaaagtaaccttttttgaacctggctctggggatgaaaatgggactagtaataaagaggatgagttcaggatgccttatctaagtcatcagcagctgcctgctggaattcttcccatggtgcccgaggtcgcccaggctgtaggagttagtcaaggacatcacaccaaagattttaccagggcagctccgaatcctgccaaggccacggtaactgccatgatagcccgagagttgttgtatgggggcacctcgcccacagccgagaccattttaaagaataacatctcttcaggccacgtaccccatggacctctcacgagaccctctgagcaactggactatctttccagagtccagggattccaggttgaatacaaagacttccccaaaaacaacaagaacgaatttgtatctcttatcaattgctcctctcagccacctctgatcagccatggtatcggcaaggatgtggagtcctgccatgatatggctgcgctgaacatcttaaagttgctgtctgagttggaccaacaaagtacagagatgccaagaacaggaaacggaccaatgtctgtgtgtgggaggtgctgaaccttttctggccatgaaccattataaaatcccaacatatatactgaaaatactgaaactgctttgaaaatttggaatttctgatacctccagtgggccgagagacacggtgggtaaaggatgtgggcagcagcagggaagacaacagaaacacaaggaggcggctgtggccgggctggactgtgctggggtttgttgtgatggccactcggtgacctggcggtccctacgcaatagcagctgcctgtggggaagaagggctgcccagccagctggttctcccgggacaccagcagatccacaccctgggcacctccgtgtttggtcttttttttcccctgtgtgaaagaagaaacggcacgaccccttctcaagctggctcactcagacacattgggacaaaccctggacagccatgccagagagaggcctttgaccggccccagagctaaaagcaccagagaaaatcaaatgcttcctactcagcgtgacccaacttttctagtgtgccacggccccaccacctcctgcagtacccacaccatcaccactgctttctcttccaacagtgatctgtattcttagtttcattattttcttttgattgatatgacactatataaaattttcatttgagaatttctcaattgtatctagttaaatagcacagtttggaaacttgtctgagactgactttatcaataatctaaccgacaaagatcatatccatgtgtatgtggttagacatttttatttcattgactaacccaggacagtttcagtgatgcaaattgtgtgccctctggttcagctgaaacagtcctggactttcaaaaaccttgaataagtctcccacagttgtataaattggacaatttaggaattttaaactttagatgatcatttggttccatttttatttcatttttatttttgttaatgcaaacaggacttaaatgaactttgatctctgttttaaagattattaaaaaacattgtgtatctatacatatggctcttgaggacttagctttcactacactacaggatatgatctccatgtagtccatataaacctgcagagtgattttccagagtgctcgatactgttaattacatctccattagggctgaaaagaatgacctacgtttctgtatacagctgtgttgcttttgatgttgtgttactgtacacagaagtgtgtgcactgaggctctgcgtgtggtccgtatggaaagcctggtagccctgcgagttaagtactgcttccattcattgtttacgctggaatttttctccccatggaatgtaagtaaaacttaagtgtttgtcatcaataaatggtaatactaaatttttttgttaatttattctcaaatgccactactgctaggttggtcccctcccaacttgcccctatcctttttttatttttaagaaaaaaactttgtaatgcttgtgattccatctgggcaaaagtctgaagatctgaaataactttatatcaaaccattgatcaataaacagctactaatgaaaaaa

SEQ ID NO: 1977 - protein, 502 aa, Homo sapiens
MKLGKKPMYKPVDPYSRMQSTYNYNMRGGAYPPRYFYPFPVPPLLYQVELSVGGQQFNGKGKTRQAAKHDAAAKALRILQNEPLPERLEVNGRESEEENLNKSEISQVFEIALKRNLPVNFESFPLKQVARESGPPHMKNFVTKVSVGEFVGEGEGKSKKISKKNAAIAVLEELKKLPPLPAVERVKPRIKKKTKPIVKPQTSPEYGQGINPISRLAQIQQAKKEKEPEYTLLTERGLPRRREFVMQVKVGNHTAEGTGTNKKVAKRNAAENMLEILGFKVPQAQPTKPALKSEEKTPIKKPGDGRKVTFFEPGSGDENGTSNKEDEFRMPYLSHQQLPAGILPMVPEVAQAVGVSQGHHTKDFTRAAPNPAKATVTAMIARELLYGGTSPTAETILKNNISSGHVPHGPLTRPSEQLDYLSRVQGFQVEYKDFPKNNKNEFVSLINCSSQPPLISHGIGKDVESCHDMAALNILKLLSELDQQSTEMPRTGNGPMSVCGRC

SEQ ID NO: 1978 - DNA, 3522 bp, Homo sapiens
acttcctgccgggctgcgggcgcctgagcggctcttcagcgtttgcgccggcggctgccgcgtctctctcggctcccgcttcctttgaccgcctcccccccccggcccggcggcgcccgcctcctccacggccactccgcctcttccctcccttcgtcccttcttcctctcccttttttccttcttccttcccctcctcgccgccaccgcccaggaccgccggccgggggacgagctcggagcagcagccaggtggagttttgctcttgtcgcccaggctggagtgcagtggcgtgatctcggctcactgcaacctccacctcccaggttcaagcgattttcccacttcagcctcccgataagctgagattacagagtttattaaccacttaacctctcagaactgaacaaagacaacattgttcctggaacgccctctttttaaaaaagaaagcataacccctactgtagaactaaatgcactgtgcatgaaacttggaaaaaaaccaatgtataagcctgttgacccttactctcggatgcagtccacctataactacaacatgagaggaggtgcttatcccccgaggtacttttacccatttccagttccacctttactttatcaagtggaactttctgtgggaggacagcaatttaatggcaaaggaaagacaagacaggctgcgaaacacgatgctgctgccaaagcgttgaggatcctgcagaatgagcccctgccagagaggctggaggtgaatggaagagaatccgaagaagaaaatctcaataaatctgaaataagtcaagtgtttgagattgcacttaaacggaacttgcctgtgaatttcgaggtggcccgggagagtggcccaccccacatgaagaactttgtgaccaaggtttcggttggggagtttgtgggggaaggtgaagggaaaagcaagaagatttcaaagaaaaatgccgccatagctgttcttgaggagctgaagaagttaccgcccctgcctgcagttgaacgagtaaagcctagaatcaaaaagaaaacaaaacccatagtcaagccacagacaagcccagaatatggccaggggatcaatccgattagccgactggcccagatccagcaggcaaaaaaggagaaggagccagagtacacgctcctcacagagcgaggcctcccgcgccgcagggagtttgtgatgcaggtgaaggttggaaaccacactgcagaaggaacgggcaccaacaagaaggtggccaagcgcaatgcagccgagaacatgctggagatccttggtttcaaagtcccgcaggcgcagcccaccaaacccgcactcaagtcagaggagaagacacccataaagaaaccaggggatggaagaaaagtaaccttttttgaacctggctctggggatgaaaatgggactagtaataaagaggatgagttcaggatgccttatctaagtcatcagcagctgcctgctggaattcttcccatggtgcccgaggtcgcccaggctgtaggagttagtcaaggacatcacaccaaagattttaccagggcagctccgaatcctgccaaggccacggtaactgccatgatagcccgagagttgttgtatgggggcacctcgcccacagccgagaccattttaaagaataacatctcttcaggccacgtaccccatggacctctcacgagaccctctgagcaactggactatctttccagagtccagggattccaggttgaatacaaagacttccccaaaaacaacaagaacgaatttgtatctcttatcaattgctcctctcagccacctctgatcagccatggtatcggcaaggatgtggagtcctgccatgatatggctgcgctgaacatcttaaagttgctgtctgagttggaccaacaaagtacagagatgccaagaacaggaaacggaccaatgtctgtgtgtgggaggtgctgaaccttttctggccatgaaccattataaaatcccaacatatatactgaaaatactgaaactgctttgaaaatttggaatttctgatacctccagtgggccgagagacacggtgggtaaaggatgtgggcagcagcagggaagacaacagaaacacaaggaggcggctgtggccgggctggactgtgctggggtttgttgtgatggccactcggtgacctggcggtccctacgcaatagcagctgcctgtggggaagaagggctgcccagccagctggttctcccgggacaccagcagatccacaccctgggcacctccgtgtttggtcttttttttcccctgtgtgaaagaagaaacggcacgaccccttctcaagctggctcactcagacacattgggacaaaccctggacagccatgccagagagaggcctttgaccggccccagagctaaaagcaccagagaaaatcaaatgcttcctactcagcgtgacccaacttttctagtgtgccacggccccaccacctcctgcagtacccacaccatcaccactgctttctcttccaacagtgatctgtattcttagtttcattattttcttttgattgatatgacactatataaaattttcatttgagaatttctcaattgtatctagttaaatagcacagtttggaaacttgtctgagactgactttatcaataatctaaccgacaaagatcatatccatgtgtatgtggttagacatttttatttcattgactaacccaggacagtttcagtgatgcaaattgtgtgccctctggttcagctgaaacagtcctggactttcaaaaaccttgaataagtctcccacagttgtataaattggacaatttaggaattttaaactttagatgatcatttggttccatttttatttcatttttatttttgttaatgcaaacaggacttaaatgaactttgatctctgttttaaagattattaaaaaacattgtgtatctatacatatggctcttgaggacttagctttcactacactacaggatatgatctccatgtagtccatataaacctgcagagtgattttccagagtgctcgatactgttaattacatctccattagggctgaaaagaatgacctacgtttctgtatacagctgtgttgcttttgatgttgtgttactgtacacagaagtgtgtgcactgaggctctgcgtgtggtccgtatggaaagcctggtagccctgcgagttaagtactgcttccattcattgtttacgctggaatttttctccccatggaatgtaagtaaaacttaagtgtttgtcatcaataaatggtaatactaaatttttttgttaatttattctcaaatgccactactgctaggttggtcccctcccaacttgcccctatcctttttttatttttaagaaaaaaactttgtaatgcttgtgattccatctgggcaaaagtctgaagatctgaaataactttatatcaaaccattgatcaataaacagctactaatgaaaaaa

SEQ ID NO: 1979 - protein, 496 aa, Homo sapiens
MKLGKKPMYKPVDPYSRMQSTYNYNMRGGAYPPRYFYPFPVPPLLYQVELSVGGQQFNGKGKTRQAAKHDAAAKALRILQNEPLPERLEVNGRESEEENLNKSEISQVFEIALKRNLPVNFEVARESGPPHMKNFVTKVSVGEFVGEGEGKSKKISKKNAAIAVLEELKKLPPLPAVERVKPRIKKKTKPIVKPQTSPEYGQGINPISRLAQIQQAKKEKEPEYTLLTERGLPRRREFVMQVKVGNHTAEGTGTNKKVAKRNAAENMLEILGFKVPQAQPTKPALKSEEKTPIKKPGDGRKVTFFEPGSGDENGTSNKEDEFRMPYLSHQQLPAGILPMVPEVAQAVGVSQGHHTKDFTRAAPNPAKATVTAMIARELLYGGTSPTAETILKNNISSGHVPHGPLTRPSEQLDYLSRVQGFQVEYKDFPKNNKNEFVSLINCSSQPPLISHGIGKDVESCHDMAALNILKLLSELDQQSTEMPRTGNGPMSVCGRC

SEQ ID NO: 1980 - DNA, 3399 bp, Homo sapiens
acttcctgccgggctgcgggcgcctgagcggctcttcagcgtttgcgccggcggctgccgcgtctctctcggctcccgcttcctttgaccgcctcccccccccggcccggcggcgcccgcctcctccacggccactccgcctcttccctcccttcgtcccttcttcctctcccttttttccttcttccttcccctcctcgccgccaccgcccaggaccgccggccgggggacgagctcggagcagcagccagagtttattaaccacttaacctctcagaactgaacaaagacaacattgttcctggaacgccctctttttaaaaaagaaagcataacccctactgtagaactaaatgcactgtgcatgaaacttggaaaaaaaccaatgtataagcctgttgacccttactctcggatgcagtccacctataactacaacatgagaggaggtgcttatcccccgaggtacttttacccatttccagttccacctttactttatcaagtggaactttctgtgggaggacagcaatttaatggcaaaggaaagacaagacaggctgcgaaacacgatgctgctgccaaagcgttgaggatcctgcagaatgagcccctgccagagaggctggaggtgaatggaagagaatccgaagaagaaaatctcaataaatctgaaataagtcaagtgtttgagattgcacttaaacggaacttgcctgtgaatttcgaggtggcccgggagagtggcccaccccacatgaagaactttgtgaccaaggtttcggttggggagtttgtgggggaaggtgaagggaaaagcaagaagatttcaaagaaaaatgccgccatagctgttcttgaggagctgaagaagttaccgcccctgcctgcagttgaacgagtaaagcctagaatcaaaaagaaaacaaaacccatagtcaagccacagacaagcccagaatatggccaggggatcaatccgattagccgactggcccagatccagcaggcaaaaaaggagaaggagccagagtacacgctcctcacagagcgaggcctcccgcgccgcagggagtttgtgatgcaggtgaaggttggaaaccacactgcagaaggaacgggcaccaacaagaaggtggccaagcgcaatgcagccgagaacatgctggagatccttggtttcaaagtcccgcaggcgcagcccaccaaacccgcactcaagtcagaggagaagacacccataaagaaaccaggggatggaagaaaagtaaccttttttgaacctggctctggggatgaaaatgggactagtaataaagaggatgagttcaggatgccttatctaagtcatcagcagctgcctgctggaattcttcccatggtgcccgaggtcgcccaggctgtaggagttagtcaaggacatcacaccaaagattttaccagggcagctccgaatcctgccaaggccacggtaactgccatgatagcccgagagttgttgtatgggggcacctcgcccacagccgagaccattttaaagaataacatctcttcaggccacgtaccccatggacctctcacgagaccctctgagcaactggactatctttccagagtccagggattccaggttgaatacaaagacttccccaaaaacaacaagaacgaatttgtatctcttatcaattgctcctctcagccacctctgatcagccatggtatcggcaaggatgtggagtcctgccatgatatggctgcgctgaacatcttaaagttgctgtctgagttggaccaacaaagtacagagatgccaagaacaggaaacggaccaatgtctgtgtgtgggaggtgctgaaccttttctggccatgaaccattataaaatcccaacatatatactgaaaatactgaaactgctttgaaaatttggaatttctgatacctccagtgggccgagagacacggtgggtaaaggatgtgggcagcagcagggaagacaacagaaacacaaggaggcggctgtggccgggctggactgtgctggggtttgttgtgatggccactcggtgacctggcggtccctacgcaatagcagctgcctgtggggaagaagggctgcccagccagctggttctcccgggacaccagcagatccacaccctgggcacctccgtgtttggtcttttttttcccctgtgtgaaagaagaaacggcacgaccccttctcaagctggctcactcagacacattgggacaaaccctggacagccatgccagagagaggcctttgaccggccccagagctaaaagcaccagagaaaatcaaatgcttcctactcagcgtgacccaacttttctagtgtgccacggccccaccacctcctgcagtacccacaccatcaccactgctttctcttccaacagtgatctgtattcttagtttcattattttcttttgattgatatgacactatataaaattttcatttgagaatttctcaattgtatctagttaaatagcacagtttggaaacttgtctgagactgactttatcaataatctaaccgacaaagatcatatccatgtgtatgtggttagacatttttatttcattgactaacccaggacagtttcagtgatgcaaattgtgtgccctctggttcagctgaaacagtcctggactttcaaaaaccttgaataagtctcccacagttgtataaattggacaatttaggaattttaaactttagatgatcatttggttccatttttatttcatttttatttttgttaatgcaaacaggacttaaatgaactttgatctctgttttaaagattattaaaaaacattgtgtatctatacatatggctcttgaggacttagctttcactacactacaggatatgatctccatgtagtccatataaacctgcagagtgattttccagagtgctcgatactgttaattacatctccattagggctgaaaagaatgacctacgtttctgtatacagctgtgttgcttttgatgttgtgttactgtacacagaagtgtgtgcactgaggctctgcgtgtggtccgtatggaaagcctggtagccctgcgagttaagtactgcttccattcattgtttacgctggaatttttctccccatggaatgtaagtaaaacttaagtgtttgtcatcaataaatggtaatactaaatttttttgttaatttattctcaaatgccactactgctaggttggtcccctcccaacttgcccctatcctttttttatttttaagaaaaaaactttgtaatgcttgtgattccatctgggcaaaagtctgaagatctgaaataactttatatcaaaccattgatcaataaacagctactaatgaaaaaa

SEQ ID NO: 1981 - protein, 496 aa, Homo sapiens; identical to SEQ ID NO: 1979

SEQ ID NO: 1982 - DNA, 3688 bp, Homo sapiens
acttcctgccgggctgcgggcgcctgagcggctcttcagcgtttgcgccggcggctgccgcgtctctctcggctcccgcttcctttgaccgcctcccccccccggcccggcggcgcccgcctcctccacggccactccgcctcttccctcccttcgtcccttcttcctctcccttttttccttcttccttcccctcctcgccgccaccgcccaggaccgccggccgggggacgagctcggagcagcagccagagtttattaaccacttaacctctcagaactgaacaaagacaacattgttcctggaacgccctctttttaaaaaaggtagaactttagacttcatagcactgaattaacctgcactgaaagctgtttacctgcatttgttcacttttgttgaaagtgaccatgtctcaagttcaagtgcaagttcagaacccatctgctgctctctcagggagccaaatactgaacaagaaccagtctcttctctcacagcctttgatgagtattccttctactactagctctctgccctctgaaaatgcaggtagacccattcaaaactctgctttaccctctgcatctattacatccaccagtgcagctgcagaaagcataacccctactgtagaactaaatgcactgtgcatgaaacttggaaaaaaaccaatgtataagcctgttgacccttactctcggatgcagtccacctataactacaacatgagaggaggtgcttatcccccgaggtacttttacccatttccagttccacctttactttatcaagtggaactttctgtgggaggacagcaatttaatggcaaaggaaagacaagacaggctgcgaaacacgatgctgctgccaaagcgttgaggatcctgcagaatgagcccctgccagagaggctggaggtgaatggaagagaatccgaagaagaaaatctcaataaatctgaaataagtcaagtgtttgagattgcacttaaacggaacttgcctgtgaatttcgaggtggcccgggagagtggcccaccccacatgaagaactttgtgaccaaggtttcggttggggagtttgtgggggaaggtgaagggaaaagcaagaagatttcaaagaaaaatgccgccatagctgttcttgaggagctgaagaagttaccgcccctgcctgcagttgaacgagtaaagcctagaatcaaaaagaaaacaaaacccatagtcaagccacagacaagcccagaatatggccaggggatcaatccgattagccgactggcccagatccagcaggcaaaaaaggagaaggagccagagtacacgctcctcacagagcgaggcctcccgcgccgcagggagtttgtgatgcaggtgaaggttggaaaccacactgcagaaggaacgggcaccaacaagaaggtggccaagcgcaatgcagccgagaacatgctggagatccttggtttcaaagtcccgcaggcgcagcccaccaaacccgcactcaagtcagaggagaagacacccataaagaaaccaggggatggaagaaaagtaaccttttttgaacctggctctggggatgaaaatgggactagtaataaagaggatgagttcaggatgccttatctaagtcatcagcagctgcctgctggaattcttcccatggtgcccgaggtcgcccaggctgtaggagttagtcaaggacatcacaccaaagattttaccagggcagctccgaatcctgccaaggccacggtaactgccatgatagcccgagagttgttgtatgggggcacctcgcccacagccgagaccattttaaagaataacatctcttcaggccacgtaccccatggacctctcacgagaccctctgagcaactggactatctttccagagtccagggattccaggttgaatacaaagacttccccaaaaacaacaagaacgaatttgtatctcttatcaattgctcctctcagccacctctgatcagccatggtatcggcaaggatgtggagtcctgccatgatatggctgcgctgaacatcttaaagttgctgtctgagttggaccaacaaagtacagagatgccaagaacaggaaacggaccaatgtctgtgtgtgggaggtgctgaaccttttctggccatgaaccattataaaatcccaacatatatactgaaaatactgaaactgctttgaaaatttggaatttctgatacctccagtgggccgagagacacggtgggtaaaggatgtgggcagcagcagggaagacaacagaaacacaaggaggcggctgtggccgggctggactgtgctggggtttgttgtgatggccactcggtgacctggcggtccctacgcaatagcagctgcctgtggggaagaagggctgcccagccagctggttctcccgggacaccagcagatccacaccctgggcacctccgtgtttggtcttttttttcccctgtgtgaaagaagaaacggcacgaccccttctcaagctggctcactcagacacattgggacaaaccctggacagccatgccagagagaggcctttgaccggccccagagctaaaagcaccagagaaaatcaaatgcttcctactcagcgtgacccaacttttctagtgtgccacggccccaccacctcctgcagtacccacaccatcaccactgctttctcttccaacagtgatctgtattcttagtttcattattttcttttgattgatatgacactatataaaattttcatttgagaatttctcaattgtatctagttaaatagcacagtttggaaacttgtctgagactgactttatcaataatctaaccgacaaagatcatatccatgtgtatgtggttagacatttttatttcattgactaacccaggacagtttcagtgatgcaaattgtgtgccctctggttcagctgaaacagtcctggactttcaaaaaccttgaataagtctcccacagttgtataaattggacaatttaggaattttaaactttagatgatcatttggttccatttttatttcatttttatttttgttaatgcaaacaggacttaaatgaactttgatctctgttttaaagattattaaaaaacattgtgtatctatacatatggctcttgaggacttagctttcactacactacaggatatgatctccatgtagtccatataaacctgcagagtgattttccagagtgctcgatactgttaattacatctccattagggctgaaaagaatgacctacgtttctgtatacagctgtgttgcttttgatgttgtgttactgtacacagaagtgtgtgcactgaggctctgcgtgtggtccgtatggaaagcctggtagccctgcgagttaagtactgcttccattcattgtttacgctggaatttttctccccatggaatgtaagtaaaacttaagtgtttgtcatcaataaatggtaatactaaatttttttgttaatttattctcaaatgccactactgctaggttggtcccctcccaacttgcccctatcctttttttatttttaagaaaaaaactttgtaatgcttgtgattccatctgggcaaaagtctgaagatctgaaataactttatatcaaaccattgatcaataaacagctactaatgaaaaaa

SEQ ID NO: 1983 - protein, 577 aa, Homo sapiens
MSQVQVQVQNPSAALSGSQILNKNQSLLSQPLMSIPSTTSSLPSENAGRPIQNSALPSASITSTSAAAESITPTVELNALCMKLGKKPMYKPVDPYSRMQSTYNYNMRGGAYPPRYFYPFPVPPLLYQVELSVGGQQFNGKGKTRQAAKHDAAAKALRILQNEPLPERLEVNGRESEEENLNKSEISQVFEIALKRNLPVNFEVARESGPPHMKNFVTKVSVGEFVGEGEGKSKKISKKNAAIAVLEELKKLPPLPAVERVKPRIKKKTKPIVKPQTSPEYGQGINPISRLAQIQQAKKEKEPEYTLLTERGLPRRREFVMQVKVGNHTAEGTGTNKKVAKRNAAENMLEILGFKVPQAQPTKPALKSEEKTPIKKPGDGRKVTFFEPGSGDENGTSNKEDEFRMPYLSHQQLPAGILPMVPEVAQAVGVSQGHHTKDFTRAAPNPAKATVTAMIARELLYGGTSPTAETILKNNISSGHVPHGPLTRPSEQLDYLSRVQGFQVEYKDFPKNNKNEFVSLINCSSQPPLISHGIGKDVESCHDMAALNILKLLSELDQQSTEMPRTGNGPMSVCGRC

SEQ ID NO: 1984 - DNA, 3324 bp, Homo sapiens
acttcctgccgggctgcgggcgcctgagcggctcttcagcgtttgcgccggcggctgccgcgtctctctcggctcccgcttcctttgaccgcctcccccccccggcccggcggcgcccgcctcctccacggccactccgcctcttccctcccttcgtcccttcttcctctcccttttttccttcttccttcccctcctcgccgccaccgcccaggaccgccggccgggggacgagctcggagcagcagccagaaagcataacccctactgtagaactaaatgcactgtgcatgaaacttggaaaaaaaccaatgtataagcctgttgacccttactctcggatgcagtccacctataactacaacatgagaggaggtgcttatcccccgaggtacttttacccatttccagttccacctttactttatcaagtggaactttctgtgggaggacagcaatttaatggcaaaggaaagacaagacaggctgcgaaacacgatgctgctgccaaagcgttgaggatcctgcagaatgagcccctgccagagaggctggaggtgaatggaagagaatccgaagaagaaaatctcaataaatctgaaataagtcaagtgtttgagattgcacttaaacggaacttgcctgtgaatttcgaggtggcccgggagagtggcccaccccacatgaagaactttgtgaccaaggtttcggttggggagtttgtgggggaaggtgaagggaaaagcaagaagatttcaaagaaaaatgccgccatagctgttcttgaggagctgaagaagttaccgcccctgcctgcagttgaacgagtaaagcctagaatcaaaaagaaaacaaaacccatagtcaagccacagacaagcccagaatatggccaggggatcaatccgattagccgactggcccagatccagcaggcaaaaaaggagaaggagccagagtacacgctcctcacagagcgaggcctcccgcgccgcagggagtttgtgatgcaggtgaaggttggaaaccacactgcagaaggaacgggcaccaacaagaaggtggccaagcgcaatgcagccgagaacatgctggagatccttggtttcaaagtcccgcaggcgcagcccaccaaacccgcactcaagtcagaggagaagacacccataaagaaaccaggggatggaagaaaagtaaccttttttgaacctggctctggggatgaaaatgggactagtaataaagaggatgagttcaggatgccttatctaagtcatcagcagctgcctgctggaattcttcccatggtgcccgaggtcgcccaggctgtaggagttagtcaaggacatcacaccaaagattttaccagggcagctccgaatcctgccaaggccacggtaactgccatgatagcccgagagttgttgtatgggggcacctcgcccacagccgagaccattttaaagaataacatctcttcaggccacgtaccccatggacctctcacgagaccctctgagcaactggactatctttccagagtccagggattccaggttgaatacaaagacttccccaaaaacaacaagaacgaatttgtatctcttatcaattgctcctctcagccacctctgatcagccatggtatcggcaaggatgtggagtcctgccatgatatggctgcgctgaacatcttaaagttgctgtctgagttggaccaacaaagtacagagatgccaagaacaggaaacggaccaatgtctgtgtgtgggaggtgctgaaccttttctggccatgaaccattataaaatcccaacatatatactgaaaatactgaaactgctttgaaaatttggaatttctgatacctccagtgggccgagagacacggtgggtaaaggatgtgggcagcagcagggaagacaacagaaacacaaggaggcggctgtggccgggctggactgtgctggggtttgttgtgatggccactcggtgacctggcggtccctacgcaatagcagctgcctgtggggaagaagggctgcccagccagctggttctcccgggacaccagcagatccacaccctgggcacctccgtgtttggtcttttttttcccctgtgtgaaagaagaaacggcacgaccccttctcaagctggctcactcagacacattgggacaaaccctggacagccatgccagagagaggcctttgaccggccccagagctaaaagcaccagagaaaatcaaatgcttcctactcagcgtgacccaacttttctagtgtgccacggccccaccacctcctgcagtacccacaccatcaccactgctttctcttccaacagtgatctgtattcttagtttcattattttcttttgattgatatgacactatataaaattttcatttgagaatttctcaattgtatctagttaaatagcacagtttggaaacttgtctgagactgactttatcaataatctaaccgacaaagatcatatccatgtgtatgtggttagacatttttatttcattgactaacccaggacagtttcagtgatgcaaattgtgtgccctctggttcagctgaaacagtcctggactttcaaaaaccttgaataagtctcccacagttgtataaattggacaatttaggaattttaaactttagatgatcatttggttccatttttatttcatttttatttttgttaatgcaaacaggacttaaatgaactttgatctctgttttaaagattattaaaaaacattgtgtatctatacatatggctcttgaggacttagctttcactacactacaggatatgatctccatgtagtccatataaacctgcagagtgattttccagagtgctcgatactgttaattacatctccattagggctgaaaagaatgacctacgtttctgtatacagctgtgttgcttttgatgttgtgttactgtacacagaagtgtgtgcactgaggctctgcgtgtggtccgtatggaaagcctggtagccctgcgagttaagtactgcttccattcattgtttacgctggaatttttctccccatggaatgtaagtaaaacttaagtgtttgtcatcaataaatggtaatactaaatttttttgttaatttattctcaaatgccactactgctaggttggtcccctcccaacttgcccctatcctttttttatttttaagaaaaaaactttgtaatgcttgtgattccatctgggcaaaagtctgaagatctgaaataactttatatcaaaccattgatcaataaacagctactaatgaaaaaa

SEQ ID NO: 1985 - protein, 496 aa, Homo sapiens; identical to SEQ ID NO: 1979

SEQ ID NO: 1986 - DNA, 3281 bp, Homo sapiens
ggcaggggcgcatccctcgccacccgcggtcgcccagcacgccgggacgcgcgtggccatccagctccccgggggcgttggggggctccgcgggcctgggcctcgggattcgcccgccgcttccccggggagccgctgctgcaaagccaggttggggcgccgggcccggccagcgccctctaggcagcggaagtgcagcttgctttacatccgtcctccccgcctcgcagagttgggagaaggcagggtggggggtgtggaaaaataaaaggaaaagtccttgcaccatgtagatcagcgtcccccactttggcatcccggccggccggggacctcccagtctgcggccatgaacgcgagcagcgagggcgagagcttcgcgggctcggtgcaaattccaggtggcacaacggtgctggtggagctgactcccgacatccatatctgcggcatctgcaagcagcagtttaacaacctggatgcctttgtagctcacaagcaaagtggctgccagctgacaggcacatccgcagcagcccccagcacggtccagtttgtatcggaggaaacagtgcctgccacccagactcagaccaccaccagaaccatcacctcggagacccagacaatcacagtttcagctccagaatttgtttttgaacatggctatcaaacttacctgcccacggaaagtaatgaaaaccagacagccactgtcatctctctccctgccaagtcacgcaccaaaaagcccacaacaccacctgctcagaaaaggcttaactgttgctatccaggttgccaattcaagactgcttatggcatgaaggacatggagcggcatttaaaaattcacacgggagacaaaccccataagtgtgaagtctgtggcaagtgctttagccggaaagacaagctgaaaactcacatgcggtgccacacgggcgtgaagccctacaagtgtaagacgtgtgactacgccgctgccgacagcagcagcctcaacaagcacctgaggatccactcggacgagcggcccttcaaatgccagatctgcccctacgccagccgcaactccagccagctcactgtccacctgcgatcccacacgggggacgcccccttccagtgctggctctgtagcgccaagttcaaaatcagctcggacttgaaaaggcacatgcgggtgcactcgggggagaagcctttcaagtgcgagttctgcaatgtccgctgcaccatgaaggggaacctcaagtcgcacatccgtatcaagcacagcgggaataacttcaagtgtcctcattgcgacttcctgggtgacagcaaagccaccctccggaagcacagccgcgtgcaccagtcggagcatcctgagaagtgctcggaatgcagctactcctgctccagcaaggccgccctgcgcatccacgagcgtatccactgcaccgaccgccctttcaagtgcaactactgcagcttcgacaccaaacagcccagcaacctgagcaagcacatgaagaagttccatggggacatggttaagactgaggctctagagaggaaggacaccggcaggcagagcagccggcaggtggccaagctggatgccaagaagagtttccactgcgatatatgcgatgcctccttcatgcgggaggactcgctccgcagccacaagagacagcacagtgagtacagtgagagtaagaactcggacgtgaccgttctccagtttcagatcgaccccagcaagcagcccgccacgcccctcactgtgggacacctccaggtgcccctccagcccagccaagtgccccagttcagcgagggaagagtcaaaatcatcgttgggcatcaggtgccccaggcgaacaccatcgtccaggctgccgccgctgcagtgaacatcgtcccgcctgccttggtggcccagaacccagaggaactcccagggaacagccggctgcagatcctgcgccaggtcagtctgatcgccccccctcagtcctcgcggtgtccgagcgaggcgggcgcaatgacccagccggctgtcctgctgaccacccacgagcagacggacggagccactctgcaccagactctcatccccacggcctcaggtggcccccaggaaggctctggcaatcaaactttcattaccagttcgggtattacttgcactgactttgaaggcctaaacgccttgattcaggaggggacagcagaagtgacagtggtgagcgatggaggccagaacatcgcagtggccaccacagcgccaccggtcttctcctcctcttcccagcaagaactacccaagcagacctactccatcattcaaggggcagcccatccagctttgctctgtcccgccgactccattccagattagtgcttaaaaaaacaaaaggagtgggggaaaggaattgagaaaaagaaatcttaagtagaattctctaaaaggtttgctcttaatgttttctttgttttgttttgtttttgagacggagtctcgctctgtttcccaggctggagtgcagtggcgctatcttggctcactgcaacgtccgcctcccaggttcaagcgattctcatgcctcagccctccgagtagctgggaccacaggtgtacgacatcatgactggctaatttttgtatatttagtagagacggggtttcatcatgttgaactcctgacctcaagtgatctgcccacctcagcctcccaaagtgctgggattacaggtgtgagccaccatgcctggccgtggtttgctcttaatgtttttaaggatggttgtgaatccccctggccccataataaattgtaattttatactgcttactataatttttttaacactgtaacaactttgagaccacctctgaatcgtcgcattataactgttgtagaatcttaaatgttaccaagatgattccaatgaggggttggaattaaatgcattaagtagtgaattcatgtgtttgtttccaacttgattttccaactctaataaaggtttctgtccatcttattacatttgtgtagtaaatggtacttcccagcctctcttttgccccattctggaatactccccagagtttgggggtgttcatgttttatacatgtaagtctgttggcatgaaggaccattttctacataatatgacatggatacttgacccaaaaaaaaatgtttagtgctaatgagcagaaaatgaatggttccataataaattgatatctgattaaaatataaaaaaaaaaaaaaaaaaa

SEQ ID NO: 1987 - protein, 681 aa, Homo sapiens
MNASSEGESFAGSVQIPGGTTVLVELTPDIHICGICKQQFNNLDAFVAHKQSGCQLTGTSAAAPSTVQFVSEETVPATQTQTTTRTITSETQTITVSAPEFVFEHGYQTYLPTESNENQTATVISLPAKSRTKKPTTPPAQKRLNCCYPGCQFKTAYGMKDMERHLKIHTGDKPHKCEVCGKCFSRKDKLKTHMRCHTGVKPYKCKTCDYAAADSSSLNKHLRIHSDERPFKCQICPYASRNSSQLTVHLRSHTGDAPFQCWLCSAKFKISSDLKRHMRVHSGEKPFKCEFCNVRCTMKGNLKSHIRIKHSGNNFKCPHCDFLGDSKATLRKHSRVHQSEHPEKCSECSYSCSSKAALRIHERIHCTDRPFKCNYCSFDTKQPSNLSKHMKKFHGDMVKTEALERKDTGRQSSRQVAKLDAKKSFHCDICDASFMREDSLRSHKRQHSEYSESKNSDVTVLQFQIDPSKQPATPLTVGHLQVPLQPSQVPQFSEGRVKIIVGHQVPQANTIVQAAAAAVNIVPPALVAQNPEELPGNSRLQILRQVSLIAPPQSSRCPSEAGAMTQPAVLLTTHEQTDGATLHQTLIPTASGGPQEGSGNQTFITSSGITCTDFEGLNALIQEGTAEVTVVSDGGQNIAVATTAPPVFSSSSQQELPKQTYSIIQGAAHPALLCPADSIPD

SEQ ID NO: 1988 - DNA, 3119 bp, Homo sapiens
ggcaggggcgcatccctcgccacccgcggtcgcccagcacgccgggacgcgcgtggccatccagctccccgggggcgttggggggctccgcgggcctgggcctcgggattcgcccgccgcttccccggggagccgctgctgcaaagccaggttggggcgccgggcccggccagcgccctctaggcagcggaagtgcagcttgctttacatccgtcctccccgcctcgcagagttgggagaaggcagggtggggggtgtggaaaaataaaaggaaaagtccttgcaccatgtagatcagcgtcccccactttggcatcccggccggccggggacctcccagtctgcggccatgaacgcgagcagcgagggcgagagcttcgcgggctcggtgcaaattccaggtggcacaacggtgctggtggagctgactcccgacatccatatctgcggcatctgcaagcagcagtttaacaacctggatgcctttgtagctcacaagcaaagtggctgccagctgacaggcacatccgcagcagcccccagcacggtccagtttgtatcggaggaaacagtgcctgccacccagactcagaccaccaccagaaccatcacctcggagacccagacaatcacaggttgccaattcaagactgcttatggcatgaaggacatggagcggcatttaaaaattcacacgggagacaaaccccataagtgtgaagtctgtggcaagtgctttagccggaaagacaagctgaaaactcacatgcggtgccacacgggcgtgaagccctacaagtgtaagacgtgtgactacgccgctgccgacagcagcagcctcaacaagcacctgaggatccactcggacgagcggcccttcaaatgccagatctgcccctacgccagccgcaactccagccagctcactgtccacctgcgatcccacacgggggacgcccccttccagtgctggctctgtagcgccaagttcaaaatcagctcggacttgaaaaggcacatgcgggtgcactcgggggagaagcctttcaagtgcgagttctgcaatgtccgctgcaccatgaaggggaacctcaagtcgcacatccgtatcaagcacagcgggaataacttcaagtgtcctcattgcgacttcctgggtgacagcaaagccaccctccggaagcacagccgcgtgcaccagtcggagcatcctgagaagtgctcggaatgcagctactcctgctccagcaaggccgccctgcgcatccacgagcgtatccactgcaccgaccgccctttcaagtgcaactactgcagcttcgacaccaaacagcccagcaacctgagcaagcacatgaagaagttccatggggacatggttaagactgaggctctagagaggaaggacaccggcaggcagagcagccggcaggtggccaagctggatgccaagaagagtttccactgcgatatatgcgatgcctccttcatgcgggaggactcgctccgcagccacaagagacagcacagtgagtacagtgagagtaagaactcggacgtgaccgttctccagtttcagatcgaccccagcaagcagcccgccacgcccctcactgtgggacacctccaggtgcccctccagcccagccaagtgccccagttcagcgagggaagagtcaaaatcatcgttgggcatcaggtgccccaggcgaacaccatcgtccaggctgccgccgctgcagtgaacatcgtcccgcctgccttggtggcccagaacccagaggaactcccagggaacagccggctgcagatcctgcgccaggtcagtctgatcgccccccctcagtcctcgcggtgtccgagcgaggcgggcgcaatgacccagccggctgtcctgctgaccacccacgagcagacggacggagccactctgcaccagactctcatccccacggcctcaggtggcccccaggaaggctctggcaatcaaactttcattaccagttcgggtattacttgcactgactttgaaggcctaaacgccttgattcaggaggggacagcagaagtgacagtggtgagcgatggaggccagaacatcgcagtggccaccacagcgccaccggtcttctcctcctcttcccagcaagaactacccaagcagacctactccatcattcaaggggcagcccatccagctttgctctgtcccgccgactccattccagattagtgcttaaaaaaacaaaaggagtgggggaaaggaattgagaaaaagaaatcttaagtagaattctctaaaaggtttgctcttaatgttttctttgttttgttttgtttttgagacggagtctcgctctgtttcccaggctggagtgcagtggcgctatcttggctcactgcaacgtccgcctcccaggttcaagcgattctcatgcctcagccctccgagtagctgggaccacaggtgtacgacatcatgactggctaatttttgtatatttagtagagacggggtttcatcatgttgaactcctgacctcaagtgatctgcccacctcagcctcccaaagtgctgggattacaggtgtgagccaccatgcctggccgtggtttgctcttaatgtttttaaggatggttgtgaatccccctggccccataataaattgtaattttatactgcttactataatttttttaacactgtaacaactttgagaccacctctgaatcgtcgcattataactgttgtagaatcttaaatgttaccaagatgattccaatgaggggttggaattaaatgcattaagtagtgaattcatgtgtttgtttccaacttgattttccaactctaataaaggtttctgtccatcttattacatttgtgtagtaaatggtacttcccagcctctcttttgccccattctggaatactccccagagtttgggggtgttcatgttttatacatgtaagtctgttggcatgaaggaccattttctacataatatgacatggatacttgacccaaaaaaaaatgtttagtgctaatgagcagaaaatgaatggttccataataaattgatatctgattaaaatataaaaaaaaaaaaaaaaaaa

SEQ ID NO: 1989 - protein, 627 aa, Homo sapiens
MNASSEGESFAGSVQIPGGTTVLVELTPDIHICGICKQQFNNLDAFVAHKQSGCQLTGTSAAAPSTVQFVSEETVPATQTQTTTRTITSETQTITGCQFKTAYGMKDMERHLKIHTGDKPHKCEVCGKCFSRKDKLKTHMRCHTGVKPYKCKTCDYAAADSSSLNKHLRIHSDERPFKCQICPYASRNSSQLTVHLRSHTGDAPFQCWLCSAKFKISSDLKRHMRVHSGEKPFKCEFCNVRCTMKGNLKSHIRIKHSGNNFKCPHCDFLGDSKATLRKHSRVHQSEHPEKCSECSYSCSSKAALRIHERIHCTDRPFKCNYCSFDTKQPSNLSKHMKKFHGDMVKTEALERKDTGRQSSRQVAKLDAKKSFHCDICDASFMREDSLRSHKRQHSEYSESKNSDVTVLQFQIDPSKQPATPLTVGHLQVPLQPSQVPQFSEGRVKIIVGHQVPQANTIVQAAAAAVNIVPPALVAQNPEELPGNSRLQILRQVSLIAPPQSSRCPSEAGAMTQPAVLLTTHEQTDGATLHQTLIPTASGGPQEGSGNQTFITSSGITCTDFEGLNALIQEGTAEVTVVSDGGQNIAVATTAPPVFSSSSQQELPKQTYSIIQGAAHPALLCPADSIPD

SEQ ID NO: 1990 - DNA, 3275 bp, Homo sapiens
ggcaggggcgcatccctcgccacccgcggtcgcccagcacgccgggacgcgcgtggccatccagctccccgggggcgttggggggctccgcgggcctgggcctcgggattcgcccgccgcttccccggggagccgctgctgcaaagccaggttggggcgccgggcccggccagcgccctctaggcagcggaagtgcagcttgctttacatccgtcctccccgcctcgcagagttgggagaaggcagggtggggggtgtggaaaaataaaaggaaaagtccttgcaccatgtagatcagcgtcccccactttggcatcccggccggccggggacctcccagtctgcggccatgaacgcgagcagcgagggcgagagcttcgcgggctcggtgcaaagtggcacaacggtgctggtggagctgactcccgacatccatatctgcggcatctgcaagcagcagtttaacaacctggatgcctttgtagctcacaagcaaagtggctgccagctgacaggcacatccgcagcagcccccagcacggtccagtttgtatcggaggaaacagtgcctgccacccagactcagaccaccaccagaaccatcacctcggagacccagacaatcacagtttcagctccagaatttgtttttgaacatggctatcaaacttacctgcccacggaaagtaatgaaaaccagacagccactgtcatctctctccctgccaagtcacgcaccaaaaagcccacaacaccacctgctcagaaaaggcttaactgttgctatccaggttgccaattcaagactgcttatggcatgaaggacatggagcggcatttaaaaattcacacgggagacaaaccccataagtgtgaagtctgtggcaagtgctttagccggaaagacaagctgaaaactcacatgcggtgccacacgggcgtgaagccctacaagtgtaagacgtgtgactacgccgctgccgacagcagcagcctcaacaagcacctgaggatccactcggacgagcggcccttcaaatgccagatctgcccctacgccagccgcaactccagccagctcactgtccacctgcgatcccacacgggggacgcccccttccagtgctggctctgtagcgccaagttcaaaatcagctcggacttgaaaaggcacatgcgggtgcactcgggggagaagcctttcaagtgcgagttctgcaatgtccgctgcaccatgaaggggaacctcaagtcgcacatccgtatcaagcacagcgggaataacttcaagtgtcctcattgcgacttcctgggtgacagcaaagccaccctccggaagcacagccgcgtgcaccagtcggagcatcctgagaagtgctcggaatgcagctactcctgctccagcaaggccgccctgcgcatccacgagcgtatccactgcaccgaccgccctttcaagtgcaactactgcagcttcgacaccaaacagcccagcaacctgagcaagcacatgaagaagttccatggggacatggttaagactgaggctctagagaggaaggacaccggcaggcagagcagccggcaggtggccaagctggatgccaagaagagtttccactgcgatatatgcgatgcctccttcatgcgggaggactcgctccgcagccacaagagacagcacagtgagtacagtgagagtaagaactcggacgtgaccgttctccagtttcagatcgaccccagcaagcagcccgccacgcccctcactgtgggacacctccaggtgcccctccagcccagccaagtgccccagttcagcgagggaagagtcaaaatcatcgttgggcatcaggtgccccaggcgaacaccatcgtccaggctgccgccgctgcagtgaacatcgtcccgcctgccttggtggcccagaacccagaggaactcccagggaacagccggctgcagatcctgcgccaggtcagtctgatcgccccccctcagtcctcgcggtgtccgagcgaggcgggcgcaatgacccagccggctgtcctgctgaccacccacgagcagacggacggagccactctgcaccagactctcatccccacggcctcaggtggcccccaggaaggctctggcaatcaaactttcattaccagttcgggtattacttgcactgactttgaaggcctaaacgccttgattcaggaggggacagcagaagtgacagtggtgagcgatggaggccagaacatcgcagtggccaccacagcgccaccggtcttctcctcctcttcccagcaagaactacccaagcagacctactccatcattcaaggggcagcccatccagctttgctctgtcccgccgactccattccagattagtgcttaaaaaaacaaaaggagtgggggaaaggaattgagaaaaagaaatcttaagtagaattctctaaaaggtttgctcttaatgttttctttgttttgttttgtttttgagacggagtctcgctctgtttcccaggctggagtgcagtggcgctatcttggctcactgcaacgtccgcctcccaggttcaagcgattctcatgcctcagccctccgagtagctgggaccacaggtgtacgacatcatgactggctaatttttgtatatttagtagagacggggtttcatcatgttgaactcctgacctcaagtgatctgcccacctcagcctcccaaagtgctgggattacaggtgtgagccaccatgcctggccgtggtttgctcttaatgtttttaaggatggttgtgaatccccctggccccataataaattgtaattttatactgcttactataatttttttaacactgtaacaactttgagaccacctctgaatcgtcgcattataactgttgtagaatcttaaatgttaccaagatgattccaatgaggggttggaattaaatgcattaagtagtgaattcatgtgtttgtttccaacttgattttccaactctaataaaggtttctgtccatcttattacatttgtgtagtaaatggtacttcccagcctctcttttgccccattctggaatactccccagagtttgggggtgttcatgttttatacatgtaagtctgttggcatgaaggaccattttctacataatatgacatggatacttgacccaaaaaaaaatgtttagtgctaatgagcagaaaatgaatggttccataataaattgatatctgattaaaatataaaaaaaaaaaaaaaaaaa

SEQ ID NO: 1991 - protein, 679 aa, Homo sapiens
MNASSEGESFAGSVQSGTTVLVELTPDIHICGICKQQFNNLDAFVAHKQSGCQLTGTSAAAPSTVQFVSEETVPATQTQTTTRTITSETQTITVSAPEFVFEHGYQTYLPTESNENQTATVISLPAKSRTKKPTTPPAQKRLNCCYPGCQFKTAYGMKDMERHLKIHTGDKPHKCEVCGKCFSRKDKLKTHMRCHTGVKPYKCKTCDYAAADSSSLNKHLRIHSDERPFKCQICPYASRNSSQLTVHLRSHTGDAPFQCWLCSAKFKISSDLKRHMRVHSGEKPFKCEFCNVRCTMKGNLKSHIRIKHSGNNFKCPHCDFLGDSKATLRKHSRVHQSEHPEKCSECSYSCSSKAALRIHERIHCTDRPFKCNYCSFDTKQPSNLSKHMKKFHGDMVKTEALERKDTGRQSSRQVAKLDAKKSFHCDICDASFMREDSLRSHKRQHSEYSESKNSDVTVLQFQIDPSKQPATPLTVGHLQVPLQPSQVPQFSEGRVKIIVGHQVPQANTIVQAAAAAVNIVPPALVAQNPEELPGNSRLQILRQVSLIAPPQSSRCPSEAGAMTQPAVLLTTHEQTDGATLHQTLIPTASGGPQEGSGNQTFITSSGITCTDFEGLNALIQEGTAEVTVVSDGGQNIAVATTAPPVFSSSSQQELPKQTYSIIQGAAHPALLCPADSIPD

SEQ ID NO: 1992 - DNA, 2854 bp, Homo sapiens
ggcaggggcgcatccctcgccacccgcggtcgcccagcacgccgggacgcgcgtggccatccagctccccgggggcgttggggggctccgcgggcctgggcctcgggattcgcccgccgcttccccggggagccgctgctgcaaagccaggttggggcgccgggcccggccagcgccctctaggcagcggaagtgcagcttgctttacatccgtcctccccgcctcgcagagttgggagaaggcagggtggggggtgtggaaaaataaaaggaaaagtccttgcaccatgtagatcagcgtcccccactttggcatcccggccggccggggacctcccagtctgcggccatgaacgcgagcagcgagggcgagagcttcgcgggctcggtgcaaattccaggtggcacaacggtgctggtggagctgactcccgacatccatatctgcggcatctgcaagcagcagtttaacaacctggatgcctttgtagctcacaagcaaagtggctgccagctgacaggcacatccgcagcagcccccagcacggtccagtttgtatcggaggaaacagtgcctgccacccagactcagaccaccaccagaaccatcacctcggagacccagacaatcacagtttcagctccagaatttgtttttgaacatggctatcaaacttacctgcccacggaaagtaatgaaaaccagacagccactgtcatctctctccctgccaagtcacgcaccaaaaagcccacaacaccacctgctcagaaaaggcttaactgttgctatccaggttgccaattcaagactgcttatggcatgaaggacatggagcggcatttaaaaattcacacgggagacaaaccccataagtgtgaagtctgtggcaagtgctttagccggaaagacaagctgaaaactcacatgcggtgccacacgggcgtgaagccctacaagtgtaagacgtgtgactacgccgctgccgacagcagcagcctcaacaagcacctgaggatccactcggacgagcggcccttcaaatgccagatctgcccctacgccagccgcaactccagccagctcactgtccacctgcgatcccacacggcttcagaacttgatgatgatgttccaaaagcaaactgcctctccactgaaagcactgacactccgaaggcccctgtcatcactcttccctcagaggcaagggaacaaatggccacccttggagagaggacgttcaactgttgctacccaggttgccacttcaaaactgtccatggcatgaaagacttggaccgccatctcagaatccacacgggagacaaaccgcacaagtgtgagttctgtgacaagtgcttcagccggaaggacaacctgaccatgcacatgcggtgccacaccagtgtgaagccacacaagtgtcacctgtgtgactacgctgccgtggacagcagtagcctcaagaagcacctgcggatccactctgatgagcggccgtacaaatgccagctctgcccctatgccagccgcaactccagccagctcaccgtccacctgcgatctcacacgggggatacccccttccagtgctggctctgtagcgccaagttcaaaatcagctcggacttgaaaaggcacatgatcgtgcactcgggggagaagcctttcaagtgcgagttctgcgacgtccgctgcaccatgaaggcgaatctcaaatcgcacatccgcatcaagcacaccttcaaatgtctgcactgtgccttccagggccgggaccgggctgacctcctggagcacagccggctgcaccaggccgaccacccggagaagtgtccagagtgcagctactcctgctccagcgcggccgccctgcgcgtgcacagcagagtccactgtaaggactgtcccttcaagtgtgacttctgcagcttcgacacgaagcggcccagcagcctggccaagcacgtcgacaaggtgcacagggacgaggccaagacggagaaccgggcccctctgggcaaggaagggctcagagagggcagctcccagcacgtggccaagatcgtgacgcagagggccttccgctgtgagacctgcggcgcctccttcgtcagggatgactctctgagatgccacaagaagcagcacagtgatcagagtgagaacaagaactcagacttggtcaccttcccaccggaaagcggtgcctcgggacagctcagcaccctggtctccgtggggcagctcgaggctcccctagagcccagccaagacctctagctcagccgaagagggtggtcagctgtcggaacttctgaccagtgctgttgcccagccctccagaggtgaggccactgagagacaggctttgggcaccacttctggggctggccgctccaacttcacaggccttcagaggcgatggctgggcgacagtgacgaaagcaaagcaaagcagggctgtggagacactcctcgcatttgtctcttccctccaaggattatctgagcaagtcgacttgttcattcaaaggcggggtctgccaagccctgctctatccaatggggatagcttctacgtaacggattccaattttaaaactgatccatctctgatggaattattaaacttagacgatatagaaaactaaaactaatctctagagtggaaagggttaaagtgaggaaggtgtacgtgaagggtctggggttgctggaaaacttctatttcataacctgggtgatcgttctaagagtgtttgccttatatgtttgtgtggtttcttttacctgttgtcttacaataaaaaaggcagactcatggtaaaaaaaaaaaaaaaaaaaaaa

SEQ ID NO: 1993 - protein, 645 aa, Homo sapiens
MNASSEGESFAGSVQIPGGTTVLVELTPDIHICGICKQQFNNLDAFVAHKQSGCQLTGTSAAAPSTVQFVSEETVPATQTQTTTRTITSETQTITVSAPEFVFEHGYQTYLPTESNENQTATVISLPAKSRTKKPTTPPAQKRLNCCYPGCQFKTAYGMKDMERHLKIHTGDKPHKCEVCGKCFSRKDKLKTHMRCHTGVKPYKCKTCDYAAADSSSLNKHLRIHSDERPFKCQICPYASRNSSQLTVHLRSHTASELDDDVPKANCLSTESTDTPKAPVITLPSEAREQMATLGERTFNCCYPGCHFKTVHGMKDLDRHLRIHTGDKPHKCEFCDKCFSRKDNLTMHMRCHTSVKPHKCHLCDYAAVDSSSLKKHLRIHSDERPYKCQLCPYASRNSSQLTVHLRSHTGDTPFQCWLCSAKFKISSDLKRHMIVHSGEKPFKCEFCDVRCTMKANLKSHIRIKHTFKCLHCAFQGRDRADLLEHSRLHQADHPEKCPECSYSCSSAAALRVHSRVHCKDCPFKCDFCSFDTKRPSSLAKHVDKVHRDEAKTENRAPLGKEGLREGSSQHVAKIVTQRAFRCETCGASFVRDDSLRCHKKQHSDQSENKNSDLVTFPPESGASGQLSTLVSVGQLEAPLEPSQDL

SEQ ID NO: 1994 - DNA, 792 bp, Homo sapiens
ggccagagcttgcggggcgcacagagcccccaggcctcatggcgcagaaacctctcagcaccgcggcggctgaacgcatgaaccttgtgggtcaggatgagatctggaaataccgtctgaaggctgaatcggaagcacggcagaactggccccagaactgggggtttttaacaaccccttttgaggagttgatcaagtgtgaagaagatctccccaccccaaagcccaaaatcgagcttcctgagcgtttccgcatccggccggtgaccccagtggagaagtacatcaaggtctttccatcccccccagtcccacagaccacccagggcttcatcggctggagatctgcagtgccaggcctgaacaagtgcctagagctcgacgatgcgatcagaagctgcaaaggtgcttttgcacgagagctgtgctggcccaagcagggcgtgcactgaatccagacggagttctgcccaggggtgctgcatatcggtcaccaggcacccagggccatgccagggaaaggaagagctcccctgaatcccgaggacacagtcccctgcgtacttgctcatgggatgttgcaaagaacacaaagtgtgccttagacattctcaagtcatcagcgtcacccttccagaatgttcacgtccacacccattcttggctaatgtaatgaataaggcttctctcatttgtttttgataccttgggaatttctatgcagggctttaaaaaaaaataagtgattcaattttaaaaaaaaaaaaaaaaaaaaaaaaaaaaaaaaaaaaa

SEQ ID NO: 1995 - protein, 137 aa, Homo sapiens
MAQKPLSTAAAERMNLVGQDEIWKYRLKAESEARQNWPQNWGFLTTPFEELIKCEEDLPTPKPKIELPERFRIRPVTPVEKYIKVFPSPPVPQTTQGFIGWRSAVPGLNKCLELDDAIRSCKGAFARELCWPKQGVH

SEQ ID NO: 1996 - DNA, 2905 bp, Homo sapiens
cgcggagcgaggtggccgcagcgtctccgcgcgcggcccaagcccggcaggagtgcggaaccgccgcctcggccatgcggctcccggccggggggcctgggctggggcccgcgccgccccccgcgctccgcccccgctgagcctgagcccgacccggggcgcctcccgccaggcaccatggtgcagaagtcgcgcaacggcggcgtataccccggcccgagcggggagaagaagctgaaggtgggcttcgtggggctggaccccggcgcgcccgactccacccgggacggggcgctgctgatcgccggctccgaggcccccaagcgcggcagcatcctcagcaaacctcgcgcgggcggcgcgggcgccgggaagccccccaagcgcaacgccttctaccgcaagctgcagaatttcctctacaacgtgctggagcggccgcgcggctgggcgttcatctaccacgcctacgtgttcctcctggttttctcctgcctcgtgctgtctgtgttttccaccatcaaggagtatgagaagagctcggagggggccctctacatcctggaaatcgtgactatcgtggtgtttggcgtggagtacttcgtgcggatctgggccgcaggctgctgctgccggtaccgtggctggagggggcggctcaagtttgcccggaaaccgttctgtgtgattgacatcatggtgctcatcgcctccattgcggtgctggccgccggctcccagggcaacgtctttgccacatctgcgctccggagcctgcgcttcctgcagattctgcggatgatccgcatggaccggcggggaggcacctggaagctgctgggctctgtggtctatgcccacagcaaggagctggtcactgcctggtacatcggcttcctttgtctcatcctggcctcgttcctggtgtacttggcagagaagggggagaacgaccactttgacacctacgcggatgcactctggtggggcctgatcacgctgaccaccattggctacggggacaagtacccccagacctggaacggcaggctccttgcggcaaccttcaccctcatcggtgtctccttcttcgcgctgcctgcaggcatcttggggtctgggtttgccctgaaggttcaggagcagcacaggcagaagcactttgagaagaggcggaacccggcagcaggcctgatccagtcggcctggagattctacgccaccaacctctcgcgcacagacctgcactccacgtggcagtactacgagcgaacggtcaccgtgcccatgtacagacttatccccccgctgaaccagctggagctgctgaggaacctcaagagtaaatctggactcgctttcaggaaggaccccccgccggagccgtctccaagccagaaggtcagtttgaaagatcgtgtcttctccagcccccgaggcgtggctgccaaggggaaggggtccccgcaggcccagactgtgaggcggtcacccagcgccgaccagagcctcgaggacagccccagcaaggtgcccaagagctggagcttcggggaccgcagccgggcacgccaggctttccgcatcaagggtgccgcgtcacggcagaactcagaagaagcaagcctccccggagaggacattgtggatgacaagagctgcccctgcgagtttgtgaccgaggacctgaccccgggcctcaaagtcagcatcagagccgtgtgtgtcatgcggttcctggtgtccaagcggaagttcaaggagagcctgcggccctacgacgtgatggacgtcatcgagcagtactcagccggccacctggacatgctgtcccgaattaagagcctgcagtccagagtggaccagatcgtggggcggggcccagcgatcacggacaaggaccgcaccaagggcccggccgaggcggagctgcccgaggaccccagcatgatgggacggctcgggaaggtggagaagcaggtcttgtccatggagaagaagctggacttcctggtgaatatctacatgcagcggatgggcatccccccgacagagaccgaggcctactttggggccaaagagccggagccggcgccgccgtaccacagcccggaagacagccgggagcatgtcgacaggcacggctgcattgtcaagatcgtgcgctccagcagctccacgggccagaagaacttctcggcgcccccggccgcgccccctgtccagtgtccgccctccacctcctggcagccacagagccacccgcgccagggccacggcacctcccccgtgggggaccacggctccctggtgcgcatcccgccgccgcctgcccacgagcggtcgctgtccgcctacggcgggggcaaccgcgccagcatggagttcctgcggcaggaggacaccccgggctgcaggccccccgaggggaacctgcgggacagcgacacgtccatctccatcccgtccgtggaccacgaggagctggagcgttccttcagcggcttcagcatctcccagtccaaggagaacctggatgctctcaacagctgctacgcggccgtggcgccttgtgccaaagtcaggccctacattgcggagggagagtcagacaccgactccgacctctgtaccccgtgcgggcccccgccacgctcggccaccggcgagggtccctttggtgacgtgggctgggccgggcccaggaagtgaggcggcgctgggccagtggacccgcccgcggccctcctcagcacggtgcctccgaggttttgaggcgggaaccctctggggcccttttcttacagtaactgagtgtggcgggaagggtgggccctggaggggcccatgtgggctgaaggatgggggctcctggcagtgaccttttacaaaagttattttccaa

SEQ ID NO: 1997 - protein, 844 aa, Homo sapiens
MVQKSRNGGVYPGPSGEKKLKVGFVGLDPGAPDSTRDGALLIAGSEAPKRGSILSKPRAGGAGAGKPPKRNAFYRKLQNFLYNVLERPRGWAFIYHAYVFLLVFSCLVLSVFSTIKEYEKSSEGALYILEIVTIVVFGVEYFVRIWAAGCCCRYRGWRGRLKFARKPFCVIDIMVLIASIAVLAAGSQGNVFATSALRSLRFLQILRMIRMDRRGGTWKLLGSVVYAHSKELVTAWYIGFLCLILASFLVYLAEKGENDHFDTYADALWWGLITLTTIGYGDKYPQTWNGRLLAATFTLIGVSFFALPAGILGSGFALKVQEQHRQKHFEKRRNPAAGLIQSAWRFYATNLSRTDLHSTWQYYERTVTVPMYRLIPPLNQLELLRNLKSKSGLAFRKDPPPEPSPSQKVSLKDRVFSSPRGVAAKGKGSPQAQTVRRSPSADQSLEDSPSKVPKSWSFGDRSRARQAFRIKGAASRQNSEEASLPGEDIVDDKSCPCEFVTEDLTPGLKVSIRAVCVMRFLVSKRKFKESLRPYDVMDVIEQYSAGHLDMLSRIKSLQSRVDQIVGRGPAITDKDRTKGPAEAELPEDPSMMGRLGKVEKQVLSMEKKLDFLVNIYMQRMGIPPTETEAYFGAKEPEPAPPYHSPEDSREHVDRHGCIVKIVRSSSSTGQKNFSAPPAAPPVQCPPSTSWQPQSHPRQGHGTSPVGDHGSLVRIPPPPAHERSLSAYGGGNRASMEFLRQEDTPGCRPPEGNLRDSDTSISIPSVDHEELERSFSGFSISQSKENLDALNSCYAAVAPCAKVRPYIAEGESDTDSDLCTPCGPPPRSATGEGPFGDVGWAGPRK

SEQ ID NO: 1998 - DNA, 3197 bp, Homo sapiens
cgcggagcgaggtggccgcagcgtctccgcgcgcggcccaagcccggcaggagtgcggaaccgccgcctcggccatgcggctcccggccggggggcctgggctggggcccgcgccgccccccgcgctccgcccccgctgagcctgagcccgacccggggcgcctcccgccaggcaccatggtgcagaagtcgcgcaacggcggcgtataccccggcccgagcggggagaagaagctgaaggtgggcttcgtggggctggaccccggcgcgcccgactccacccgggacggggcgctgctgatcgccggctccgaggcccccaagcgcggcagcatcctcagcaaacctcgcgcgggcggcgcgggcgccgggaagccccccaagcgcaacgccttctaccgcaagctgcagaatttcctctacaacgtgctggagcggccgcgcggctgggcgttcatctaccacgcctacgtgttcctcctggttttctcctgcctcgtgctgtctgtgttttccaccatcaaggagtatgagaagagctcggagggggccctctacatcctggaaatcgtgactatcgtggtgtttggcgtggagtacttcgtgcggatctgggccgcaggctgctgctgccggtaccgtggctggagggggcggctcaagtttgcccggaaaccgttctgtgtgattgacatcatggtgctcatcgcctccattgcggtgctggccgccggctcccagggcaacgtctttgccacatctgcgctccggagcctgcgcttcctgcagattctgcggatgatccgcatggaccggcggggaggcacctggaagctgctgggctctgtggtctatgcccacagcaaggagctggtcactgcctggtacatcggcttcctttgtctcatcctggcctcgttcctggtgtacttggcagagaagggggagaacgaccactttgacacctacgcggatgcactctggtggggcctgatcacgctgaccaccattggctacggggacaagtacccccagacctggaacggcaggctccttgcggcaaccttcaccctcatcggtgtctccttcttcgcgctgcctgcaggcatcttggggtctgggtttgccctgaaggttcaggagcagcacaggcagaagcactttgagaagaggcggaacccggcagcaggcctgatccagtcggcctggagattctacgccaccaacctctcgcgcacagacctgcactccacgtggcagtactacgagcgaacggtcaccgtgcccatgtacagttcgcaaactcaaacctacggggcctccagacttatccccccgctgaaccagctggagctgctgaggaacctcaagagtaaatctggactcgctttcaggaaggaccccccgccggagccgtctccaagccagaaggtcagtttgaaagatcgtgtcttctccagcccccgaggcgtggctgccaaggggaaggggtccccgcaggcccagactgtgaggcggtcacccagcgccgaccagagcctcgaggacagccccagcaaggtgcccaagagctggagcttcggggaccgcagccgggcacgccaggctttccgcatcaagggtgccgcgtcacggcagaactcagaagaagcaagcctccccggagaggacattgtggatgacaagagctgcccctgcgagtttgtgaccgaggacctgaccccgggcctcaaagtcagcatcagagccgtgtgtgtcatgcggttcctggtgtccaagcggaagttcaaggagagcctgcggccctacgacgtgatggacgtcatcgagcagtactcagccggccacctggacatgctgtcccgaattaagagcctgcagtccagagtggaccagatcgtggggcggggcccagcgatcacggacaaggaccgcaccaagggcccggccgaggcggagctgcccgaggaccccagcatgatgggacggctcgggaaggtggagaagcaggtcttgtccatggagaagaagctggacttcctggtgaatatctacatgcagcggatgggcatccccccgacagagaccgaggcctactttggggccaaagagccggagccggcgccgccgtaccacagcccggaagacagccgggagcatgtcgacaggcacggctgcattgtcaagatcgtgcgctccagcagctccacgggccagaagaacttctcggcgcccccggccgcgccccctgtccagtgtccgccctccacctcctggcagccacagagccacccgcgccagggccacggcacctcccccgtgggggaccacggctccctggtgcgcatcccgccgccgcctgcccacgagcggtcgctgtccgcctacggcgggggcaaccgcgccagcatggagttcctgcggcaggaggacaccccgggctgcaggccccccgaggggaacctgcgggacagcgacacgtccatctccatcccgtccgtggaccacgaggagctggagcgttccttcagcggcttcagcatctcccagtccaaggagaacctggatgctctcaacagctgctacgcggccgtggcgccttgtgccaaagtcaggccctacattgcggagggagagtcagacaccgactccgacctctgtaccccgtgcgggcccccgccacgctcggccaccggcgagggtccctttggtgacgtgggctgggccgggcccaggaagtgaggcggcgctgggccagtggacccgcccgcggccctcctcagcacggtgcctccgaggttttgaggcgggaaccctctggggcccttttcttacagtaactgagtgtggcgggaagggtgggccctggaggggcccatgtgggctgaaggatgggggctcctggcagtgaccttttacaaaagttattttccaacaggggctggagggctgggcagggccctgtggctccaggagcagcgtgcaggagcaaggctgccctgtccactctgctcagggccgcggccgacatcagcccggtgtgaggaggggcgggagtgatgacggggtgttgccagcgtggcaacaggcggggggttgtctcagccgagcccaggggaggcacaaagggcaggcctgttccctgaggacctgcgcaaagggcgggcctgtttggtgaggacctgcggccttgggtc

SEQ ID NO: 1999 - protein, 854 aa, Homo sapiens
MVQKSRNGGVYPGPSGEKKLKVGFVGLDPGAPDSTRDGALLIAGSEAPKRGSILSKPRAGGAGAGKPPKRNAFYRKLQNFLYNVLERPRGWAFIYHAYVFLLVFSCLVLSVFSTIKEYEKSSEGALYILEIVTIVVFGVEYFVRIWAAGCCCRYRGWRGRLKFARKPFCVIDIMVLIASIAVLAAGSQGNVFATSALRSLRFLQILRMIRMDRRGGTWKLLGSVVYAHSKELVTAWYIGFLCLILASFLVYLAEKGENDHFDTYADALWWGLITLTTIGYGDKYPQTWNGRLLAATFTLIGVSFFALPAGILGSGFALKVQEQHRQKHFEKRRNPAAGLIQSAWRFYATNLSRTDLHSTWQYYERTVTVPMYSSQTQTYGASRLIPPLNQLELLRNLKSKSGLAFRKDPPPEPSPSQKVSLKDRVFSSPRGVAAKGKGSPQAQTVRRSPSADQSLEDSPSKVPKSWSFGDRSRARQAFRIKGAASRQNSEEASLPGEDIVDDKSCPCEFVTEDLTPGLKVSIRAVCVMRFLVSKRKFKESLRPYDVMDVIEQYSAGHLDMLSRIKSLQSRVDQIVGRGPAITDKDRTKGPAEAELPEDPSMMGRLGKVEKQVLSMEKKLDFLVNIYMQRMGIPPTETEAYFGAKEPEPAPPYHSPEDSREHVDRHGCIVKIVRSSSSTGQKNFSAPPAAPPVQCPPSTSWQPQSHPRQGHGTSPVGDHGSLVRIPPPPAHERSLSAYGGGNRASMEFLRQEDTPGCRPPEGNLRDSDTSISIPSVDHEELERSFSGFSISQSKENLDALNSCYAAVAPCAKVRPYIAEGESDTDSDLCTPCGPPPRSATGEGPFGDVGWAGPRK

SEQ ID NO: 2000 - DNA, 3251 bp, Homo sapiens
cgcggagcgaggtggccgcagcgtctccgcgcgcggcccaagcccggcaggagtgcggaaccgccgcctcggccatgcggctcccggccggggggcctgggctggggcccgcgccgccccccgcgctccgcccccgctgagcctgagcccgacccggggcgcctcccgccaggcaccatggtgcagaagtcgcgcaacggcggcgtataccccggcccgagcggggagaagaagctgaaggtgggcttcgtggggctggaccccggcgcgcccgactccacccgggacggggcgctgctgatcgccggctccgaggcccccaagcgcggcagcatcctcagcaaacctcgcgcgggcggcgcgggcgccgggaagccccccaagcgcaacgccttctaccgcaagctgcagaatttcctctacaacgtgctggagcggccgcgcggctgggcgttcatctaccacgcctacgtgttcctcctggttttctcctgcctcgtgctgtctgtgttttccaccatcaaggagtatgagaagagctcggagggggccctctacatcctggaaatcgtgactatcgtggtgtttggcgtggagtacttcgtgcggatctgggccgcaggctgctgctgccggtaccgtggctggagggggcggctcaagtttgcccggaaaccgttctgtgtgattgacatcatggtgctcatcgcctccattgcggtgctggccgccggctcccagggcaacgtctttgccacatctgcgctccggagcctgcgcttcctgcagattctgcggatgatccgcatggaccggcggggaggcacctggaagctgctgggctctgtggtctatgcccacagcaaggagctggtcactgcctggtacatcggcttcctttgtctcatcctggcctcgttcctggtgtacttggcagagaagggggagaacgaccactttgacacctacgcggatgcactctggtggggcctgatcacgctgaccaccattggctacggggacaagtacccccagacctggaacggcaggctccttgcggcaaccttcaccctcatcggtgtctccttcttcgcgctgcctgcaggcatcttggggtctgggtttgccctgaaggttcaggagcagcacaggcagaagcactttgagaagaggcggaacccggcagcaggcctgatccagtcggcctggagattctacgccaccaacctctcgcgcacagacctgcactccacgtggcagtactacgagcgaacggtcaccgtgcccatgtacagttcgcaaactcaaacctacggggcctccagacttatccccccgctgaaccagctggagctgctgaggaacctcaagagtaaatctggactcgctttcaggaaggaccccccgccggagccgtctccaagtaaaggcagcccgtgcagagggcccctgtgtggatgctgccccggacgctctagccagaaggtcagtttgaaagatcgtgtcttctccagcccccgaggcgtggctgccaaggggaaggggtccccgcaggcccagactgtgaggcggtcacccagcgccgaccagagcctcgaggacagccccagcaaggtgcccaagagctggagcttcggggaccgcagccgggcacgccaggctttccgcatcaagggtgccgcgtcacggcagaactcagaagaagcaagcctccccggagaggacattgtggatgacaagagctgcccctgcgagtttgtgaccgaggacctgaccccgggcctcaaagtcagcatcagagccgtgtgtgtcatgcggttcctggtgtccaagcggaagttcaaggagagcctgcggccctacgacgtgatggacgtcatcgagcagtactcagccggccacctggacatgctgtcccgaattaagagcctgcagtccagagtggaccagatcgtggggcggggcccagcgatcacggacaaggaccgcaccaagggcccggccgaggcggagctgcccgaggaccccagcatgatgggacggctcgggaaggtggagaagcaggtcttgtccatggagaagaagctggacttcctggtgaatatctacatgcagcggatgggcatccccccgacagagaccgaggcctactttggggccaaagagccggagccggcgccgccgtaccacagcccggaagacagccgggagcatgtcgacaggcacggctgcattgtcaagatcgtgcgctccagcagctccacgggccagaagaacttctcggcgcccccggccgcgccccctgtccagtgtccgccctccacctcctggcagccacagagccacccgcgccagggccacggcacctcccccgtgggggaccacggctccctggtgcgcatcccgccgccgcctgcccacgagcggtcgctgtccgcctacggcgggggcaaccgcgccagcatggagttcctgcggcaggaggacaccccgggctgcaggccccccgaggggaacctgcgggacagcgacacgtccatctccatcccgtccgtggaccacgaggagctggagcgttccttcagcggcttcagcatctcccagtccaaggagaacctggatgctctcaacagctgctacgcggccgtggcgccttgtgccaaagtcaggccctacattgcggagggagagtcagacaccgactccgacctctgtaccccgtgcgggcccccgccacgctcggccaccggcgagggtccctttggtgacgtgggctgggccgggcccaggaagtgaggcggcgctgggccagtggacccgcccgcggccctcctcagcacggtgcctccgaggttttgaggcgggaaccctctggggcccttttcttacagtaactgagtgtggcgggaagggtgggccctggaggggcccatgtgggctgaaggatgggggctcctggcagtgaccttttacaaaagttattttccaacaggggctggagggctgggcagggccctgtggctccaggagcagcgtgcaggagcaaggctgccctgtccactctgctcagggccgcggccgacatcagcccggtgtgaggaggggcgggagtgatgacggggtgttgccagcgtggcaacaggcggggggttgtctcagccgagcccaggggaggcacaaagggcaggcctgttccctgaggacctgcgcaaagggcgggcctgtttggtgaggacctgcggccttgggtc

SEQ ID NO: 2001 - protein, 872 aa, Homo sapiens [sequence omitted]

SEQ ID NO: 2002 - DNA, 2912 bp, Homo sapiens
cgcggagcgaggtggccgcagcgtctccgcgcgcggcccaagcccggcaggagtgcggaaccgccgcctcggccatgcggctcccggccggggggcctgggctggggcccgcgccgccccccgcgctccgcccccgctgagcctgagcccgacccggggcgcctcccgccaggcaccatggtgcagaagtcgcgcaacggcggcgtataccccggcccgagcggggagaagaagctgaaggtgggcttcgtggggctggaccccggcgcgcccgactccacccgggacggggcgctgctgatcgccggctccgaggcccccaagcgcggcagcatcctcagcaaacctcgcgcgggcggcgcgggcgccgggaagccccccaagcgcaacgccttctaccgcaagctgcagaatttcctctacaacgtgctggagcggccgcgcggctgggcgttcatctaccacgcctacgtgttcctcctggttttctcctgcctcgtgctgtctgtgttttccaccatcaaggagtatgagaagagctcggagggggccctctacatcctggaaatcgtgactatcgtggtgtttggcgtggagtacttcgtgcggatctgggccgcaggctgctgctgccggtaccgtggctggagggggcggctcaagtttgcccggaaaccgttctgtgtgattgacatcatggtgctcatcgcctccattgcggtgctggccgccggctcccagggcaacgtctttgccacatctgcgctccggagcctgcgcttcctgcagattctgcggatgatccgcatggaccggcggggaggcacctggaagctgctgggctctgtggtctatgcccacagcaaggagctggtcactgcctggtacatcggcttcctttgtctcatcctggcctcgttcctggtgtacttggcagagaagggggagaacgaccactttgacacctacgcggatgcactctggtggggcctgatcacgctgaccaccattggctacggggacaagtacccccagacctggaacggcaggctccttgcggcaaccttcaccctcatcggtgtctccttcttcgcgctgcctgcaggcatcttggggtctgggtttgccctgaaggttcaggagcagcacaggcagaagcactttgagaagaggcggaacccggcagcaggcctgatccagtcggcctggagattctacgccaccaacctctcgcgcacagacctgcactccacgtggcagtactacgagcgaacggtcaccgtgcccatgtacagttcgcaaactcaaacctacggggcctccagacttatccccccgctgaaccagctggagctgctgaggaacctcaagagtaaatctggactcgctttcaggaaggaccccccgccggagccgtctccaagcccccgaggcgtggctgccaaggggaaggggtccccgcaggcccagactgtgaggcggtcacccagcgccgaccagagcctcgaggacagccccagcaaggtgcccaagagctggagcttcggggaccgcagccgggcacgccaggctttccgcatcaagggtgccgcgtcacggcagaactcagaagcaagcctccccggagaggacattgtggatgacaagagctgcccctgcgagtttgtgaccgaggacctgaccccgggcctcaaagtcagcatcagagccgtgtgtgtcatgcggttcctggtgtccaagcggaagttcaaggagagcctgcggccctacgacgtgatggacgtcatcgagcagtactcagccggccacctggacatgctgtcccgaattaagagcctgcagtccagagtggaccagatcgtggggcggggcccagcgatcacggacaaggaccgcaccaagggcccggccgaggcggagctgcccgaggaccccagcatgatgggacggctcgggaaggtggagaagcaggtcttgtccatggagaagaagctggacttcctggtgaatatctacatgcagcggatgggcatccccccgacagagaccgaggcctactttggggccaaagagccggagccggcgccgccgtaccacagcccggaagacagccgggagcatgtcgacaggcacggctgcattgtcaagatcgtgcgctccagcagctccacgggccagaagaacttctcggcgcccccggccgcgccccctgtccagtgtccgccctccacctcctggcagccacagagccacccgcgccagggccacggcacctcccccgtgggggaccacggctccctggtgcgcatcccgccgccgcctgcccacgagcggtcgctgtccgcctacggcgggggcaaccgcgccagcatggagttcctgcggcaggaggacaccccgggctgcaggccccccgaggggaacctgcgggacagcgacacgtccatctccatcccgtccgtggaccacgaggagctggagcgttccttcagcggcttcagcatctcccagtccaaggagaacctggatgctctcaacagctgctacgcggccgtggcgccttgtgccaaagtcaggccctacattgcggagggagagtcagacaccgactccgacctctgtaccccgtgcgggcccccgccacgctcggccaccggcgagggtccctttggtgacgtgggctgggccgggcccaggaagtgaggcggcgctgggccagtggacccgcccgcggccctcctcagcacggtgcctccgaggttttgaggcgggaaccctctggggcccttttcttacagtaactgagtgtggcgggaagggtgggccctggaggggcccatgtgggctgaaggatgggggctcctggcagtgaccttttacaaaagttattttccaacaggggctggagggct

SEQ ID NO: 2003 - protein, 841 aa, Homo sapiens
MVQKSRNGGVYPGPSGEKKLKVGFVGLDPGAPDSTRDGALLIAGSEAPKRGSILSKPRAGGAGAGKPPKRNAFYRKLQNFLYNVLERPRGWAFIYHAYVFLLVFSCLVLSVFSTIKEYEKSSEGALYILEIVTIVVFGVEYFVRIWAAGCCCRYRGWRGRLKFARKPFCVIDIMVLIASIAVLAAGSQGNVFATSALRSLRFLQILRMIRMDRRGGTWKLLGSVVYAHSKELVTAWYIGFLCLILASFLVYLAEKGENDHFDTYADALWWGLITLTTIGYGDKYPQTWNGRLLAATFTLIGVSFFALPAGILGSGFALKVQEQHRQKHFEKRRNPAAGLIQSAWRFYATNLSRTDLHSTWQYYERTVTVPMYSSQTQTYGASRLIPPLNQLELLRNLKSKSGLAFRKDPPPEPSPSPRGVAAKGKGSPQAQTVRRSPSADQSLEDSPSKVPKSWSFGDRSRARQAFRIKGAASRQNSEASLPGEDIVDDKSCPCEFVTEDLTPGLKVSIRAVCVMRFLVSKRKFKESLRPYDVMDVIEQYSAGHLDMLSRIKSLQSRVDQIVGRGPAITDKDRTKGPAEAELPEDPSMMGRLGKVEKQVLSMEKKLDFLVNIYMQRMGIPPTETEAYFGAKEPEPAPPYHSPEDSREHVDRHGCIVKIVRSSSSTGQKNFSAPPAAPPVQCPPSTSWQPQSHPRQGHGTSPVGDHGSLVRIPPPPAHERSLSAYGGGNRASMEFLRQEDTPGCRPPEGNLRDSDTSISIPSVDHEELERSFSGFSISQSKENLDALNSCYAAVAPCAKVRPYIAEGESDTDSDLCTPCGPPPRSATGEGPFGDVGWAGPRK

SEQ ID NO: 2004 - DNA, 1425 bp, Homo sapiens
cgcggagcgaggtggccgcagcgtctccgcgcgcggcccaagcccggcaggagtgcggaaccgccgcctcggccatgcggctcccggccggggggcctgggctggggcccgcgccgccccccgcgctccgcccccgctgagcctgagcccgacccggggcgcctcccgccaggcaccatggtgcagaagtcgcgcaacggcggcgtataccccggcccgagcggggagaagaagctgaaggtgggcttcgtggggctggaccccggcgcgcccgactccacccgggacggggcgctgctgatcgccggctccgaggcccccaagcgcggcagcatcctcagcaaacctcgcgcgggcggcgcgggcgccgggaagccccccaagcgcaacgccttctaccgcaagctgcagaatttcctctacaacgtgctggagcggccgcgcggctgggcgttcatctaccacgcctacgtgttcctcctggttttctcctgcctcgtgctgtctgtgttttccaccatcaaggagtatgagaagagctcggagggggccctctacatcctggaaatcgtgactatcgtggtgtttggcgtggagtacttcgtgcggatctgggccgcaggctgctgctgccggtaccgtggctggagggggcggctcaagtttgcccggaaaccgttctgtgtgattgacatcatggtgctcatcgcctccattgcggtgctggccgccggctcccagggcaacgtctttgccacatctgcgctccggagcctgcgcttcctgcagattctgcggatgatccgcatggaccggcggggaggcacctggaagctgctgggctctgtggtctatgcccacagcaaggagctggtcactgcctggtacatcggcttcctttgtctcatcctggcctcgttcctggtgtacttggcagagaagggggagaacgaccactttgacacctacgcggatgcactctggtggggcctgatcacgctgaccaccattggctacggggacaagtacccccagacctggaacggcaggctccttgcggcaaccttcaccctcatcggtgtctccttcttcgcgctgcctgcaggcatcttggggtctgggtttgccctgaaggttcaggagcagcacaggcagaagcactttgagaagaggcggaacccggcagcaggcctgatccagtcggcctggagattctacgccaccaacctctcgcgcacagacctgcactccacgtggcagtactacgagcgaacggtcaccgtgcccatgtacaggtaccgccgccgggcacctgccaccaagcaactgtttcattttttattttccatttgttcttaaaccccactttttgttgttcattattttgattgattttttttctttaaaatgtatttttcacaaagg

SEQ ID NO: 2005 - protein, 393 aa, Homo sapiens
MVQKSRNGGVYPGPSGEKKLKVGFVGLDPGAPDSTRDGALLIAGSEAPKRGSILSKPRAGGAGAGKPPKRNAFYRKLQNFLYNVLERPRGWAFIYHAYVFLLVFSCLVLSVFSTIKEYEKSSEGALYILEIVTIVVFGVEYFVRIWAAGCCCRYRGWRGRLKFARKPFCVIDIMVLIASIAVLAAGSQGNVFATSALRSLRFLQILRMIRMDRRGGTWKLLGSVVYAHSKELVTAWYIGFLCLILASFLVYLAEKGENDHFDTYADALWWGLITLTTIGYGDKYPQTWNGRLLAATFTLIGVSFFALPAGILGSGFALKVQEQHRQKHFEKRRNPAAGLIQSAWRFYATNLSRTDLHSTWQYYERTVTVPMYRYRRRAPATKQLFHFLFSICS

SEQ ID NO: 2006 - DNA, 1841 bp, Homo sapiens
actgcgccgccaccgtcaataggtggaccccctcccggagataaaaccgccggcgccggcgccgccagtccctctggctgagacctcggctccggaatcactgcagcccccctcgccctgagccagagcaccccgggtcccgccagcccctcacactcccagcaaaatgggcaaggagaagacccacatcaacatcgtggtcatcggccacgtggactccggaaagtccaccaccacgggccacctcatctacaaatgcggaggtattgacaaaaggaccattgagaagttcgagaaggaggcggctgagatggggaagggatccttcaagtatgcctgggtgctggacaagctgaaggcggagcgtgagcgcggcatcaccatcgacatctccctctggaagttcgagaccaccaagtactacatcaccatcatcgatgcccccggccaccgcgacttcatcaagaacatgatcacgggtacatcccaggcggactgcgcagtgctgatcgtggcggcgggcgtgggcgagttcgaggcgggcatctccaagaatgggcagacgcgggagcatgccctgctggcctacacgctgggtgtgaagcagctcatcgtgggcgtgaacaaaatggactccacagagccggcctacagcgagaagcgctacgacgagatcgtcaaggaagtcagcgcctacatcaagaagatcggctacaacccggccaccgtgccctttgtgcccatctccggctggcacggtgacaacatgctggagccctcccccaacatgccgtggttcaagggctggaaggtggagcgtaaggagggcaacgcaagcggcgtgtccctgctggaggccctggacaccatcctgccccccacgcgccccacggacaagcccctgcgcctgccgctgcaggacgtgtacaagattggcggcattggcacggtgcccgtgggccgggtggagaccggcatcctgcggccgggcatggtggtgacctttgcgccagtgaacatcaccactgaggtgaagtcagtggagatgcaccacgaggctctgagcgaagctctgcccggcgacaacgtcggcttcaatgtgaagaacgtgtcggtgaaggacatccggcggggcaacgtgtgtggggacagcaagtctgacccgccgcaggaggctgctcagttcacctcccaggtcatcatcctgaaccacccggggcagattagcgccggctactccccggtcatcgactgccacacagcccacatcgcctgcaagtttgcggagctgaaggagaagattgaccggcgctctggcaagaagctggaggacaaccccaagtccctgaagtctggagacgcggccatcgtggagatggtgccgggaaagcccatgtgtgtggagagcttctcccagtacccgcctctcggccgcttcgccgtgcgcgacatgaggcagacggtggccgtaggcgtcatcaagaacgtggagaagaagagcggcggcgccggcaaggtcaccaagtcggcgcagaaggcgcagaaggcgggcaagtgaagcgcgggcgcccgcggcgcgaccctccccggcggcgccgcgctccgaaccccggcccggcccccgccccgcccccgccccgcgcgccgctccggcgccccgcacccccgccaggcgcatgtctgcacctccgcttgccagaggccctcggtcagcgactggatgctcgccatcaaggtccagtggaagttcttcaagaggaaaggcgcccccgccccaggcttccgcgcccagcgctcgccacgctcagtgcccgttttaccaataaactgagcgaccccag

SEQ ID NO: 2007 - protein, 463 aa, Homo sapiens
MGKEKTHINIVVIGHVDSGKSTTTGHLIYKCGGIDKRTIEKFEKEAAEMGKGSFKYAWVLDKLKAERERGITIDISLWKFETTKYYITIIDAPGHRDFIKNMITGTSQADCAVLIVAAGVGEFEAGISKNGQTREHALLAYTLGVKQLIVGVNKMDSTEPAYSEKRYDEIVKEVSAYIKKIGYNPATVPFVPISGWHGDNMLEPSPNMPWFKGWKVERKEGNASGVSLLEALDTILPPTRPTDKPLRLPLQDVYKIGGIGTVPVGRVETGILRPGMVVTFAPVNITTEVKSVEMHHEALSEALPGDNVGFNVKNVSVKDIRRGNVCGDSKSDPPQEAAQFTSQVIILNHPGQISAGYSPVIDCHTAHIACKFAELKEKIDRRSGKKLEDNPKSLKSGDAAIVEMVPGKPMCVESFSQYPPLGRFAVRDMRQTVAVGVIKNVEKKSGGAGKVTKSAQKAQKAGK

SEQ ID NO: 2008 - DNA, 794 bp, Homo sapiens
ctctgtcgtggcgcggcttcccgcggtcttctctgcaaatgggctccgtggcctagcgcccccgtccccgccacccgtgatcgtgcgccgaggcccgcgaggggtcgccgcccagatcccaccagccagcaagctaaagcatggcggccatcccctccagcggctcgctcgtggccacccacgactactaccggcgccgcctgggttccacttccagcaacagctcctgcagcagtaccgagtgccccggggaagccattccccaccccccaggtctccccaaggctgacccgggtcattggtgggccagcttctttttcgggaagtccaccctcccgttcatggccacggtgttggagtccgcagagcactcggaacctccccaggcctccagcagcatgaccgcctgtggcctggctcgggacgccccgaggaagcagcccggcggtcagtccagcacagccagcgctgggcccccgtcctgacctgagcggttaccaccagccccaggcctgcggaggcgctagtccaccagagcccctccccgcccctctccccactccgcatccctcgcccccctccccacctcccaccccccaccctgtaaactaggcggctgcagcaagcagaccttcgcatcaacacagcagacaccaaaaaccagtgagagccccgctctctaccgcccggccccagcactcgctagctttcctgacacctggaactgtgcacctggcaccaagcggaaaataaactccaagcagccagtagccccgaaaaaaaaaaaaaaaaaa

SEQ ID NO: 2009 - protein, 114 aa, Homo sapiens
MAAIPSSGSLVATHDYYRRRLGSTSSNSSCSSTECPGEAIPHPPGLPKADPGHWWASFFFGKSTLPFMATVLESAEHSEPPQASSSMTACGLARDAPRKQPGGQSSTASAGPPS

SEQ ID NO: 2010 - DNA, 2519 bp, Homo sapiens
gctgggccacagcctggtcctgccgctgcgcccgcccgccatggtgtcccgggaccaggctcacctgggccccaagtatgtgggcctctgggacttcaagtcccggacggacgaggagctgagcttccgcgcgggggacgtcttccacgtggccaggaaggaggagcagtggtggtgggccacgctgctggacgaggcgggtggggccgtggcccagggctatgtgccccacaactacctggccgagagggagacggtggagtcggaaccgtggttctttggctgcatctcccgctcggaagctgtgcgtcggctgcaggccgagggcaacgccacgggcgccttcctgatcagggtcagcgagaagccgagtgccgactacgtcctgtcggtgcgggacacgcaggctgtgcggcactacaagatctggcggcgtgccgggggccggctgcacctgaacgaggcggtgtccttcctcagcctgcccgagcttgtgaactaccacagggcccagagcctgtcccacggcctgcggctggccgcgccctgccggaagcacgagcctgagcccctgccccattgggatgactgggagaggccgagggaggagttcacgctctgcaggaagctggggtccggctactttggggaggtcttcgaggggctctggaaagaccgggtccaggtggccattaaggtgatttctcgagacaacctcctgcaccagcagatgctgcagtcggagatccaggccatgaagaagctgcggcacaaacacatcctggcgctgtacgccgtggtgtccgtgggggaccccgtgtacatcatcacggagctcatggccaagggcagcctgctggagctgctccgcgactctgatgagaaagtcctgcccgtttcggagctgctggacatcgcctggcaggtggctgagggcatgtgttacctggagtcgcagaattacatccaccgggacctggccgccaggaacatcctcgtcggggaaaacaccctctgcaaagttggggacttcgggttagccaggcttatcaaggaggacgtctacctctcccatgaccacaatatcccctacaagtggacggcccctgaagcgctctcccgaggccattactccaccaaatccgacgtctggtcctttgggattctcctgcatgagatgttcagcaggggtcaggtgccctacccaggcatgtccaaccatgaggccttcctgagggtggacgccggctaccgcatgccctgccctctggagtgcccgcccagcgtgcacaagctgatgctgacatgctggtgcagggaccccgagcagagaccctgcttcaaggccctgcgggagaggctctccagcttcaccagctacgagaacccgacctgagctgctgtggagcgggcatggccgggccctgctgaggaggggcctgggcagagggcctggacctgggatcaaggcccacgcgcttccctggggtttactgaggtgatgggtgcaggaaaggttcacaaatgtggagtgtctgcgtccaatacacgcgtgtgctcctctccttactccatcgtgtgtgccttgggtctcagctgctgacacgcagcctgctctggagcctgcagatgagatccgggagactgacacgaagccagcagaggtcagaggggactctgaccacagcccgctctctggctgtctgtctgcagtgcccggctgagggtgggaggcaaacacgccttgttcctgctcttcccagttcagcttggtgggagaaagtcattcgcgtggctcgggacgctcatgtaaatttggttttggtgctcaagggttctttcctcccaggggcaggtgtttctttcctgtttgtcttgtgtcttgagagcttggccttatgaccagtgagaactctctccctggtctctgccagcccaagcatcactgcccgaggcgccagctcagtttcaccgtccacgtccacaaggggcttttcccaccttcacctttgtcgctgggtcagtgctggaaagcgcccctcactcctgcgctgacaagggcccttctctactgtctgtggggtggttccgggctgggggggctgcctcctttgcacctgattttgaaggtgtctctttcatccatggttaagtcataaaaagcttattggttttggttttgactcacctgaaagtttttttggtttaaaagaagaataggcggggcacggtggctcatgcctgtaatcccagcactttgggaggctgaggcaggtggatcacgaggtcaggagatcgacaccatcctggctaacacggtgaaaccccgtctctactaaaaaatacaaaaaattagctgggtgtggtggtgggggtgggcgcctgtagtcccagctacgtgggaggctgaggcagcagactggtgtgaacccgggaggtggagcttgcagtgagccgagatcgcgccactgcactccagcctgggcgacagagcgagactccatctcaaaaaaaaaaaa

SEQ ID NO: 2011 - protein, 451 aa, Homo sapiens
MVSRDQAHLGPKYVGLWDFKSRTDEELSFRAGDVFHVARKEEQWWWATLLDEAGGAVAQGYVPHNYLAERETVESEPWFFGCISRSEAVRRLQAEGNATGAFLIRVSEKPSADYVLSVRDTQAVRHYKIWRRAGGRLHLNEAVSFLSLPELVNYHRAQSLSHGLRLAAPCRKHEPEPLPHWDDWERPREEFTLCRKLGSGYFGEVFEGLWKDRVQVAIKVISRDNLLHQQMLQSEIQAMKKLRHKHILALYAVVSVGDPVYIITELMAKGSLLELLRDSDEKVLPVSELLDIAWQVAEGMCYLESQNYIHRDLAARNILVGENTLCKVGDFGLARLIKEDVYLSHDHNIPYKWTAPEALSRGHYSTKSDVWSFGILLHEMFSRGQVPYPGMSNHEAFLRVDAGYRMPCPLECPPSVHKLMLTCWCRDPEQRPCFKALRERLSSFTSYENPT

SEQ ID NO: 2012 - DNA, 1516 bp, Homo sapiens
ggctcccatggccctcgggcccagcgtggtgaccccgggggatggagccgttcctcaggaggcggctggccttcctgtccttcttctgggacaagatctggccggcgggcggcgagccggaccatggcacccccgggtccctggaccccaacactgacccagtgcccacgctccccgccgagccttgcagccccttccctcagctcttccttgcgctctatgacttcacggcgcggtgtggcggggagctgagtgtccgccgcggggacaggctctgtgccctcgaagaggggggcggctacatcttcgcacgcaggctttcgggccagcccagcgccgggctcgtgcccatcacccacgtggccaaggcttctcctgagacgctctcagaccaaccctggtactttagcggggtcagtcggacccaggcacagcagctgctcctctccccacccaacgaaccaggggccttcctcatccggcccagcgagagcagcctcgggggctactcactgtcagtccgggcccaggccaaggtctgccactaccgggtctccatggcagctgatggcagcctctacctgcagaagggacggctctttcccggcctggaggagctgctcacctactacaaggccaactggaagctgatccagaaccccctgctgcagccctgcatgccccagaaggccccgaggcaggacgtgtgggagcggccacactccgaattcgcccttgggaggaagctgggtgaaggctactttggggaggtgtgggaaggcctgtggctgggctccctgcccgtggcgatcaaggtcatcaagtcagccaacatgaagctcactgacctcgccaaggagatccagacactgaagggcctgcggcacgagcggctcatccggctgcacgcagtgtgctcgggcggggagcctgtgtacatcgtcacggaactcatgcgcaaggggaacctgcaggccttcctgggcacccccgagggccgggccctgcgtctgccgccactcctgggctttgcctgccaggtggctgagggcatgagctacctggaggagcagcgcgttgtgcaccgggacttggccgcccggaacgtgctcgtggacgacggcctggcctgcaaggtggctgacttcggcctggcccggctgctcaaggacgacatctactccccgagcagcagctccaagatcccggtcaagtggacagcgcctgaggcggccaattatcgtgtcttctcccagaagtcagacgtctggtccttcggcgtcctgctgcacgaggttttcacctatggccagtgtccctatgaagggatgaccaaccacgagacgctgcagcagatcatgcgagggtaccggctgccgcgcccggctgcctgcccggcggaggtctacgtgctcatgctggagtgctggaggagcagccccgaggaacggccctccttcgccacgctgcgggagaagctgcacgccatccacagatgccacccctgagtcctcac

SEQ ID NO: 2013 - protein, 488 aa, Homo sapiens
MEPFLRRRLAFLSFFWDKIWPAGGEPDHGTPGSLDPNTDPVPTLPAEPCSPFPQLFLALYDFTARCGGELSVRRGDRLCALEEGGGYIFARRLSGQPSAGLVPITHVAKASPETLSDQPWYFSGVSRTQAQQLLLSPPNEPGAFLIRPSESSLGGYSLSVRAQAKVCHYRVSMAADGSLYLQKGRLFPGLEELLTYYKANWKLIQNPLLQPCMPQKAPRQDVWERPHSEFALGRKLGEGYFGEVWEGLWLGSLPVAIKVIKSANMKLTDLAKEIQTLKGLRHERLIRLHAVCSGGEPVYIVTELMRKGNLQAFLGTPEGRALRLPPLLGFACQVAEGMSYLEEQRVVHRDLAARNVLVDDGLACKVADFGLARLLKDDIYSPSSSSKIPVKWTAPEAANYRVFSQKSDVWSFGVLLHEVFTYGQCPYEGMTNHETLQQIMRGYRLPRPAACPAEVYVLMLECWRSSPEERPSFATLREKLHAIHRCHP

SEQ ID NO: 2014 - DNA, 1124 bp, Homo sapiens
ggaagaggccccagcactgacctccgtgggggtggagatgaggaggatggaaagggtgtcttcctccagcatcttcctgaagctcccggataatgagcacccatgtggcaggcctgggcctggacaagatgaagctgggcaatccccagtccttcctggaccaggaggaggcagatgaccagcagctgctggaaccagaggcgtggaagacctacaccgagcgccgcaatgccctgcgtgagttcctgacctcggacctgagtccgcacctgctcaagcgccaccacgcccgcatgcagctgctgcgtaagtgctcctactacatcgaggtcctgcccaagcacctggccctgggcgaccagaacccgctggtgctgcctagcgccttgttccagctcatcgacccctggaagttccagcgcatgaagaaggtgggcacagctcagaccaagatccagctcctgctgctcggggacctgttggaacagctcgaccatggccgtgctgagctggatgccctgctccggtcgccagacccacggcccttcctggccgactgggcgctggtggagcggcggctggcggacgtgtcggccgtcatggacagcttcctgaccatgatggtgccggggcggctacacgtcaagcaccgcctggtgtctgatgtcagtgccaccaagatcccgcacatctggctcatgctgagcaccaagatgcctgtcgtgtttgaccgaaaggcgtcggcggctcaccaggactgggcccggctgcgctggttcgtcaccatccagccagccacatcggagcagtatgagttgcgcttcaggctgctggacccgcggacacagcaggagtgcgcccagtgtggcgtcatccccgtggctgcctgcaccttcgacgtccgaaacctgctgcccaaccgatcctataagttcaccatcaagagggccgagacctccacgctggtgtacgagccctggagggacagcctcaccctgcacaccaagccggagcccctggaggggcccgccctcagccactctgtctgagagatgattttctaatatttatccactaataaagaagagtgtaaatgcacatatggaattaaaaaaaaaaaaaaa

SEQ ID NO: 2015 - protein, 318 aa, Homo sapiens
MSTHVAGLGLDKMKLGNPQSFLDQEEADDQQLLEPEAWKTYTERRNALREFLTSDLSPHLLKRHHARMQLLRKCSYYIEVLPKHLALGDQNPLVLPSALFQLIDPWKFQRMKKVGTAQTKIQLLLLGDLLEQLDHGRAELDALLRSPDPRPFLADWALVERRLADVSAVMDSFLTMMVPGRLHVKHRLVSDVSATKIPHIWLMLSTKMPVVFDRKASAAHQDWARLRWFVTIQPATSEQYELRFRLLDPRTQQECAQCGVIPVAACTFDVRNLLPNRSYKFTIKRAETSTLVYEPWRDSLTLHTKPEPLEGPALSHSV

SEQ ID NO: 2016 - DNA, 10013 bp, Homo sapiens
atcgaaactgagagctcctgggcaggctcggcagggcaggcagctccaggagggcttcgaaccgtggccaacagttccagtggactgcgtggacccgtgagctcaggagcctcagacgcctccctggagagccaagctggtgttcgaggtggcgcctccagggtccaccctgctgcccaacagccccgcggccaccagagggccgtccctggcccggctgtgtgccctggtggacctgtgtctgggctgctcccgctgcacccagcggctcaatgaaagcacctacgtcctccgtagggtggagcatgactgctcccgcgagatcctgctggcccgctttaagcaggccaccaagagcaaggtctggcgcgtggtgggctgccggcccaccttcccaaggcccctgtgctaccaagtctgccactactacagccctgggctcggctgccggcgccaccgaaaccggtgcacctttgcccgcagtcgcgaggaggccctggtctggaccttcgagcgtcagcacaacctccagcgcctatggctgaaggcggaggtgcagggcagcggggcccagggaggggcaggccgggcggccgacgccatccttacggagtttggcggccgcttcgagctgctttgctccctctgcttcaggcgctgtcccccatgcatctgtcgcgtggacccccaggggcagtgccctgagcacggagcctgcccctccctcctggcccacgtgagcgccgagggccgccgcaagcaacagtttgtggtggtgaggccgcggccccgggccggccagcctcctgcctactgcaggtttgtggggcgtgggcagccgtgctggcgtggggagtcccgctgccagtttgcacacagcgccgtggagatggctgtgtgggaggccgagcagctgggtggcctccagcggggggacctgctcacaccccctgcccctgatggcgacgggcgcacggccccccttggccagccccctggggcccagctgtactgcccggcctgcttggtcacctgccactctcaggaggccttcgagaaccactgcgcatcctcggagcacgcacagatggtggccttcgaccaggccctgccctgggagcaccgttccccacccccgggactctccaagttcgagctctgcccaaagcctgacctctgtgagtatggggacgcctgcaccaaggcacactcagcacaggagctgcaggagtgggtccggcgcacgcaggctgtggagctgcgggggcaggcggcctggcaggacgggctggtgccctaccaggagcggctgctggccgagtaccagcgcagcagcagtgaggtccttgtgctggcagagacccttgatggagtgcgtgtcacctgcaaccagcccctgatgtaccaggcccaggagaggaagacccagtacagctggacgtttgccgtccactctgaggagcccctgctacacgcggccctgctgaagcaggagccaggagccgacttctctctggtggctcccggcctcccgccaggccggctctacgcacggggtgagcgcttccgtgtgcccagctccactgccgacttccaggtgggagtgcgtgtgcaggccgcctcgttcggcacctttgagcaatgggtggtcttcgactttggccgccggccggtgctgctacaaaagctggggctgcagctgggccaggggcgtcgcccaggaccctgcaggaatctggcgctcggccaccctgaggagatggagcgctggcacactggcaaccgccacgtggtgcctggcgtggagcggacggccgagcagacggccctgatggccaagtacaagggccctgccctggccctggagtccaaccacagcagcgtggcctcgggccccatctcgccaaccaactatcggcagaggatgcaccagtttctctatgaggaggaggcggctcagcagcagctggtggccaagctgaccctgcggggccaggtgttcctgaagacggcattgcagacgccagcgctgaacatgctcttcgcgcctccgggagcactgtacgcagaggtccccgtcccctcctccctgatgccagacacagaccagggcttcctgctgggccgggcggtcagcacagccctggtggcccctgtacctgcacccgacaatacggtgttcgaggtgcggctggagaggcgggccagctcagagcaggcgctgtggctgctgcttccggcccgctgctgcttggccctggggctgcagcctgaggcccgcctggtcctggaggtgcagttccagattgacccgatgaccttccgcctctggcaccaggcagtggacacactgcctgaggagcagctggtggtgcccgacttgcccacctgcgccctgcccagaccttggtctgtcccacccttgcggcgtggcaaccgcaagcaggagctggccgtggcgctcatcgcgggctggggccctggggatgggaggcgtgtccccccgctactcatctatggcccctttggcaccggcaagacctacacgctggccatggcctccctggaggtcatccggaggcctgaaaccaaggtgctcatctgcacacacaccaacagtgccgccgacatctacatccgggagtatttccacagccacgtcagcggcggccaccccgaggccactcctctccgtgtgatgtacacggaccggccgctgagccagacggacccagtcacgctgcagtactgttgcctgaccgacgaccgccaggctttccgcccgcccacacgggcagagctggcgcggcaccgcgtggtggtcaccaccacctcccaggcccgtgagctcagggtgccggtcggcttcttctcccacattctcatcgatgaggcggcccagatgctggagtgcgaggccctcaccccgctggcctacgcctcgcacggcacccgcctcgtgctggcgggcgaccacatgcaggtcacaccccggctgttcagtgtggccagggcccgggcggccgagcacacgctgctgcaccgcctcttcctgtgctaccagcaggagactcacgaggtggcgcggcagagccgcctggtcttccacgagaactaccgctgcacggacgccattgtcagcttcatctcgcggcacttctacgtggccaagggcaaccccatccacgccaggggcaaggttccgccccacccccggcactacccgctcatgttctgccacgtggcgggcaacccagaccgggacatgtccatggcgtcctggctgaatctggctgagattgcgcaggtcgtcgagaaggtgcaggaggcctacaacacctggcccagctgctggggcggccgtgagcagaggtgcatctgtgtcgtttcccacggtgcccaggtcagtgcactgaggcaggagctgaggaggcgggacctaggccaggtgtctgtcggcagttttgagatcctgccagggcggcagttccgggtcgtggtgctcagcactgtgcacacctgccagagcctgctcagccctggggcactggcccctgagttcttcaccgacgcccgcgtgctcaacaccgtcctgacccgcgcccagtcccagctggtggtagtgggggacgccgtggccctctgctccttcggggcctgcggcaagctctgggagagcttcatccgtgagtgcgtggagcggcacagtgtctgccccgagggcctgtccatggagcaggtcgagcagggtgtggcgcagagacggcgctggcctccccgaggcacacaggctggggcagcggggaactgggaggctgccccagagccagtaggggacctggccgaggagcaggcggctgtggtgacggccatggtgaaggcagagccgggagatgaggctctgagcccagcatcccgtgacatcacggcaaccacagcgcagacggaggctgcggcagcaccagcaggagacgcagtgaaggaagacgtggtgcccggggcctgtgcggcaggagcggctgctgcagcgggcgtggagtccacggaggctgaggatgcagaggctgacttctggccgtgggacggggagctcaacgctgacgacgccatcctacgggagcttctggacgagagccagaaggtgatggtgaccgtcggggaggacgggctgctggacaccgtcgccaggcccgagtccctgcagcaggcccggctgtacgagaacctgcccccggctgcgctacggaagctgctgcgcgcggagcccgagcggtaccgccactgctctttcgtgccagagaccttcgagcgggcgtcagccatcccgctggacgatgcctcctcgggccccatccaggtcaggggccgcctggactgtgggatggccttcgccggggatgaggtgctggtgcagctcctttcgggagacaaggcgcccgaggggcggcttcggggccgcgtgctgggcgtgctgaagaggaagaggcacgagctggcgtttgtgtgccgcatggacacgtgggacccgcgcatcatggtccccatcaatggctccgtgaccaagatcttcgtggccgagctgaaggacccatcgcaggtccccatctacagcctccggaagggccggctgcagcgtgtggggcttgagaggctcaccgccgaggcccggcacagccggctcttctgggtccaaattgtcctgtggcggcaaggcttctactacccgctgggcatcgtccgggaggtgctgcctgaggccagcacctgggagcagggcctccgcatcctcggcctggagtacagcttgagggtgcccccgtcggaccaggccaccatcaccaaggtgctgcagaaataccacacggagcttggccgggttgccggccgccgagaggactgccgcgccttcttgaccttcactgtggacccccagggcgcctgcaacctcgatgatgccctcagtgtccgagacctgggtcccaggtgcgaggtggctgtgcacatcactgatgtggccagcttcgtgcccagggacggggtgctggacgtggaggcgcgaaggcagggcgctgcgttctatgcccccggcagggagccagtgcccatgctgccggccagcctctgccaggacgtcctcagcctcctgcctggccgggaccgcctggccatctccctgttcctcaccatggagaaggccagtggccagctgaagagcctgcgctttgcaccctccgtggtccagtctgaccgccagctgtcctacgaggaggcggaggaggtgatcaggcagcacccgggtgccggccgtgagctgccggcccgcctggactccgtggacgcctgcgtcgtggccgcgtgctacttctctcggctgctgcgccggcaccgcctgcggtccgactgcttctatgagcagccggacgaggacggcaccctgggcttccgcgcggcccacatcatggtgaaggagtacatgattcagtttaataggctcgtggctgagttcctggtgggcagcgagtgcacgcggacggtcacgcctctgcggtggcagccagcaccccgcagccagcagctcaaggccctgtgtgagaagcatggggaccgggtgcccctgtcactgcacctcggccaccacctgcacggcggcgggggcagtccccccgacacgcggctgcacctcctggcctccctctggaagcaggtccagtttgctgcccgcacccaggactacgaacagatggtggacttggtcaccacggacgacatgcacccattcctggctcctgcaggccgcgacctccgcaaggccctggagcgctcggcgttcggccgctgcgcccggggccaccagcagcagggcggccactactcgctgcaggtggactggtacacgtgggccacctcgcccatccgcaggtacctggacgtggtgttgcagcggcagatcctgctggcgctgggccatgggggctctgcctactctgccagggacatcgatgggctctgccaggccttcagcctccagcacgcacttgcccagagctatcagcggcgggcgcgcagcctgcacctggccgtgcagctcaaggcccagcctctggacaagctgggcttcgtggtggacgtggaggcgggctcccgctgcttccggctgctcttccccagcaaccgggagacgctgcctgacccctgccccgtcccctacggctccctgcagctggccgagcacccccacgccctggcaggccggccgggcctgcggctcctgtggcggcgccgtgtctactcagcgcagggatccagcccgcccctgccactgcctggcactgtgccggacccacacaccctggccgtggagacggccctgtggaagcagctgctggagctggtggagctgcagcgctggccggaggcggctgctctcatccaggagaagggcgaggcgtcccagcggcgggagctggtgcaggtgcagcggagccactgtggccatttcctggaggtggcccgggagctgggcagtggggacaccctgcaggtgcagctcggcaccagcctgcagcacggcttcctggtaccgagccctcagctctggacggtggcaccgggcttcagcctctgcctggagcacgtggagcggcccggagactgcttctcaggccgtgtgtaccgggccccgagggaccggtaccgcgacgtggatgagtacgcctgcgtgtgggaaccattctgcgccctggagtcggccaccggcgcggttgccgagaatgactccgtcacacttcagcacctgagtgtctcctgggaggcgtcacggacgccgcaggggcagctgcagggcgccttccgcctggaggccgccttcctcgaggagaactgtgccgacatcaacttcagctgctgctacctctgcatccggctcgaggggctgccggctcccacggccagcccacgccctgggcccagcagcctcggccctggcctgaatgttgaccccggcacgtatacctgggtggcccacgggcagacgcaggactgggaccaggagcgccgggcagaccggcaggaggctcccagacgggtgcacctcttcgtccaccacatgggcatggagaaggttccggaagaggtgctgaggccgggcaccctgttcaccgttgagctgctgcccaagcagcttcctgatctccgcaaggaggaagccgtgcgtggactagaggaggcgtccccgctggtcaccagcatcgcactgggccggcctgtcccgcagcccctctgcagagtgatccccagcaggttcctggagcggcagacctacaacatccccggaggccgccacaagctgaaccccagccagaacgtggcggtcagggaggctctggagaagcctttcacggtcattcagggcccaccaggtacagggaagacgatcgtgggcctccacatcgtattctggtttcataaatcaaaccaggagcaggtgcagcccggaggccccccccgtggggagaagcggctggggggtccctgcatcttgtactgcggcccctccaacaagtcggtggatgtcctggcaggactgctcctgagaaggatggagctgaagcccctccgtgtgtacagtgagcaggctgaggccagcgagttcccagtgccgcgtgtgggcagcaggaagctgctcaggaagagcccccgggaggggaggccgaaccagagcctcaggagcatcaccctgcaccaccggatccggcaggcccccaacccttactcgtcggaaatcaaggcctttgacacccggctgcagagaggggagctcttctccagggaggacctggtctggtacaagaaggtcttgtgggaggctcggaagttcgagctggaccggcatgaggtcatcctctgcacctgctcctgtgcagcctctgccagcctcaaaatcctggacgtgaggcagatccttgttgacgaggcaggcatggccacggaacctgaaaccctcatccccctggtgcagttcccacaggccgagaaggtggttcttctcggagaccacaagcagctgcggcctgtggtcaagaatgagcggctgcaaaacctgggtctggaccggtctctgttcgagcggtaccacgaggacgcacatatgctggacactcagtaccgcatgcatgagggcatctgtgccttcccctctgtggcgttctacaagagcaagctgaagacgtggcagggcctgaggaggccgcccagtgtcctgggccacgctggcaaggagagctgccctgtcatctttggccacgtgcagggccacgagcggagcctgctggtgtccacggacgaagggaatgagaactccaaggccaacctggaggaggtggctgaggtggtccgtatcaccaagcagctgaccctggggaggaccgtagagccccaggacatcgccgtcctcacgccctacaacgcgcaggcctctgagatcagcaaggcccttcggcgagagggcatcgccggggtggccgtgtcctccatcaccaagagccaggggagcgagtggcgctatgtgctggtgagcaccgtccgcacctgtgccaagagcgacctggaccagcggcccaccaagagctggctcaagaagtttctgggcttcgttgtggaccccaaccaagtgaatgtggctgtcacgcgggcccaggaggggctctgcctgatcggagaccacctccttctgcgctgctgccccctctggcgtagcctcctggacttctgcgaggctcagcagaccctcgtgcctgccggccaggtgcgcgtctgcaggaggccaactatgccttcctgaagagccctctccacctgcaaggtgccaggactgggagggaaagtccagggcccccccaccctccccaccaccctccgccatcagcctgcctgggccagcctgcctcctggcctcaggatctccctggggcaggaagtgggtggacttggaggaggaacggcaagggccggtccccacactcttgctcctcctgggcatctggggacaggaacacctctcagggtggccaagaggggcttccttgggaccagtgcaaggaagttctgctgtccctgggaagtctcagaaccaggaaggaaaccctgtggaggctgccctttgacctttggacgccacctgtaatcactctggatggtgtctgtggagttcaggtttattttctatttaaatgaactaaaagccagcatcctgccgggcgtggtggctcacgcccataatccagcactttgggaagccgaggcgggcagatcacctgaggtcaggagttcgagaccatcctggccaacatggtgaaaccccgtctccactaaaaatacaaaattagctgggcgtggtggcgggcgcctgtaatcccagctacttgggaggctgaggcaggagaatcgcttgactccaggaggcgcaggctgcagtgagctctgatggtaccactgcactccagcctgggtgacagagcgagaccctgtcttaaaaaaaaaaacaaaacaaaaccagcatctgttactggaacagagacctcagcccaagctcaggacaaggaggcctccctgggagagggggcctttctcccaccatcaccgcctgtgtccttcaggggctgctggagggcagcccaaagccaggggcccaccccgccccaccccaccccaccccaccctctgaaatgtgaaaagcctgcactcttcctgtgggctgcgcagtgggctcgggggttggggggtgccggggcgatgcttccaccctggactgagtgttcggggcagcctgctcggctgtatgtttctcgcacgctcacccgcttcagtgcggctctgtccctgctgccgcctccagtcctgagggaggggcttgccccaccttctacattccaatttttatatctttgaattatgtgattagatattaatttaatgataaaaccactctgaaagctcttctcaaaaaaaaaaaaaaa

SEQ ID NO: 2017 - protein, 2649 aa, Homo sapiens
MAVWEAEQLGGLQRGDLLTPPAPDGDGRTAPLGQPPGAQLYCPACLVTCHSQEAFENHCASSEHAQMVAFDQALPWEHRSPPPGLSKFELCPKPDLCEYGDACTKAHSAQELQEWVRRTQAVELRGQAAWQDGLVPYQERLLAEYQRSSSEVLVLAETLDGVRVTCNQPLMYQAQERKTQYSWTFAVHSEEPLLHAALLKQEPGADFSLVAPGLPPGRLYARGERFRVPSSTADFQVGVRVQAASFGTFEQWVVFDFGRRPVLLQKLGLQLGQGRRPGPCRNLALGHPEEMERWHTGNRHVVPGVERTAEQTALMAKYKGPALALESNHSSVASGPISPTNYRQRMHQFLYEEEAAQQQLVAKLTLRGQVFLKTALQTPALNMLFAPPGALYAEVPVPSSLMPDTDQGFLLGRAVSTALVAPVPAPDNTVFEVRLERRASSEQALWLLLPARCCLALGLQPEARLVLEVQFQIDPMTFRLWHQAVDTLPEEQLVVPDLPTCALPRPWSVPPLRRGNRKQELAVALIAGWGPGDGRRVPPLLIYGPFGTGKTYTLAMASLEVIRRPETKVLICTHTNSAADIYIREYFHSHVSGGHPEATPLRVMYTDRPLSQTDPVTLQYCCLTDDRQAFRPPTRAELARHRVVVTTTSQARELRVPVGFFSHILIDEAAQMLECEALTPLAYASHGTRLVLAGDHMQVTPRLFSVARARAAEHTLLHRLFLCYQQETHEVARQSRLVFHENYRCTDAIVSFISRHFYVAKGNPIHARGKVPPHPRHYPLMFCHVAGNPDRDMSMASWLNLAEIAQVVEKVQEAYNTWPSCWGGREQRCICVVSHGAQVSALRQELRRRDLGQVSVGSFEILPGRQFRVVVLSTVHTCQSLLSPGALAPEFFTDARVLNTVLTRAQSQLVVVGDAVALCSFGACGKLWESFIRECVERHSVCPEGLSMEQVEQGVAQRRRWPPRGTQAGAAGNWEAAPEPVGDLAEEQAAVVTAMVKAEPGDEALSPASRDITATTAQTEAAAAPAGDAVKEDVVPGACAAGAAAAAGVESTEAEDAEADFWPWDGELNADDAILRELLDESQKVMVTVGEDGLLDTVARPESLQQARLYENLPPAALRKLLRAEPERYRHCSFVPETFERASAIPLDDASSGPIQVRGRLDCGMAFAGDEVLVQLLSGDKAPEGRLRGRVLGVLKRKRHELAFVCRMDTWDPRIMVPINGSVTKIFVAELKDPSQVPIYSLRKGRLQRVGLERLTAEARHSRLFWVQIVLWRQGFYYPLGIVREVLPEASTWEQGLRILGLEYSLRVPPSDQATITKVLQKYHTELGRVAGRREDCRAFLTFTVDPQGACNLDDALSVRDLGPRCEVAVHITDVASFVPRDGVLDVEARRQGAAFYAPGREPVPMLPASLCQDVLSLLPGRDRLAISLFLTMEKASGQLKSLRFAPSVVQSDRQLSYEEAEEVIRQHPGAGRELPARLDSVDACVVAACYFSRLLRRHRLRSDCFYEQPDEDGTLGFRAAHIMVKEYMIQFNRLVAEFLVGSECTRTVTPLRWQPAPRSQQLKALCEKHGDRVPLSLHLGHHLHGGGGSPPDTRLHLLASLWKQVQFAARTQDYEQMVDLVTTDDMHPFLAPAGRDLRKALERSAFGRCARGHQQQGGHYSLQVDWYTWATSPIRRYLDVVLQRQILLALGHGGSAYSARDIDGLCQAFSLQHALAQSYQRRARSLHLAVQLKAQPLDKLGFVVDVEAGSRCFRLLFPSNRETLPDPCPVPYGSLQLAEHPHALAGRPGLRLLWRRRVYSAQGSSPPLPLPGTVPDPHTLAVETALWKQLLELVELQRWPEAAALIQEKGEASQRRELVQVQRSHCGHFLEVARELGSGDTLQVQLGTSLQHGFLVPSPQLWTVAPGFSLCLEHVERPGDCFSGRVYRAPRDRYRDVDEYACVWEPFCALESATGAVAENDSVTLQHLSVSWEASRTPQGQLQGAFRLEAAFLEENCADINFSCCYLCIRLEGLPAPTASPRPGPSSLGPGLNVDPGTYTWVAHGQTQDWDQERRADRQEAPRRVHLFVHHMGMEKVPEEVLRPGTLFTVELLPKQLPDLRKEEAVRGLEEASPLVTSIALGRPVPQPLCRVIPSRFLERQTYNIPGGRHKLNPSQNVAVREALEKPFTVIQGPPGTGKTIVGLHIVFWFHKSNQEQVQPGGPPRGEKRLGGPCILYCGPSNKSVDVLAGLLLRRMELKPLRVYSEQAEASEFPVPRVGSRKLLRKSPREGRPNQSLRSITLHHRIRQAPNPYSSEIKAFDTRLQRGELFSREDLVWYKKVLWEARKFELDRHEVILCTCSCAASASLKILDVRQILVDEAGMATEPETLIPLVQFPQAEKVVLLGDHKQLRPVVKNERLQNLGLDRSLFERYHEDAHMLDTQYRMHEGICAFPSVAFYKSKLKTWQGLRRPPSVLGHAGKESCPVIFGHVQGHERSLLVSTDEGNENSKANLEEVAEVVRITKQLTLGRTVEPQDIAVLTPYNAQASEISKALRREGIAGVAVSSITKSQGSEWRYVLVSTVRTCAKSDLDQRPTKSWLKKFLGFVVDPNQVNVAVTRAQEGLCLIGDHLLLRCCPLWRSLLDFCEAQQTLVPAGQVRVCRRPTMPS

SEQ ID NO: 2018 - DNA, 7507 bp, Homo sapiens
tgctcacttctgacagccagacaagggctgtgctcaggggcagctcggctgggcacacagtaggtgctttagcggacagcactgaggcccccagcaagaagcccatgagctcctccccctcccgcagtgccgccgacatctacatccgggagtatttccacagccacgtcagcggcggccaccccgaggccactcctctccgtgtgatgtacacggaccggccgctgagccagacggacccagtcacgctgcagtactgttgcctgaccgacgaccgccaggctttccgcccgcccacacgggcagagctggcgcggcaccgcgtggtggtcaccaccacctcccaggcccgtgagctcagggtgccggtcggcttcttctcccacattctcatcgatgaggcggcccagatgctggagtgcgaggccctcaccccgctggcctacgcctcgcacggcacccgcctcgtgctggcgggcgaccacatgcaggtcacaccccggctgttcagtgtggccagggcccgggcggccgagcacacgctgctgcaccgcctcttcctgtgctaccagcaggagactcacgaggtggcgcggcagagccgcctggtcttccacgagaactaccgctgcacggacgccattgtcagcttcatctcgcggcacttctacgtggccaagggcaaccccatccacgccaggggcaaggttccgccccacccccggcactacccgctcatgttctgccacgtggcgggcaacccagaccgggacatgtccatggcgtcctggctgaatctggctgagattgcgcaggtcgtcgagaaggtgcaggaggcctacaacacctggcccagctgctggggcggccgcgagcagaggtgcatctgtgtcgtttcccacggtgcccaggtcagtgcactgaggcaggagctgaggaggcgggacctaggccaggtgtctgtcggcagttttgagatcctgccagggcggcagttccgggtcgtggtgctcagcactgtgcacacctgccagagcctgctcagccctggggcactggcccctgagttcttcaccgacgcccgcgtgctcaacaccgtcctgacccgcgcccagtcccagctggtggtagtgggggacgccgtggccctctgctccttcggggcctgcggcaagctctgggagagcttcatccgtgagtgcgtggagcggcacagtgtctgccccgagggcctgtccatggagcaggtcgagcagggtgtggcgcagagacggcgctggcctccccgaggcacacaggctggggcagcggggaactgggaggctgccccagagccagtaggggacctggccgaggagcaggcggctgtggtgacggccatggtgaaggcagagccgggagatgaggctctgagcccagcatcccgtgacatcacggcaaccacagcgcagacggaggctgcggcagcaccagcaggagacgcagtgaaggaagacgtggtgcccggggcctgtgcggcaggagcggctgctgcagcgggcgtggagtccacggaggctgaggatgcagaggctgacttctggccgtgggacggggagctcaacgctgacgacgccatcctacgggagcttctggacgagagccagaaggtgatggtgaccgtcggggaggacgggctgctggacactgtcgccaggcccgagtccctgcagcaggcccggctgtacgagaacctgcccccggctgcgctacggaagctgctgcacgcggagcccgagcggtaccgccactgctctttcgtgccagagaccttcgagcgggcgtcagccatcccgctggacgatgcctcctcgggccccatccaggtcaggggccgcctggactgtgggatggccttcgccggggatgaggtgctggtgcagctcctttcgggagacaaggcgcccgaggggcggcttcggggccgcgtgctgggcgtgctgaagaggaagaggcacgagctggcgtttgtgtgccgcatggacacgtgggacccgcgcatcatggtccccatcaatggctccgtgaccaagatcttcgtggccgagctgaaggacccatcgcaggtccccatctacagcctccggaagggccggctgcagcgtgtggggcttgagaggctcaccgccgaggcccggcacagccggctcttctgggtccaaattgtcctgtggcggcaaggcttctactacccgctgggcatcgtccgggaggtgctgcctgaggccagcacctgggagcagggcctccgcatcctcggcctggagtacagcttgagggtgcccccgtcggaccaggccaccatcaccaaggtgctgcagaaataccacacggagcttggccgggttgccggccgccgagaggactgccgcgccttcttgaccttcactgtggacccccagggcgcctgcaacctcgatgatgccctcagtgtccgagacctgggtcccaggtgcgaggtggctgtgcacatcactgatgtggccagcttcgtgcccagggacggggtgctggacgtggaggcgcgaaggcagggcgctgcgttctatgcccccggcagggagccagtgcccatgctgccggccagcctctgccaggacgtcctcagcctcctgcctggccgggaccgcctggccatctccctgttcctcaccatggagaaggccagtggccagctgaagagcctgcgctttgcaccctccgtggtccagtctgaccgccagctgtcctacgaggaggcggaggaggtgatcaggcagcacccgggtgccggccgtgagctgccggcccgcctggactccgtggacgcctgcgtcgtggccgcgtgctacttctctcggctgctgcgccggcaccgcctgcggtccgactgcttctatgagcagccggacgaggacggcaccctgggcttccgcgcggcccacatcatggtgaaggagtacatgattcagtttaataggctcgtggctgagttcctggtgggcagcgagtgcacgcggacggtcacgcctctgcggtggcagccagcaccccgcagccagcagctcaaggccctgtgtgagaagcatggggaccgggtgcccctgtcactgcacctcggccaccacctgcacggcggcgggggcagtccccccgacacgcggctgcacctcctggcctccctctggaagcaggtccagtttgctgcccgcacccaggactacgaacagatggtggacttggtcaccacggacgacatgcacccattcctggctcctgcaggccgcgacctccgcaaggccctggagcgctcggcgttcggccgctgcgcccggggccaccagcagcagggcggccactactcgctgcaggtggactggtacacgtgggccacctcgcccatccgcaggtacctggacgtggtgttgcagcggcagatcctgctggcgctgggccatgggggctctgcctactctgccagggacatcgatgggctctgccaggccttcagcctccagcacgcacttgcccagagctatcagcggcgggcgcgcagcctgcacctggccgtgcagctcaaggcccagcctctggacaagctgggcttcgtggtggacgtggaggcgggctcccgctgcttccggctgctcttccccagcaaccgggagacgctgcctgacccctgccccgtcccctacggctccctgcagctggccgagcacccccacgccctggcaggccggccgggcctgcggctcctgtggcggcgccgtgtctactcagcgcagggatccagcccgcccctgccactgcctggcactgtgccggacccacacaccctggccgtggagacggccctgtggaagcagctgctggagctggtggagctgcagcgctggccggaggcggctgctctcatccaggagaagggcgaggcgtcccagcggcgggagctggtgcaggtgcagcggagccactgtggccatttcctggaggtggcccgggagctgggcagtggggacaccctgcaggtgcagctcggcaccagcctgcagcacggcttcctggtaccgagccctcagctctggacggtggcaccgggcttcagcctctgcctggagcacgtggagcggcccggagactgcttctcaggccgtgtgtaccgggccccgagggaccggtaccgcgacgtggatgagtacgcctgcgtgtgggaaccattctgcgccctggagtcggccaccggcgcggttgccgagaatgactccgtcacacttcagcacctgagtgtctcctgggaggcgtcacggacgccgcaggggcagctgcagggcgccttccgcctggaggccgccttcctcgaggagaactgtgccgacatcaacttcagctgctgctacctctgcatccggctcgaggggctgccggctcccacggccagcccacgccctgggcccagcagcctcggccctggcctgaatgttgaccccggcacgtatacctgggtggcccacgggcagacgcaggactgggaccaggagcgccgggcagaccggcaggaggctcccagacgggtgcacctcttcgtccaccacatgggcatggagaaggttccggaagaggtgctgaggccgggcaccctgttcaccgttgagctgctgcccaagcagcttcctgatctccgcaaggaggaagccgtgcgtggactagaggaggcgtccccgctggtcaccagcatcgcactgggccggcctgtcccgcagcccctctgcagagtgatccccagcaggttcctggagcggcagacctacaacatccccggaggccgccacaagctgaaccccagccagaacgtggcggtcagggaggctctggagaagcctttcacggtcattcagggcccaccaggtacagggaagacgatcgtgggcctccacatcgtattctggtttcataaatcaaaccaggagcaggtgcagcccggaggccccccccgtggggagaagcggctggggggtccctgcatcttgtactgcggcccctccaacaagtcggtggatgtcctggcaggactgctcctgagaaggatggagctgaagcccctccgtgtgtacagtgagcaggctgaggccagcgagttcccagtgccgcgtgtgggcagcaggaagctgctcaggaagagcccccgggaggggaggccgaaccagagcctcaggagcatcaccctgcaccaccggatccggcaggcccccaacccttactcgtcggaaatcaaggcctttgacacccggctgcagagaggggagctcttctccagggaggacctggtctggtacaagaaggtcttgtgggaggctcggaagttcgagctggaccggcatgaggtcatcctctgcacctgctcctgtgcagcctctgccagcctcaaaatcctggacgtgaggcagatccttgttgacgaggcaggcatggccacggaacctgaaaccctcatccccctggtgcagttcccacaggccgagaaggtggttcttctcggagaccacaagcagctgcggcctgtggtcaagaatgagcggctgcaaaacctgggtctggaccggtctctgttcgagcggtaccacgaggacgcacatatgctggacactcagtaccgcatgcatgagggcatctgtgccttcccctctgtggcgttctacaagagcaagctgaagacgtggcagggcctgaggaggccgcccagtgtcctgggccacgctggcaaggagagctgccctgtcatctttggccacgtgcagggccacgagcggagcctgctggtgtccacggacgaagggaatgagaactccaaggccaacctggaggaggtggctgaggtggtccgtatcaccaagcagctgaccctggggaggaccgtagagccccaggacatcgccgtcctcacgccctacaacgcgcaggcctctgagatcagcaaggcccttcggcgagagggcatcgccggggtggccgtgtcctccatcaccaagagccaggggagcgagtggcgctatgtgctggtgagcaccgtccgcacctgtgccaagagcgacctggaccagcggcccaccaagagctggctcaagaagtttctgggcttcgttgtggaccccaaccaagtgaatgtggctgtcacgcgggcccaggaggggctctgcctgatcggagaccacctccttctgcgctgctgccccctctggcgtagcctcctggacttctgcgaggctcagcagaccctcgtgcctgccggccaggtgcgcgtctgcaggaggccaactatgccttcctgaagagccctctccacctgcaaggtgccaggactgggagggaaagtccagggcccccccaccctccccaccaccctccgccatcagcctgcctgggccagcctgcctcctggcctcaggatctccctggggcaggaagtgggtggacttggaggaggaacggcaagggccggtccccacactcttgctcctcctgggcatctggggacaggaacacctctcagggtggccaagaggggcttccttgggaccagtgcaaggaagttctgctgtccctgggaagtctcagaaccaggaaggaaaccctgtggaggctgccctttgacctttggacgccacctgtaatcactctggatggtgtctgtggagttcaggtttattttctatttaaatgaactaaaagccagcatcctgccgggcgtggtggctcacgcccataatccagcactttgggaagccgaggcgggcagatcacctgaggtcaggagttcgagaccatcctggccaacatggtgaaaccccgtctccactaaaaatacaaaattagctgggcgtggtggcgggcgcctgtaatcccagctacttgggaggctgaggcaggagaatcgcttgactccaggaggcgcaggctgcagtgagctctgatggtaccactgcactccagcctgggtgacagagcgagaccctgtcttaaaaaaaaaaacaaaacaaaaccagcatctgttactggaacagagacctcagcccaagctcaggacaaggaggcctccctgggagagggggcctttctcccaccatcaccgcctgtgtccttcaggggctgctggagggcagcccaaagccaggggcccaccccgccccaccccaccccaccccaccctctgaaatgtgaaaagcctgcactcttcctgtgggctgcgcagtgggctcgggggttggggggtgccggggcgatgcttccaccctggactgagtgttcggggcagcctgctcggctgtatgtttctcgcacgctcacccgcttcagtgcggctctgtccctgctgccgcctccagtcctgagggaggggcttgccccaccttctacattccaatttttatatctttgaattatgtgattagatattaatttaatgataaaaccactctgaaagctcttctca

SEQ ID NO: 2019 - protein, 2080 aa, Homo sapiens
MSSSPSRSAADIYIREYFHSHVSGGHPEATPLRVMYTDRPLSQTDPVTLQYCCLTDDRQAFRPPTRAELARHRVVVTTTSQARELRVPVGFFSHILIDEAAQMLECEALTPLAYASHGTRLVLAGDHMQVTPRLFSVARARAAEHTLLHRLFLCYQQETHEVARQSRLVFHENYRCTDAIVSFISRHFYVAKGNPIHARGKVPPHPRHYPLMFCHVAGNPDRDMSMASWLNLAEIAQVVEKVQEAYNTWPSCWGGREQRCICVVSHGAQVSALRQELRRRDLGQVSVGSFEILPGRQFRVVVLSTVHTCQSLLSPGALAPEFFTDARVLNTVLTRAQSQLVVVGDAVALCSFGACGKLWESFIRECVERHSVCPEGLSMEQVEQGVAQRRRWPPRGTQAGAAGNWEAAPEPVGDLAEEQAAVVTAMVKAEPGDEALSPASRDITATTAQTEAAAAPAGDAVKEDVVPGACAAGAAAAAGVESTEAEDAEADFWPWDGELNADDAILRELLDESQKVMVTVGEDGLLDTVARPESLQQARLYENLPPAALRKLLHAEPERYRHCSFVPETFERASAIPLDDASSGPIQVRGRLDCGMAFAGDEVLVQLLSGDKAPEGRLRGRVLGVLKRKRHELAFVCRMDTWDPRIMVPINGSVTKIFVAELKDPSQVPIYSLRKGRLQRVGLERLTAEARHSRLFWVQIVLWRQGFYYPLGIVREVLPEASTWEQGLRILGLEYSLRVPPSDQATITKVLQKYHTELGRVAGRREDCRAFLTFTVDPQGACNLDDALSVRDLGPRCEVAVHITDVASFVPRDGVLDVEARRQGAAFYAPGREPVPMLPASLCQDVLSLLPGRDRLAISLFLTMEKASGQLKSLRFAPSVVQSDRQLSYEEAEEVIRQHPGAGRELPARLDSVDACVVAACYFSRLLRRHRLRSDCFYEQPDEDGTLGFRAAHIMVKEYMIQFNRLVAEFLVGSECTRTVTPLRWQPAPRSQQLKALCEKHGDRVPLSLHLGHHLHGGGGSPPDTRLHLLASLWKQVQFAARTQDYEQMVDLVTTDDMHPFLAPAGRDLRKALERSAFGRCARGHQQQGGHYSLQVDWYTWATSPIRRYLDVVLQRQILLALGHGGSAYSARDIDGLCQAFSLQHALAQSYQRRARSLHLAVQLKAQPLDKLGFVVDVEAGSRCFRLLFPSNRETLPDPCPVPYGSLQLAEHPHALAGRPGLRLLWRRRVYSAQGSSPPLPLPGTVPDPHTLAVETALWKQLLELVELQRWPEAAALIQEKGEASQRRELVQVQRSHCGHFLEVARELGSGDTLQVQLGTSLQHGFLVPSPQLWTVAPGFSLCLEHVERPGDCFSGRVYRAPRDRYRDVDEYACVWEPFCALESATGAVAENDSVTLQHLSVSWEASRTPQGQLQGAFRLEAAFLEENCADINFSCCYLCIRLEGLPAPTASPRPGPSSLGPGLNVDPGTYTWVAHGQTQDWDQERRADRQEAPRRVHLFVHHMGMEKVPEEVLRPGTLFTVELLPKQLPDLRKEEAVRGLEEASPLVTSIALGRPVPQPLCRVIPSRFLERQTYNIPGGRHKLNPSQNVAVREALEKPFTVIQGPPGTGKTIVGLHIVFWFHKSNQEQVQPGGPPRGEKRLGGPCILYCGPSNKSVDVLAGLLLRRMELKPLRVYSEQAEASEFPVPRVGSRKLLRKSPREGRPNQSLRSITLHHRIRQAPNPYSSEIKAFDTRLQRGELFSREDLVWYKKVLWEARKFELDRHEVILCTCSCAASASLKILDVRQILVDEAGMATEPETLIPLVQFPQAEKVVLLGDHKQLRPVVKNERLQNLGLDRSLFERYHEDAHMLDTQYRMHEGICAFPSVAFYKSKLKTWQGLRRPPSVLGHAGKESCPVIFGHVQGHERSLLVSTDEGNENSKANLEEVAEVVRITKQLTLGRTVEPQDIAVLTPYNAQASEISKALRREGIAGVAVSSITKSQGSEWRYVLVSTVRTCAKSDLDQRPTKSWLKKFLGFVVDPNQVNVAVTRAQEGLCLIGDHLLLRCCPLWRSLLDFCEAQQTLVPAGQVRVCRRPTMPS

SEQ ID NO: 2020 - DNA, 4559 bp, Homo sapiens
gcgaggacttcttggagtgctttctgcacctgaaactcagttcagggattggggctggctttgagttcaggccaggagagacggaagaactggcaagccgggagcctgcgtccagggaagttgcttggaattccaggcccctcctgtcctcctgctctgagccccacgtggagggagtggctctgtgctttctacccaagggtttcggcttatccagtgggaaaaacgggtggagtgcgcttacaccgccctcggaaccagagcctggagtagcccttctgttgccgctcgtttttgtcaggaggtagcagtctgggactcaagggtgggtctttggagctgattagagatgcctttgtgagtgctatgttgtgtggatgtggagatgactccatccctgtgccctgccttgcttcctccaggacttgggaccctggaggactgacgctgctggcctgggcgtccccttccgctgagccatggcgactcccgacgtgagtgtgcacatggaggaggtggtggttgtgacaactccggacactgcagtggacggcagtggtgtggagggggtgaagaccgtgttggtgacgaccaacttggcccctcacgggggcgacctgacggaagataacatggagacagaaaatgcagcggcggcagctgccgcggccttcacagcctcctcccagctcaaggaagccgtgttagtgaagatggctgaagagggggagaacctggaagctgagattgtgtaccccatcacctgtggagacagcagagccaacctcatctggaggaagtttgtgtgtcccggcatcaatgtgaaatgtgttcagtacgacgagcatgtaatcagcccaaaggaatttgtgcacctggccgggaagtccaccctgaaggactggaagagagccatccgcatgaacggcatcatgctcaggaagatcatggactccggggaactggacttctaccagcacgacaaggtctgctccaacacctgccgcagcacaaagattgacctctcaggagcccgtgtgtccctgagcagccccacgtcggccgagtacattcccctcacgcccgccgcagccgacgtgaatgggtctcctgcgaccatcaccatagagacctgtgaagaccctggcgactggaccgcggccattggagatgacacatttaccttctggcgggggctgaaggacgccggcctgctggacgaggtcatccaggagttccaccaggagctggtggagaccatgagaggcctgcagcagcgggtccaggaccctcccctgcagcttcgagatgctgtacttctcaacaacatcgtgcagaacttcggcatgctggacctggtgaagaaggtgctggccagccacaagtgccagatggaccgctcgcgggagcagtacgcccgggacctggcagccctggagcagcagtgtgatgagcatcgtcgccgagccaaggagctgaagcacaagtcccagcacctcagcaacgtgctcatgacgctgacgccggtctccctgccaccgcctgtgaagcggccccggcttgcacgtgccacatcaggaccggccgccatggcctcgcaggtgctcacccagtctgcccagctggcgcttggcccgggcgtgcccgtcccccagctgaccagcgtgccccttggtaaagtggtgtccaccctgccgtccaccgtcctgggcaagggttcccttcaggcgccccccgccagctccccggcctccccgctgctcgggggatacacagtcttggcctcttccggctccacctaccccagcacagtggagatccacccggacgcgtccagcctcacggtcctgagcacggccgccgtgcaggacggtagcacggtgttcaaggtggtcagcccgctgcagctgctcacgttgcctggcctgggccccaccctgcagaacgtggcccaggcctcgcctggctccagcacaattgtgacagtgcccgcaggggctgcccccgggcctgaggagcacacggccaccattgaggtggctgccatggcagaggaccacgagcggaagtagccgacaggagggcgaggcccctgggacggacagggctggctgtctctcagccgcggcagcagggagcgggcagaggccgcagggctggctcgggcaggtgggtcacgtggtctgcagaaccaaagagaggaatcgccaaaacaaatcacgagaagagagaaggggacagaacagcgagagcaacctggaaaaccggtcttcaggtcccacgtttcctcccccttttttcttgggaaatatatttttccatctgttgcttattaatactgtttacacattgggccttgatcaggagccaggtgggcgggggctagggggagcctgggtgcagcagagacagaggaagcagagccaggtgccgagcgcgaccctgcaggtgctggacgcggtgcagcaggtcacgaggcccccatgtctgcacccagccaggtccctggggacgttactaactcatgacttgggagctaagcccaagtgtgaaacctctggatcctatggatttggtttcttcccacagttttctgtaggtttagtgtggctggcgccccgttctcctccagttgggaacatgcacccggagcttggggtgcagatcctgatgggtgcctgcctcccccgcccccagccggtgctcaggtggcccaggggccgcacagacgaggcgtggtccaggcattgttgcacatgtactgagggtgtttttaagtgaattgcttagtaggcttctaggaagagtcagatttatagcattttcaaccaaaataatggtgagtgcctaggcttcccgagttagctctttgggtggcccctgagcccctgtgagtgcacttgaccgggtgcggaggtcctgggcagcctgtccctgagccggcccctcccaggggtctgagatccatgaggtgtgtccctagggcttcagtcctggggcagaggcataaacagaaccagtcactatggaggtcgaggattcccatgtgggcccttcagcttgggctgcttggccacggaacagcccttggctccctggcccccggcccccatgcagcccctgggctggcccttggtggtctctgtccaagggagagcccctgggtgttcaggaggctgccccgggtgggctgctcagggcagctgccgaaggtggagcccagagcctgtctggaagggctgtctgtggctgtcctgagacctggccttggactcacaaggaagaccaggctgaggcccctccaggccagggtcctggggcaggcatctcagggagcagccagcccaggcctcctgccgtctccaacagggcatgtcccgggaggaccctgagtgccagattcccctggacgctcctgctgattctgtcggcagttgaaggcccgtctgaggccccgcaatgcgagggtcctgtgtcccacttcactgctccgaagggaactggctggctgtccgtccagtgagcggcccagaccccacctctgcgccattgtcaccagggccctgtcctggctgccctcacccatgtcaagctactgaggctgtgtcttgtttgttttctctgttacatttttgtttgctgttgtcacagtcagctggtttcggcgtgatgttgaccttttgatgtacatactccgttttaaactcatttccactctagttgagttctgcagcatgcagcggtatgaccctacgggggtcaggagagccctgcggcccccacccaccagctcagaacctgtcactaatacagctgcctgtgaccctgggacccgcaaccttccagctgcttccctttgtcaaagtcacgagtgcgtctgccttgacagccctcgtcaacagaacttccagtgggttgtgggttcatttcctttctttttaagaacagggttgggaccttttctgcccctgccccttagctactgaggcatagggagaggaagttaatttcagagccatacaaaaataagccacaaccagcttcagaattaattcccaatcccccattccaccagggctgggagcccattcccagtgcttcccaaggccctcggggacatctaccgccaacccagctgcttctggcaggggctccaagccccagcgtggggaagggccctggagaagccctcatcctcatgggaaccacactgcagtgggtggggaaggttgttgtcagcaccgcccccggctcctccaggtcctgctggctcctcgggggcagggttccctggacctcccagttctgcgccttggggccagccagtactcagagaggaggaccttctcaaccacgtacagaacacgggttttcatggctgcctttggtttggttttctgagaagataggattggattggattttgcagagggtgagaacttctctgtgcctgctcagaggcgccctagggaagggccatgtttgagttttgctttgtatgttgttttgcaagtatctgcctggtactttgatttaaaataaaaacaattttcatagtt

SEQ ID NO: 2021 - protein, 530 aa, Homo sapiens
MATPDVSVHMEEVVVVTTPDTAVDGSGVEGVKTVLVTTNLAPHGGDLTEDNMETENAAAAAAAAFTASSQLKEAVLVKMAEEGENLEAEIVYPITCGDSRANLIWRKFVCPGINVKCVQYDEHVISPKEFVHLAGKSTLKDWKRAIRMNGIMLRKIMDSGELDFYQHDKVCSNTCRSTKIDLSGARVSLSSPTSAEYIPLTPAAADVNGSPATITIETCEDPGDWTAAIGDDTFTFWRGLKDAGLLDEVIQEFHQELVETMRGLQQRVQDPPLQLRDAVLLNNIVQNFGMLDLVKKVLASHKCQMDRSREQYARDLAALEQQCDEHRRRAKELKHKSQHLSNVLMTLTPVSLPPPVKRPRLARATSGPAAMASQVLTQSAQLALGPGVPVPQLTSVPLGKVVSTLPSTVLGKGSLQAPPASSPASPLLGGYTVLASSGSTYPSTVEIHPDASSLTVLSTAAVQDGSTVFKVVSPLQLLTLPGLGPTLQNVAQASPGSSTIVTVPAGAAPGPEEHTATIEVAAMAEDHERK

SEQ ID NO: 2022 - DNA, 3094 bp, Homo sapiens
gaaatgtgagcctgggtggccaaggacgccggagtggccgccttccccgcgcctgagcgcagtggggcgagacaaagagacctgggcccccagcgcagcccgtctcgggccacgggcgccccagctccgcggagtcccgcagtcgctggcccgggacgcgcccggcccgggctcccttggaaggctccctaggcaatggccgggtctctgctccacccggctctcaggagcgctgctctctccatctgatcgccctccatcctccccattccctccggttccgggctctcccttcgctccaagcctcaggccaccggcttggatggacgctccgaggctacccgtgcgtccaggggtcttgcttccgaagttggtcctgctctttgtctacgcagatgattgccttgctcagtgtggcaaagattgcaaatcttactgctgtgatggaaccacgccctactgttgctcctactacgcttatattgggaatatcctctcgggcactgcaattgcgggcattgtttttggaatagtatttatcatgggggtcattgctgggattgccatatgcatctgcatgtgcatgaagaaccacagggcgacccgcgtgggcatcctcaggacgactcacatcaacaccgtctcctcctatcctggaccaccaccctacggtcacgaccacgagatggaatactgtgcagacttgcctcctccatactcccccaccccacagggtccagcacagcgttctccaccccctccttatcctggaaacgcaaggaaataatctatctcccagaacagaacatgtgccaatgggcgatcttgcctggaataaaatgcctctactcagaaacaggcaggaaagaattgctccaaggaatactttttggggtcagataatgtgtcaggtggaatatccctgctaggagatataggatttctactctgctcaaagctgaccccatctggagtattaatgtttggttctatggaaccacattttaagagatctgctgatccacctaagcacattcagggaagagtaatgtaattgacaaaatatctgataatcatgttgtttaagggctaggtgaagaaagtttcagtattgatcctggaaaaaaagaagatctaagtaggatgggagaatgatttggcccacacaaggaagcaactttattctatatagctttaaaagtcagaactagaattgttcattctttcattcatcaataaatgtattttgagtgcctaagagtttactatgtgcctagcactgtttgaggtcctgatggaagttacaggacgggtactctggttttagtacaagaaagagcaatgactagattgctttgtgaagctcttggtagagacacgctccagaagggataacaaaatcaaatagtagatgggttcattgggcctcagaagttctgctcgtattttaggtgggtgtgaagtgaatttctatatgtccaggagtgaatacaacagaaagagttggatcttatttatttaattagggagttaaaacaagaccaaaaagactcaacagccgcttgaagccaagaactcttcaatgccagctactgccacctaaaaatcatctggctttatagtggatcagaataaaggttattctaactgtggggagaaaaaaaaaattgtatcaagttccacaggtagcagacacttcacttccaagtaaaagatgagaaatcaattattcccacaggattttaggtcagggagcaaaaatctcagaacttgaccatgaagatacacaacagactcgcaaaaataaagtgggaaatgaagttcagattcccttctgtagatttccttaaaactattatttttttcttcttcgtaaaattttgataatctgttctcttaaaaaagttaatgacacaattaagatactgacatcaaattgttgccttttaccaaaatgcaaattttatgaagtgcctacctttatatgtataaagcatttaataaataattctaatgtgccatattttgctgtgagtgaccttaacatttatatttttatatgaattgtttcatgtatttataaaaattgtatattgaacattggaaatagatgattagatttttgtgtcattttacaattaaatctaaaatgcttaatccaatatcatcatcaaaattcagtgaaatcccaaaacagtgccaagaattttgctgaatgaaacaatcaaacaaagcattttaaggtgtaagttatagtacctgtacttgcagataagaagcttactatatcattattataagtagcatatattactttcaaatacctatattagaaagatattgatctgactgaaatataacctacctgccagtaaggtccaaaggctgaatttgttttgaatgagttccttgatctttaagcactgatgattttcttatatatgaggatgcaaagcattcaagagtttcagcctgttctggtgaggggctccctgacttacataaagttttcagtgcaattttaatagtacatatgctttaatttatttttcttctgcgtgtggtcagacccaattacactgtggctaagactctcaaagtgccagggtttctgtgatgattctgagaatgctgaatacaaatataccttatattctttaaggaaaacggaaaggaaagatcagcagaaatagggttttctcatcttcaccatcaataaacatttattgcgtacctcctatattctgcaaattttccccaaatagaagccagttcagtccacaccatctcttctttgagttgtttatggcctcccttaaggcattttacaaacccataagcctacaatagatgagtatttttactatttgtattaagtgtcataatagcatcaatgtgcacattaccagtatagactgttggagttcactgattgttttcatagatgatgcttcttggggaaaaatagtataggatgtgaaagttttgaattacggttatttaaaaactaacatttgctatggccaaagtgtttacaataagcaataaagtgaaagaacctattataacacagattataaaaaaaaaaaaaaaa

SEQ ID NO: 2023 - protein, 154 aa, Homo sapiens
MDAPRLPVRPGVLLPKLVLLFVYADDCLAQCGKDCKSYCCDGTTPYCCSYYAYIGNILSGTAIAGIVFGIVFIMGVIAGIAICICMCMKNHRATRVGILRTTHINTVSSYPGPPPYGHDHEMEYCADLPPPYSPTPQGPAQRSPPPPYPGNARK

SEQ ID NO: 2024 - DNA, 7218 bp, Homo sapiens
gccccgcatcgtgcccggccccgtcgcggagatcccggacgaccgtcgcgggttgatggtcgcattccagatgtaaacagcttcagaagcctgacggtcatatggtagaatcactgtggactgagacccacctttctagacctgaagcccaggaggaggaagaggaggctggttggtaccatgggcataatgctctgaatcctagtctctcacctagtatgtgagcagtccctgcagatggcccatttggagatcttgacaaagcctcttctgtttccaatggggtttttggcgcattctcacagacttagatgaaactgtgatggccaccgcagggggcaggtgctgacatcgtccccagccctgtggctgttcatccggacatcatttccaacctcaatatctaaatgccacagtgctcttggagcaagttgggctggggaccactgttgccttttaagaccataaaaccatgggaaacgcagaaagtcaacatgtagagcacgagttttatggagaaaagcatgccagcctggggcgcaagcacacttcccgctccctgcgcctctcgcacaagacgcggaggaccaggcacgcttcctcggggaaggtgatccacaggaactccgaagtgagcacccgatccagcagcacccccagcatcccccagtccctggctgaaaatggcctggagcccttctcccaagatggtaccctagaagacttcgggagccccatctgggtggaccgagtggacatgggcttgagacctgtgtcttacactgactcttctgtcactcccagcgtagacagcagcatcgtcctcacagcagcctctgtgcagagcatgccagacactgaggagagcaggctttacggggatgacgctacatatttggctgagggaggcaggaggcagcattcctatacatccaatgggcccactttcatggagacggcgagctttaagaagaaacgctccaaatctgcagacatctggcgggaggacagcctggaattctcactctctgatctgagccaagaacatttaacaagcaacgaagaaatcttgggttccgccgaagagaaggactgcgaggaggctcgggggatggaaacgcgggcgagtccgcggcagctcagcacctgtcagagagccaattccttgggtgacttgtatgctcagaaaaactctggagtgacagcaaacggggggccggggagcaaatttgcaggctactgtcggaatttggtgtctgatattcccaatcttgcaaaccataagatgccaccagctgctgctgaagagactcctccgtacagtaattataacacacttccctgtaggaaatctcactgtctctctgaaggtgccaccaacccacaaattagccatagcaacagcatgcaaggcagaagagctaaaacaactcaggatgttaatgcaggcgagggcagtgagtttgcagacagtgggattgaaggggccactaccgacacggacctcctgtccaggcgatctaatgccaccaactccagctactcacccaccacaggccgggcctttgtgggcagcgacagcggcagcagctccaccggggatgcggctcgtcagggggtgtacgagaacttccggcgggagctggagatgagcaccaccaacagcgagagcctggaggaggccggctcggcgcacagcgatgagcagagcagcggcaccctgagctctccgggccagtcggacatcctgctgaccgccgcacagggcacggtgcgcaaggccggcgccctggccgtcaagaacttcctggtgcacaagaagaacaagaaggtggagtcagccacccggaggaagtggaagcactactgggtgtccctgaaaggatgcacgctatttttctacgagagcgacggcaggtctgggatagaccacaacagcatccccaaacacgccgtctgggtggagaacagcattgtgcaggcggtgcctgagcaccccaagaaggactttgtcttctgcctcagcaattccctgggtgatgccttcctttttcagaccactagccagacggagcttgaaaactggatcaccgccatccactctgcctgcgccactgcggtcgcgaggcaccaccacaaggaagacacgctccgactcctgaaatcagagatcaaaaaactggaacagaagattgacatggatgaaaagatgaagaaaatgggtgaaatgcagctgtcttcagtcactgactcaaagaaaaagaaaacaatattagatcagatctttgtctgggagcaaaatctcgagcagttccaaatggacctgtttcgtttccgctgttatttagccagccttcagggtggggagctgccaaaccccaaaaggcttctcgcttttgcaagtcgaccaacgaaagtggccatgggccgccttggaatcttttcggtatcatcgtttcatgccctggtggcagcacgcactggtgaaactggagtgagaagacgtactcaggccatgtccagatccgcgagcaagcgaaggagcaggttttcttctctgtggggtctggatactacctccaaaaagaagcagggacggccaagcatcaatcaggtgtttggagagggaaccgaagctgtaaagaaatctttagagggaatatttgatgacattgttccagatggcaagagggagaaagaagtggtcttacctaacgttcaccagcacaaccctgactgcgacatttgggtccacgagtatttcactccatcctggttctgtctgcccaataatcagcctgccctgacggtcgtccggccaggcgacactgcacgggacaccctggagctgatttgcaagacacatcaactggatcattctgctcattacctgcgcctgaaatttctaatagaaaacaaaatgcagctctatgttccacagcccgaggaagacatctatgagctgctgtacaaagaaattgaaatctgtccaaaagtcactcagagcatccacattgagaagtcagatacagctgctgatacttacgggttttcactttcttctgtggaagaagatggtattcgaaggctgtacgtgaatagtgtgaaggaaaccggtttagcttccaagaaaggcctgaaagcaggagatgagattcttgagatcaataatcgtgctgctgacgccctgaactcttctatgctcaaagatttcctctcacagccctcgctgggcctcctggtgaggacctaccccgagctggaggaaggagtggagctgctggaaagcccgccccaccgagtggacggccctgccgaccttggcgagagccccctcgcctttctcaccagcaacccagggcacagcctttgcagcgagcagggcagcagtgctgagaccgctccagaggagaccgaggggccagacttggaatcctcagatgagactgatcacagcagcaagagtacagaacaggtggccgcattttgccgcagtttgcatgagatgaacccctctgaccagagcccatctcctcaggactccacggggcctcagctggcgaccatgagacaactctcggatgcagataagctgcgcaaggtgatctgcgagctcctggagacggagcgcacctacgtgaaggatttaaactgtcttatggagagatacctaaagcctcttcaaaaagaaacttttctcacccaggatgagcttgacgtgctttttggaaatttaacggaaatggtagagtttcaagtagaattccttaaaactctagaagatggagtgagactggtacctgatttggaaaagcttgagaaggttgatcaatttaagaaagtgctgttctctctggggggatcattcctgtattatgctgaccgcttcaagctctacagtgccttctgcgccagccacacaaaagttcccaaggtcctggtgaaagccaagacagacacggctttcaaggcattcttggatgcccagaacccgaagcagcagcactcatccacgctggagtcgtacctcatcaagcccatccagaggatcctcaagtacccacttctgctcagggagctgttcgccctgaccgatgcggagagcgaggagcactaccacctggacgtggccatcaagaccatgaacaaggttgccagtcacatcaatgagatgcagaaaatccatgaagagtttggggctgtgtttgaccagctgattgctgaacagactggtgagaaaaaagaggttgcagatctgagcatgggagacctgcttttgcacactaccgtgatctggctgaacccgccggcctcgctgggcaagtggaaaaaggaaccagagttggcagcattcgtcttcaaaactgctgtggtccttgtgtataaagatggttccaaacagaagaagaaacttgtaggatctcacaggctttccatttatgaggactgggaccccttcagatttcgacacatgatccccacggaagcgctgcaggttcgagctttggcgagtgcagatgcagaggcaaatgccgtgtgtgaaattgtccatgtaaaatccgagtctgaagggaggccggagagggtctttcacttgtgctgcagctccccagagagccgaaaggatttcctaaaggctgtgcattcaatcctgcgtgataagcacagaagacagctcctcaaaaccgagagccttccctcatcccagcaatatgtcccttttggaggcaaaagattgtgtgcactgaagggggccaggccggccatgagcagggcagtgtctgccccaagcaagtctcttgggaggaggaggcggcggctggctcgaaacaggtttaccattgattctgatgccgtctccgcaagcagcccggagaaagagtcccagcagccccccggtggtggggacactgaccgatgggtagaggagcagtttgatcttgctcagtatgaggagcaagatgacatcaaggagacagacatcctcagtgacgatgatgagttctgtgagtccgtgaagggtgcctcagtggacagagacctgcaggagcggcttcaggccacctccatcagtcagcgggaaagaggccggaaaaccctggatagtcacgcgtcccgcatggcacagctcaagaagcaagctgccctgtcggggatcaatggaggcctggagagcgcaagcgaggaagtcatttgggttaggcgtgaagactttgccccctccaggaaactgaacactgagatctgactgcgtcacctgccccgtagagaatgtgtgtagatacttcctgccctaactctgcccaccctcctgtaccgtcgacaagaatgtccccttaggtcgcgctcttgcacacacggttttggcagctgacttggttctgaagccatgtagccacccaactttgtcattttcaacaacatcagaaagaattgatcagaatcccaaataagcttgagtcctatcttctgtatattactaagggcttttatttattctcaataaatcagggcctgaacaattaaaagaaaaaagattctatagcactggaaagcaaatcaccccaggagttaacggatgtacaacagattaatttaagggatagtagcacacacacgatccttctatctgaaatcagtctcctagctggggaaacctctttcacacacaaaatgaaatgtgtacagcttgccgtgttctgactgtacccttccctcttccatgtctgagaatctccgtgtattttaagaatgtgtgaggagagggtggcgattcatgtttcaatgagcctctttttttttttccttcctgttttggtctatggctggtcttactctgtgtccatgttcggaagctctagttttgcatagaattatagagatgccaaactctttgaaaagagatccaaatttatcgcttgagagaaagaaaagaaacactattttttgtattttacctgagatacaggggcacaaatagatgagaattttacagtgttagtgtatgtatccctgagcctaaaaaatgaggatataaccttttacagagagagtgaggcgtggtggttttatatttatatatgaaaggccagcaagctcatgcgaaggatatacttttcttccaaaaagcggattttttttttttaatgtttgaatctatatttgagatgggagtttggttggattaaacatgacaccccggtgggcggtgtgtgtgtctgttgcacatggcagggaggggagcctccttctcatggggttgccatggtgatcattggtttttccatcaaaattgcatcttcatccatagattaccttccccttccctgacagtccataaccaaacctttaaacagaacaacctctttaaaaacttctcttgtgtttaacactttcttcatgccaacgaaacagggtaaacatgctcaaaacattaacagtctaaacagatatccaaatactaagaagaaaaacaagttatagcactttcaattttttttttttttttaaaaaaaggtttatagctttttcttttcccatgtcacaatgtccacttcctaagaagggtttaaaatactatgaaaactttctttttggggaaaatatctatttggtgtttgacacatcagtaggtactttaaagacctgaattttatagtagctttaggagttatattttataaaaatcagttatgactttatatttccagacaatagagagttcagtacatcatgctcttgtgcctctgcctgcttttcctgcgttcccaccctgtattccccccgcctttcgggtttccagggcttcgagcttgatcttttgaaagttttattctattaaatttttgctatatcttctggttttctgaaaaagctttagaatggtttctataccctttgtatcactgcatttttccatatcatctccggttcgatcgcgtccagatggaaaacggaagcagaggcttctaatcgtcgcatttactggctccagtgcaacacatccatctgaaaacactcggaagtctggtgcttggagagggtgccattgtctcttgtacataaggtcatgacgtgtctatgtcaaaagttcttatatatttcttttataagctgaaagaaggtctatttttatgtttttaggtctatgaatggaacgttgtaaatgcttgtcaaacaataaaaataacgaaaagtgaaaaaaaaaaaaaaaaaaaa

SEQ ID NO: 2025 - protein, 1591 aa, Homo sapiens
MGNAESQHVEHEFYGEKHASLGRKHTSRSLRLSHKTRRTRHASSGKVIHRNSEVSTRSSSTPSIPQSLAENGLEPFSQDGTLEDFGSPIWVDRVDMGLRPVSYTDSSVTPSVDSSIVLTAASVQSMPDTEESRLYGDDATYLAEGGRRQHSYTSNGPTFMETASFKKKRSKSADIWREDSLEFSLSDLSQEHLTSNEEILGSAEEKDCEEARGMETRASPRQLSTCQRANSLGDLYAQKNSGVTANGGPGSKFAGYCRNLVSDIPNLANHKMPPAAAEETPPYSNYNTLPCRKSHCLSEGATNPQISHSNSMQGRRAKTTQDVNAGEGSEFADSGIEGATTDTDLLSRRSNATNSSYSPTTGRAFVGSDSGSSSTGDAARQGVYENFRRELEMSTTNSESLEEAGSAHSDEQSSGTLSSPGQSDILLTAAQGTVRKAGALAVKNFLVHKKNKKVESATRRKWKHYWVSLKGCTLFFYESDGRSGIDHNSIPKHAVWVENSIVQAVPEHPKKDFVFCLSNSLGDAFLFQTTSQTELENWITAIHSACATAVARHHHKEDTLRLLKSEIKKLEQKIDMDEKMKKMGEMQLSSVTDSKKKKTILDQIFVWEQNLEQFQMDLFRFRCYLASLQGGELPNPKRLLAFASRPTKVAMGRLGIFSVSSFHALVAARTGETGVRRRTQAMSRSASKRRSRFSSLWGLDTTSKKKQGRPSINQVFGEGTEAVKKSLEGIFDDIVPDGKREKEVVLPNVHQHNPDCDIWVHEYFTPSWFCLPNNQPALTVVRPGDTARDTLELICKTHQLDHSAHYLRLKFLIENKMQLYVPQPEEDIYELLYKEIEICPKVTQSIHIEKSDTAADTYGFSLSSVEEDGIRRLYVNSVKETGLASKKGLKAGDEILEINNRAADALNSSMLKDFLSQPSLGLLVRTYPELEEGVELLESPPHRVDGPADLGESPLAFLTSNPGHSLCSEQGSSAETAPEETEGPDLESSDETDHSSKSTEQVAAFCRSLHEMNPSDQSPSPQDSTGPQLATMRQLSDADKLRKVICELLETERTYVKDLNCLMERYLKPLQKETFLTQDELDVLFGNLTEMVEFQVEFLKTLEDGVRLVPDLEKLEKVDQFKKVLFSLGGSFLYYADRFKLYSAFCASHTKVPKVLVKAKTDTAFKAFLDAQNPKQQHSSTLESYLIKPIQRILKYPLLLRELFALTDAESEEHYHLDVAIKTMNKVASHINEMQKIHEEFGAVFDQLIAEQTGEKKEVADLSMGDLLLHTTVIWLNPPASLGKWKKEPELAAFVFKTAVVLVYKDGSKQKKKLVGSHRLSIYEDWDPFRFRHMIPTEALQVRALASADAEANAVCEIVHVKSESEGRPERVFHLCCSSPESRKDFLKAVHSILRDKHRRQLLKTESLPSSQQYVPFGGKRLCALKGARPAMSRAVSAPSKSLGRRRRRLARNRFTIDSDAVSASSPEKESQQPPGGGDTDRWVEEQFDLAQYEEQDDIKETDILSDDDEFCESVKGASVDRDLQERLQATSISQRERGRKTLDSHASRMAQLKKQAALSGINGGLESASEEVIWVRREDFAPSRKLNTEI

SEQ ID NO: 2026 - DNA, 981 bp, Homo sapiens
gtttggggccagagtgggcgaggcgcggaggtctggcctataaagtagtcgcggagacggggtgctggtttgcgtcgtagtctcctgcagcgtctggggtttccgttgcagtcctcggaaccaggacctcggcgtggcctagcgagttatggcgacgaaggccgtgtgcgtgctgaagggcgacggcccagtgcagggcatcatcaatttcgagcagaaggaaagtaatggaccagtgaaggtgtggggaagcattaaaggactgactgaaggcctgcatggattccatgttcatgagtttggagataatacagcaggctgtaccagtgcaggtcctcactttaatcctctatccagaaaacacggtgggccaaaggatgaagagaggcatgttggagacttgggcaatgtgactgctgacaaagatggtgtggccgatgtgtctattgaagattctgtgatctcactctcaggagaccattgcatcattggccgcacactggtggtccatgaaaaagcagatgacttgggcaaaggtggaaatgaagaaagtacaaagacaggaaacgctggaagtcgtttggcttgtggtgtaattgggatcgcccaataaacattcccttggatgtagtctgaggccccttaactcatctgttatcctgctagctgtagaaatgtatcctgataaacattaaacactgtaatcttaaaagtgtaattgtgtgactttttcagagttgctttaaagtacctgtagtgagaaactgatttatgatcacttggaagatttgtatagttttataaaactcagttaaaatgtctgtttcaatgacctgtattttgccagacttaaatcacagatgggtattaaacttgtcagaatttctttgtcattcaagcctgtgaataaaaaccctgtatggcacttattatgaggctattaaaagaatccaaattcaaactaaaaaaaaaaaaaaaaaa

SEQ ID NO: 2027 - protein, 154 aa, Homo sapiens [sequence omitted]

SEQ ID NO: 2028 - DNA, 3882 bp, Homo sapiens
tgaagaccagcgctgccgccgcctccttttcctcatcctgcgaacgggactgagagggggcccgccacctctccgcctctgcctcggccgcccgcctcgccgcttcgggcgcagcctcttcctgcccgggcctcggactccgccgctcgtcgcctccccccggccaccaggcccggctggtttcccagccccgctccgccgcggcgcgaggtctatgtgaccggcgggcccggagcagccgccgccgcagcgcgaacatggacgccgtcaacgccttcaaccaggagctcttttcgcttatggatatgaaacctcccatctctagagccaagatgattctcatcactaaagctgctattaaagctattaagctttataagcatgtagttcaaatagtagaaaagttcatcaaaaagtgtaaaccagaatacaaggttccgggattatatgtaattgactcaattgtgcgacagtctcgtcatcagtttggaactgataaagatgtttttgggccaagattctctaaaaacataactgccacattccaatatttatatctttgtccatctgaagataagagtaaaatagttcgtgtgctgaacctttggcaaaaaaatggagtgttcaaaattgaaattattcaacctcttttggacatggcagcgggaaccagtaatgcagccccagtagcagaaaatgttaccaataatgaaggctcacctccacctccagtaaaagtttcttctgaacctcccacacaagccactccaaactccgtcccagctgtaccacagttgcccagctctgatgcttttgctgctgtggctcagctgtttcagacaactcaaggccaacagcttcagcagatccttcagacttttcaacagcctccaaaaccacagtctcctgcccttgacaatgctgtgatggctcaggttcaggctatcacagctcagttaaagacaactcctacacaaccatctgaacaaaaagctgctttccccccacctgaacagaaaactgcatttgacaagaagttgcttgatagatttgactatgatgatgagccagaagctgtggaagaatcaaagaaagaggataccactgccgtcaccacgacagcacctgctgccgcagtaccccctgcacccaccgccaccgtgcctgctgctgctgcacccgctgctgcctctcctcctcctccacaggcaccatttggctttcctggagatggcatgcagcagccagcatacacacagcatcaaaatatggatcagtttcagccacgaatgatgggaatacaacaggatccaatgcaccatcaggttccacttcctcctaatggacaaatgccaggatttggacttcttcctacacctccatttcctcccatggctcagcctgtgattcctccaactccaccagtgcagcagcctttccaagcttcttttcaggcacaaaatgaaccacttacacagaagccgcatcagcaggaaatggaagtagaacaaccttgtattcaagaggttaagcgacatatgtctgataacagaaagtcaagatctaggtcagcatccaggtcaccaaaaaggaggcgatctagatctggttctagatctcgaaggtctcggcatcgacgttctcgatctcggtccagggatagacgccgacattctccccgatctcgatctcaagaaagacgggatcgagaaaaagagagagaacgtcgacaaaaaggcctccctcaagtgaaaccggaaactgcaagtgtttgcagtactaccctctgggtggggcagctggacaaaagaactactcagcaggatgttgccagtctcttggaagagtttggtccaattgaatcaattaatatgattcctcccaggggttgtgcctatattgttatggttcataggcaagatgcctatcgtgccctgcagaaactgagccgaggaaactataaagtgaaccagaaatccataaagattgcctgggccttaaacaaaggaataaaggcagattataagcagtattgggatgtagaacttggtgttacttatattccatgggacaaagtcaagcctgaggaactggagagtttttgtgaaggaggaatgttggacagtgacacacttaacccagattggaaaggaattcctaagaagcctgaaaatgaagttgctcaaaatggaggtgctgaaacctcacacacagaaccagtatcacccatacctaaaccattacctgtgcctgtccctcctattcctgttcctgcacctataacagtgccacctccacaggtcccaccacatcaaccgggtccacctgtagttggtgctctccagccgcctgctttcacgcctcctctgggaataccgcctccaggctttggtcctggtgttcctcctccccctcctcctccaccatttttgcgcccaggattcaacccaatgcatttaccaccaggttttctgcctcctggacccccacctcctataactccaccagtatccattcctcctcctcacactccaccaataagcatcccaaactctactatcgctggtataaatgaagacactacaaaagacttatctattggaaatcccattccaacagtggtgtctggggctagaggaaacgccgagtctggtgacagcgtgaaaatgtatggctctgccgtgccacctgctgcacccacgaatctgcccacccctcctgtaacccagcctgtttcacttcttggcactcaaggagttgcccctggtcctgtaattggacttcaggcaccatctactggtcttcttggcgcccggcccggtctcatcccactccagcgccctccaggaatgcccccacctcacttacagcggttccctttgatgccgccccgtcccatgccaccgcacatgatgcacagaggcccaccgccaggaccagggggctttgcgatgcctccacctcatggaatgaaaggtcccttcccaccgcatggcccctttgttaggcctggtggaatgccagggctcgggggcccagggccaggcccagggggtcctgaagacagagacggaaggcaacagccgccgcagcagccacagcagcagccacagccgcaggcgccccagcaaccacagcagcagcagcagcagcagccaccaccatcacaacagcctccaccaacacagcagcagccacagcagtttagaaatgataacaggcagcagttcaattcaggtagagaccaagaaaggtttggaagaagatcttttggaaatagggtggaaaatgaccgggaacggtatgggaaccgtaatgatgatagagataatagtaaccgtgacaggagagagtggggaaggaggagccctgaccgggacaggcacagagacttggaagagagaaatagacgctctagtgggcatcgagacagagagagagattctagagatagagagtctcgtagagagaaggaagaagcccgaggaaaggaaaagcctgaggtgacagacagggcaggtggtaacaaaaccgttgaacctcccattagccaagtgggaaatgtagacactgcttcagaacttgagaagggggtgtctgaggctgcagtcctaaagccttctgaagagttacctgctgaggctacctcatccgttgaacccgaaaaggattctggctcagcagcagaggctcctcgttagagactggaatttgtgaaaatgtgacagtgacacttcctggagtgtagagcttgaggtgtacagatgctgtattatatccgctcccgctgtactgcagccccgcgccagctggtggggaactgtaagcaatttgattgcttcccttctatttaaaaatagccacaaaaaaaaaaaaaaaaaa

SEQ ID NO: 2029 - protein, 1147 aa, Homo sapiens
MDAVNAFNQELFSLMDMKPPISRAKMILITKAAIKAIKLYKHVVQIVEKFIKKCKPEYKVPGLYVIDSIVRQSRHQFGTDKDVFGPRFSKNITATFQYLYLCPSEDKSKIVRVLNLWQKNGVFKIEIIQPLLDMAAGTSNAAPVAENVTNNEGSPPPPVKVSSEPPTQATPNSVPAVPQLPSSDAFAAVAQLFQTTQGQQLQQILQTFQQPPKPQSPALDNAVMAQVQAITAQLKTTPTQPSEQKAAFPPPEQKTAFDKKLLDRFDYDDEPEAVEESKKEDTTAVTTTAPAAAVPPAPTATVPAAAAPAAASPPPPQAPFGFPGDGMQQPAYTQHQNMDQFQPRMMGIQQDPMHHQVPLPPNGQMPGFGLLPTPPFPPMAQPVIPPTPPVQQPFQASFQAQNEPLTQKPHQQEMEVEQPCIQEVKRHMSDNRKSRSRSASRSPKRRRSRSGSRSRRSRHRRSRSRSRDRRRHSPRSRSQERRDREKERERRQKGLPQVKPETASVCSTTLWVGQLDKRTTQQDVASLLEEFGPIESINMIPPRGCAYIVMVHRQDAYRALQKLSRGNYKVNQKSIKIAWALNKGIKADYKQYWDVELGVTYIPWDKVKPEELESFCEGGMLDSDTLNPDWKGIPKKPENEVAQNGGAETSHTEPVSPIPKPLPVPVPPIPVPAPITVPPPQVPPHQPGPPVVGALQPPAFTPPLGIPPPGFGPGVPPPPPPPPFLRPGFNPMHLPPGFLPPGPPPPITPPVSIPPPHTPPISIPNSTIAGINEDTTKDLSIGNPIPTVVSGARGNAESGDSVKMYGSAVPPAAPTNLPTPPVTQPVSLLGTQGVAPGPVIGLQAPSTGLLGARPGLIPLQRPPGMPPPHLQRFPLMPPRPMPPHMMHRGPPPGPGGFAMPPPHGMKGPFPPHGPFVRPGGMPGLGGPGPGPGGPEDRDGRQQPPQQPQQQPQPQAPQQPQQQQQQQPPPSQQPPPTQQQPQQFRNDNRQQFNSGRDQERFGRRSFGNRVENDRERYGNRNDDRDNSNRDRREWGRRSPDRDRHRDLEERNRRSSGHRDRERDSRDRESRREKEEARGKEKPEVTDRAGGNKTVEPPISQVGNVDTASELEKGVSEAAVLKPSEELPAEATSSVEPEKDSGSAAEAPR

SEQ ID NO: 2030 - DNA, 454 bp, Homo sapiens
tggacagcagcagagggaggaggaggcaggacagaccagaagagagacaatgaggttctgaacctagatgttggccaagggagcagaggagggcaggtcaggaggccctcgccctgcaatcacccttcctgggagccttcacttcacctgtgatctcaagacctctccctactgcctgactcgcgccgagcttatggaacatcttcccttgagggtcgcagtccattcgatgagcccttgtcacaggtcctgcttctgtggggagctcaagcgcggacacccttggaacactccccaagtctcttccttcccatccagcaccacttccctaagtcacagctgcaccacctctcatctggactgctcacagcaggtggagtcaggatcaaaatagccaaagaaaaagtaagaatccgtatacaggaaacaaatatgtgatgatgaccggagcagc

SEQ ID NO: 2031 - protein, 108 aa, Homo sapiens
MLAKGAEEGRSGGPRPAITLPGSLHFTCDLKTSPYCLTRAELMEHLPLRVAVHSMSPCHRSCFCGELKRGHPWNTPQVSSFPSSTTSLSHSCTTSHLDCSQQVESGSK

SEQ ID NO: 2032 - DNA, 2457 bp, Homo sapiens
ggagcgcgtgaggctccggcgcgcaagcccggagcagcccgctggggcgcacagggtcgcgcgggcgcggggatggaggacggcgtggccggtccccagctcggggccgcggcggaggcggcggaggcggccgaggcgcgagcgcggcccggggtgacgctgcggcccttcgcgcccctctcgggggcggccgaggcggacgagggcggcggcgactggagcttcattgactgcgagatggaggaggtggacctgcaggacctgcccagcgccaccatcgcctgtcacctggacccgcgcgtgttcgtggacggcctgtgccgggccaaatttgagtccctctttaggacgtatgacaaggacatcacctttcagtattttaagagcttcaaacgagtcagaataaacttcagcaaccccttctccgcagcagatgccaggctccagctgcataagactgagtttctgggaaaggaaatgaagttatattttgctcagaccttacacataggaagctcacacctggctccgccaaatccagacaagcagtttctgatctcccctcccgcctctccgccagtgggatggaaacaagtggaagatgcgaccccagtcataaactatgatctcttatatgccatctccaagctggggccaggggaaaagtatgaattgcacgcagcgactgacaccactcccagcgtggtggtccatgtatgtgagagtgatcaagagaaggaggaagaagaggaaatggaaagaatgaggagacctaagccaaaaattatccagaccaggaggccggagtacacgccgatccacctcagctgaactggcacgcgacgaggacgcattccaaatcatactcacgggaggaatcttttactgtggaggtggctggtcacgacttcttcggaggtggcagccgagatcggggtggcagaaatcccagttcatgttgctcagaagagaatcaaggccgtgtccccttgttctaatgctgcacaccagttactgttcatggcacccgggaatgacttgggccaatcactgagtttgtggtgatcgcacaaggacatttgggactgtcttgagaaaacagataatgatagtgttttgtacttgttcttttctggtaggttctgtctgtgccaagggcaggttgatcagtgagctcaggagagagcttcctgtttctaagtggcctgcaggggccactctctactggtaggaagaggtaccacaggaagccgcctagtgcagagaggttgtgaaaacagcagcaatgcaatgtggaaattgtagcgtttcctttcttccctcatgttctcatgtttgtgcatgtatattactgatttacaagactaacctttgttcgtatataaagttacaccgttgttgttttacatcttttgggaagccaggaaagcgtttggaaaacgtatcacctttcccagattctcggattctcgactctttgcaacagcacttgcttgcggaactcttcctggaatgcattcactcagcatccccaaccgtgcaacgtgtaacttgtgcttttgcaaaagaagttgatctgaaattcctctgtagaatttagcttatacaattcagagaatagcagtttcactgccaacttttagtgggtgagaaattttagtttaggtgtttgggatcggacctcagtttctgttgtttcttttatgtggtggtttctatacatgaatcatagccaaaaacttttttggaaactgttggttgagatagttggttcttttaccccacgaagacatcaagatacacttgtaaataaagctgatagcatatattcatacctgttgtacacttgggtgaaaagtatggcagtgggagactaagatgtattaacctacctgtgaatcatatgttgtaggaaaagctgttcccatgtctaacaggacttgaattcaaagcatgtcaagtggatagtagatctgtggcgatatgagagggatgcagtgcctttccccattcattcctgatggaattgttatactaggttaacatttgtaatttttttctagttgtaatgtgtatgtctggtaaataggtattatattttggccttacaataccgtaacaatgtttgtcattttgaaatacttaatgccaagtaacaatgcatgctttggaaatttggaagatggttttattctttgagaagcaaatatgtttgcattaaatgctttgattgttcatatcaagaaattgattgaacgttctcaaaccctgtttacggtacttggtaagagggagccggtttgggagagaccattgcatcgctgtccaagtgtttcttgttaagtgcttttaaactggagaggctaacctcaaaatattttttttaactgcattctataataaatgggcacagtatgctccttacagaaaaaaaaaaaaaaaaaaaaaaaaaaaaaa

SEQ ID NO: 2033 - protein, 252 aa, Homo sapiens
MEDGVAGPQLGAAAEAAEAAEARARPGVTLRPFAPLSGAAEADEGGGDWSFIDCEMEEVDLQDLPSATIACHLDPRVFVDGLCRAKFESLFRTYDKDITFQYFKSFKRVRINFSNPFSAADARLQLHKTEFLGKEMKLYFAQTLHIGSSHLAPPNPDKQFLISPPASPPVGWKQVEDATPVINYDLLYAISKLGPGEKYELHAATDTTPSVVVHVCESDQEKEEEEEMERMRRPKPKIIQTRRPEYTPIHLS

SEQ ID NO: 2034 - DNA, 2302 bp, Homo sapiens
ccccctgcgctctcgccatcgccccgcatttactcgctggaggagggggtcacctcattcctagggaggaggaaacagacattgagcggcgacgtgactcagtgttcataaataggacgacgtccctgcattcccaatctgcactattggaagaaaagccaatgtttgggccaaatttgagtccctctttaggacgtatgacaaggacatcacctttcagtattttaagagcttcaaacgagtcagaataaacttcagcaaccccttctccgcagcagatgccaggctccagctgcataagactgagtttctgggaaaggaaatgaagttatattttgctcagaccttacacataggaagctcacacctggctccgccaaatccagacaagcagtttctgatctcccctcccgcctctccgccagtgggatggaaacaagtggaagatgcgaccccagtcataaactatgatctcttatatgccatctccaagctggggccaggggaaaagtatgaattgcacgcagcgactgacaccactcccagcgtggtggtccatgtatgtgagagtgatcaagagaaggaggaagaagaggaaatggaaagaatgaggagacctaagccaaaaattatccagaccaggaggccggagtacacgccgatccacctcagctgaactggcacgcgacgaggacgcattccaaatcatactcacgggaggaatcttttactgtggaggtggctggtcacgacttcttcggaggtggcagccgagatcggggtggcagaaatcccagttcatgttgctcagaagagaatcaaggccgtgtccccttgttctaatgctgcacaccagttactgttcatggcacccgggaatgacttgggccaatcactgagtttgtggtgatcgcacaaggacatttgggactgtcttgagaaaacagataatgatagtgttttgtacttgttcttttctggtaggttctgtctgtgccaagggcaggttgatcagtgagctcaggagagagcttcctgtttctaagtggcctgcaggggccactctctactggtaggaagaggtaccacaggaagccgcctagtgcagagaggttgtgaaaacagcagcaatgcaatgtggaaattgtagcgtttcctttcttccctcatgttctcatgtttgtgcatgtatattactgatttacaagactaacctttgttcgtatataaagttacaccgttgttgttttacatcttttgggaagccaggaaagcgtttggaaaacgtatcacctttcccagattctcggattctcgactctttgcaacagcacttgcttgcggaactcttcctggaatgcattcactcagcatccccaaccgtgcaacgtgtaacttgtgcttttgcaaaagaagttgatctgaaattcctctgtagaatttagcttatacaattcagagaatagcagtttcactgccaacttttagtgggtgagaaattttagtttaggtgtttgggatcggacctcagtttctgttgtttcttttatgtggtggtttctatacatgaatcatagccaaaaacttttttggaaactgttggttgagatagttggttcttttaccccacgaagacatcaagatacacttgtaaataaagctgatagcatatattcatacctgttgtacacttgggtgaaaagtatggcagtgggagactaagatgtattaacctacctgtgaatcatatgttgtaggaaaagctgttcccatgtctaacaggacttgaattcaaagcatgtcaagtggatagtagatctgtggcgatatgagagggatgcagtgcctttccccattcattcctgatggaattgttatactaggttaacatttgtaatttttttctagttgtaatgtgtatgtctggtaaataggtattatattttggccttacaataccgtaacaatgtttgtcattttgaaatacttaatgccaagtaacaatgcatgctttggaaatttggaagatggttttattctttgagaagcaaatatgtttgcattaaatgctttgattgttcatatcaagaaattgattgaacgttctcaaaccctgtttacggtacttggtaagagggagccggtttgggagagaccattgcatcgctgtccaagtgtttcttgttaagtgcttttaaactggagaggctaacctcaaaatattttttttaactgcattctataataaatgggcacagtatgctccttacagaaaaaaaaaaaaaaaaaaaaaaaaaaaaaa

SEQ ID NO: 2035 - protein, 117 aa, Homo sapiens
MKLYFAQTLHIGSSHLAPPNPDKQFLISPPASPPVGWKQVEDATPVINYDLLYAISKLGPGEKYELHAATDTTPSVVVHVCESDQEKEEEEEMERMRRPKPKIIQTRRPEYTPIHLS

SEQ ID NO: 2036 - DNA, 2434 bp, Homo sapiens
tgtctgcctgcaagcatgcaggacttgactcaggaatttgctgtccaaacaggatgctgtggaagctgcactttttttttccccagggagtgggggctggcccttactgctttataagcaccagctcaagaaggaacctacagcctcttggaaaggaatctcactaggggcttgactgcgtgggtctgtagcgctttcactgtaagaaagcaagatgcattttagaaactttaactacagttttagctccctgattgcctgtgtggcaaacagtgatatcttcagcgaaagtgaaaccagggccaaatttgagtccctctttaggacgtatgacaaggacatcacctttcagtattttaagagcttcaaacgagtcagaataaacttcagcaaccccttctccgcagcagatgccaggctccagctgcataagactgagtttctgggaaaggaaatgaagttatattttgctcagaccttacacataggaagctcacacctggctccgccaaatccagacaagcagtttctgatctcccctcccgcctctccgccagtgggatggaaacaagtggaagatgcgaccccagtcataaactatgatctcttatatgccatctccaagctggggccaggggaaaagtatgaattgcacgcagcgactgacaccactcccagcgtggtggtccatgtatgtgagagtgatcaagagaaggaggaagaagaggaaatggaaagaatgaggagacctaagccaaaaattatccagaccaggaggccggagtacacgccgatccacctcagctgaactggcacgcgacgaggacgcattccaaatcatactcacgggaggaatcttttactgtggaggtggctggtcacgacttcttcggaggtggcagccgagatcggggtggcagaaatcccagttcatgttgctcagaagagaatcaaggccgtgtccccttgttctaatgctgcacaccagttactgttcatggcacccgggaatgacttgggccaatcactgagtttgtggtgatcgcacaaggacatttgggactgtcttgagaaaacagataatgatagtgttttgtacttgttcttttctggtaggttctgtctgtgccaagggcaggttgatcagtgagctcaggagagagcttcctgtttctaagtggcctgcaggggccactctctactggtaggaagaggtaccacaggaagccgcctagtgcagagaggttgtgaaaacagcagcaatgcaatgtggaaattgtagcgtttcctttcttccctcatgttctcatgtttgtgcatgtatattactgatttacaagactaacctttgttcgtatataaagttacaccgttgttgttttacatcttttgggaagccaggaaagcgtttggaaaacgtatcacctttcccagattctcggattctcgactctttgcaacagcacttgcttgcggaactcttcctggaatgcattcactcagcatccccaaccgtgcaacgtgtaacttgtgcttttgcaaaagaagttgatctgaaattcctctgtagaatttagcttatacaattcagagaatagcagtttcactgccaacttttagtgggtgagaaattttagtttaggtgtttgggatcggacctcagtttctgttgtttcttttatgtggtggtttctatacatgaatcatagccaaaaacttttttggaaactgttggttgagatagttggttcttttaccccacgaagacatcaagatacacttgtaaataaagctgatagcatatattcatacctgttgtacacttgggtgaaaagtatggcagtgggagactaagatgtattaacctacctgtgaatcatatgttgtaggaaaagctgttcccatgtctaacaggacttgaattcaaagcatgtcaagtggatagtagatctgtggcgatatgagagggatgcagtgcctttccccattcattcctgatggaattgttatactaggttaacatttgtaatttttttctagttgtaatgtgtatgtctggtaaataggtattatattttggccttacaataccgtaacaatgtttgtcattttgaaatacttaatgccaagtaacaatgcatgctttggaaatttggaagatggttttattctttgagaagcaaatatgtttgcattaaatgctttgattgttcatatcaagaaattgattgaacgttctcaaaccctgtttacggtacttggtaagagggagccggtttgggagagaccattgcatcgctgtccaagtgtttcttgttaagtgcttttaaactggagaggctaacctcaaaatattttttttaactgcattctataataaatgggcacagtatgctccttacagaaaaaaaaaaaaaaaaaaaaaaaaaaaaaa

SEQ ID NO: 2037 - protein, 197 aa, Homo sapiens
MHFRNFNYSFSSLIACVANSDIFSESETRAKFESLFRTYDKDITFQYFKSFKRVRINFSNPFSAADARLQLHKTEFLGKEMKLYFAQTLHIGSSHLAPPNPDKQFLISPPASPPVGWKQVEDATPVINYDLLYAISKLGPGEKYELHAATDTTPSVVVHVCESDQEKEEEEEMERMRRPKPKIIQTRRPEYTPIHLS

SEQ ID NO: 2038 - DNA, 5991 bp, Homo sapiens
gcgggcgaccacccggcgcaggagcggccgcgtttcggcctcagaatccattgaagacttgaacaagtgggccctatttcttgtgtctccttttatacttgaagcagaacacatagcatttgtgacggagagcatttgggtacaaagtgagaatttacagagatcatcctcttcagaaacagttcggtttttgcccactagggatgatgtggtttctcatgaggttacttgctctaaaggactttatattttggaaccataagagcacccttgtggcccaggcactttatggatgatcccttttagtgctcccagtaaccttccaagattgtcaagtggtcagactgttgtttgccattagcttgcagacctggggatccttatcggctaattgctgaagcaagtgtggacaacttcagcaagctgggggtggcgttcatggaagatagactccacatggataatggactggtaccccaaaagattgtgtcggtgcacttgcaggactccactctgaaggaagttaaggatcaggtctcaaacaagcaagcccagatcctagagccgaagcctgaaccttctcttgagattaagcctgagcaggacggtatggagcatgttggcagagatgacccaaaggctcttggtgaagaacccaaacaaaggagaggcagtgcctctgggagtgagcctgctggggacagtgacaggggagggggccccgttgagcattatcacctccatctgtctagttgccacgagtgtctggaacttgagaacagcaccattgagtcagtcaagtttgcgtctgccgagaacattccagaccttccctacgattatagcagcagtttggagagtgttgctgatgagacctcccccgaaagagaagggaggagagtcaacctcacgggaaaggcacccaacatcctcctctatgtgggctccgactcccaggaagccctcggccggttccacgaggtccggtctgtgctggccgactgtgtggacattgacagttatattctctaccacctgctggaggacagtgctctcagagacccgtggacggacaactgtctgctgttggtcattgctaccagggagtccattcccgaagacctgtaccagaagttcatggcctatctttctcagggagggaaggtgttgggcctgtcttcatccttcacctttggtggctttcaggtgacaagcaagggtgcactgcacaagacagtccagaacttggttttctccaaggctgaccagagcgaggtgaagctcagcgtcttgagcagtggctgcaggtaccaggaaggccccgtccggctcagccccggcaggctccagggccacctggagaatgaggacaaggacaggatgattgtgcatgtgccttttggaactcgcgggggagaagctgttctttgccaggtgcacttagaactacctcccagctccaacatagtgcaaactccagaagattttaacttgctcaagtcaagcaattttagaagatacgaagtccttagagagattctgacaacccttggcctcagctgtgacatgaaacaagttcctgccttaactcctctttacttgctgtcagctgcggaggaaatcagggatcctcttatgcagtggcttgggaaacatgtggactccgagggagaaataaaatccggccagctctctcttagatttgtttcatcctacgtgtctgaagtagaaataaccccatcttgtatacctgtggtgaccaacatggaggccttctcatcagaacatttcaacttagagatctatcgccaaaatctgcagaccaagcagttggggaaagtaattttgtttgccgaagtgacccccacaacgatgcgtctcctggatgggctgatgtttcagacaccgcaggaaatgggcttaatagtgatcgcggcccggcagaccgagggcaaaggacggggagggaatgtgtggctgagccctgtgggatgtgctctttctactctgctcatctccattccactgagatcccagctgggacagaggatcccgtttgtccagcatctgatgtccgtggctgtcgtggaagcagtgaggtccattcccgagtatcaggatatcaacttacgagtgaagtggcccaacgatatttattacagtgacctcatgaagatcggcggagttctggttaactcaacactcatgggagaaacattttatatacttattggctgtggatttaatgtgactaacagtaaccctaccatctgcatcaacgacctcatcacagaatacaataaacaacacaaggcagaactgaagcccttaagagccgattatctcatcgccagagtcgtgactgtgctggagaaactgatcaaagagtttcaggacaaagggcccaacagcgtccttcccctttattaccgatactgggtccacagtggtcagcaagtccatctgggcagcgcagagggaccaaaggtgtccatcgttggcctggacgattctggcttcctccaggttcaccaggagggcggcgaggttgtgactgtgcacccggacggcaactccttcgacatgctgagaaacctcatcctccccaaacggcggtaatgccgggcgtccccgagacgcggctgcctgtccgtgcccatgcatctggaaatctaatttagagttgtaggtgaattttcttttcctccaattcatttgttaagtctttgttctttttctgtgtttctgtttgtttttaggtttgttttgttgtcgttttctttggtgtttgaagaggctctgggatagatggttaagaagtagaaaatttagtttagggaaagccctcccacaggtgggaaattgctctcccctctgtggcttggacttacgtttattgtcaaggggagtttttacatggaaatgacaatgggaaaattcagatattttcttagtagtgcagacctttacccctagtctatgaaaaaacaaaccaaaatatgctcttgcgcccaggccagtggtgagttagaggtatgctatcactgtttgtaagcatctggggaggtactgaactgtaagaacatgcttggacacttagtcattgttctgtgtttttattaatgaagaaaagggaagacagacttccaagagttactgtccacccggtggtgtggccccatagcgaagtctaaatgcctgtagagatagagctagctggtgtggttgcagtgaccttgtagaggaaatcagttcattactttgacatcattcagtgagctctcctttcctaaggaagtttaaatgtccttagttagggactgactttcttaagtaagtttaaatttactacatattgtgaagagacaggatcaagttcagaatccttaaatgtctgattaggcatcacttggatgaggaggtgggcgatttggctctgacagctggagatgaaggcacactcataccacatacaagggaggatttggagcttttaagccagtttcagatttactctgaaatgtggagcattcctgcaagactgtgcagctcacggaatatagaagacatggcattttactcagaagtcataagtttttgcccccctcatttacctcgtattaccaagaaagaaaatgttatcgatactaaacaccatcagttcagagggaggatgtgtgtgtgtgcccgcatatgtgtgtgcgtgcgtgtgtgcgcacatagctttaaaagaagacattcaaaatttgatgtgctacaagcctcatgaaagaacaaaagaaatgaagccttttgatatgcattcgctattcccagatgtacgccatgccttttccatgtccctcctatctctgttgaacttatgaatcatactcattacttttcagctttttaaaaggccaatttttgtccagttttctctcttccagtcccagctgaaattagtggaaagaaagtttgatggagctttcagctttgaacaaaatcccttcattgtaaactagcaccatctttatccaggtcttacccagtcaggctaattccagaaacttgtggtttttagtatagtctgtctacctttagccaggcacaggacagccctatgaaaaaatacccaatatatattttttggaaatgaaacattaaaagaacttaaaaagtaatttttggaaatgaggcttcaattagaattatttttctcaaaaaacaaacaaacaaaaaacacaaaaaaaaccactcttctccaaatgcccaagccttctttcaaaattagttagaaacttaagtaaaatacaagtccacaccatccccaaattacaaaatggacttacccttgagagggcatctgcagaatatcatcagggacaaagatctcgaggctaacgatgtaggtttcatttctcagactttgtaatataaggcaagccctctctcagagctgccatcatcactttttgaatttctttgggggttatttaatgaaaaacatgctatgttttgttttaagctgaagtcctattctggacactctgctttgggaaaaaatgttatcatttaatttcctttctgcaaattaaaactaatgaagtgtggccttgtcaaaggctatggagatgttccgggcatactgctgtgctctgtgctttccagcaggcgctcctccctcacgcaggagactcagttgtcctgagagagatgaagcagccttgaagcagatgctgcgttttccataaacctgattttgcctcacatgaaccaaagactctcaaaactccgcttctatagaattagctgaataaaggcattttactgatagctgttcgtgttagcgaaacctgtctacctgctatagcacactctccgatttgggccatttatgcaccccgcaacctgggatctcaaggagctttaaagtcttaatgggaacttggcattttcctgatgatctttaaaatgtggtcactaaactcaggattggcgtgtgcttttagaacactggagtagcccttgttttagaggctgtgcattgagtatcgaccgtattttgtaaaaggcaagatatcctcccttccaggctggtaacgggtttcaaggggactcttgaggaagtgccccctaaaatagaacacagcaataactgggcttcctgtccccacccccaccccagcagtgctctctggcactgggaactctgctagggagtggtggaagtaggaaggatttgtgtgcaaaggaaaatcgtggttgagtttcactgcagcaggctgacgttgcctgatgtgagagcaagtggccgactggggtgcgggtgcacaggtcgggggagcacaggccacagagcgcagcctctgggggtcccccaaggcacagcatatacagcatggtcgccccttgccctggagtctgggaacaaagagaggagccagcctccccgcactgcttcagatggaaaagggaggcagggtgggcttccgttctccagatctgtttgctcttaacaggcagaacatgggagaatccttattcctggttaatcactatgcatatttgaaataaaagaaagcgtaagcctctgcaattttaacttctcaaaggatgtctctgaaaagaatcactttaaaccaatgcctataaaaagcaagtctaccaaaataaactaagactttctatgtggtttgggctccctcttatttttacaagtttcatttttaaaagtaggcaactactttgggttacagtatttttattcatatttaaacatttttacaaaataaataaagtgttttacatagtaaggaatatgtacgtatttccaagtattaagaagccaagtgtttttttttttgacgtattattgacaaatgtattcagcgccatacacaagagaaatattattactccaaagaacgaaagttaacaaaactccaaagcaaaaacccttttaatggaggtgagaaataaatttaatgtaacaacaaaaaaaaaaaaaaa

SEQ ID NO: 2039 - protein, 726 aa, Homo sapiens
MEDRLHMDNGLVPQKIVSVHLQDSTLKEVKDQVSNKQAQILEPKPEPSLEIKPEQDGMEHVGRDDPKALGEEPKQRRGSASGSEPAGDSDRGGGPVEHYHLHLSSCHECLELENSTIESVKFASAENIPDLPYDYSSSLESVADETSPEREGRRVNLTGKAPNILLYVGSDSQEALGRFHEVRSVLADCVDIDSYILYHLLEDSALRDPWTDNCLLLVIATRESIPEDLYQKFMAYLSQGGKVLGLSSSFTFGGFQVTSKGALHKTVQNLVFSKADQSEVKLSVLSSGCRYQEGPVRLSPGRLQGHLENEDKDRMIVHVPFGTRGGEAVLCQVHLELPPSSNIVQTPEDFNLLKSSNFRRYEVLREILTTLGLSCDMKQVPALTPLYLLSAAEEIRDPLMQWLGKHVDSEGEIKSGQLSLRFVSSYVSEVEITPSCIPVVTNMEAFSSEHFNLEIYRQNLQTKQLGKVILFAEVTPTTMRLLDGLMFQTPQEMGLIVIAARQTEGKGRGGNVWLSPVGCALSTLLISIPLRSQLGQRIPFVQHLMSVAVVEAVRSIPEYQDINLRVKWPNDIYYSDLMKIGGVLVNSTLMGETFYILIGCGFNVTNSNPTICINDLITEYNKQHKAELKPLRADYLIARVVTVLEKLIKEFQDKGPNSVLPLYYRYWVHSGQQVHLGSAEGPKVSIVGLDDSGFLQVHQEGGEVVTVHPDGNSFDMLRNLILPKRR

SEQ ID NO: 2040 - DNA, 876 bp, Homo sapiens
atggtgtggagagtgtctgcacggcgagtaggccctgcggctctgcccctaacatgggcgcggggcacgcggccaggggcccgtgggagggggacagggcgcgcgaacccaggttctcaggccgcgtcgccgcgcgtgcgcactgacagccgggccgagccagcccgggtcccgcagggaagaacgccagcggcgcgcggaggccgcgctgccctgggccgcgaggtccctatggctgctccaccggaagccccgcccccttctggcagctggaggcggctttccggccgtcccggctgcagccccgaggcctcgactcaggagacggctgttccctggcagaggctcgcggtggactgcctgaccctcgcccggccccagcacgcccccggcgaacgcccacccctgtcccggcccgcagcgccccgacttacttctgaggccgaaacgcggccgctcctgcgccgggtggtcgcccgcgaatccctgccgcgccgcgctgcgccctctcgtggcccgcctggtggtgcaactgggctctctgcgcagggccgcggggccgcctggcctcctcctgccctggccgcggtgccgcgcgctcgggaacgcgggcctttcgccgctagccagcttctgcctctcggccacctgtcctctctcgcccacgctgcctgggaggcgcgcttctgccgccttcttgccgcgctcgctctagcctcgcccactcctgcggccttacagggccgaacctcaccctgccctgcggaaggcaggcctacaccttccctccgcgccttcctccctgaccggcaccaaacaccacgttgccctttccagcatcgacgacctattccccagttctctgacaccagctga

SEQ ID NO: 2041 - protein, 291 aa, Homo sapiens
MVWRVSARRVGPAALPLTWARGTRPGARGRGTGRANPGSQAASPRVRTDSRAEPARVPQGRTPAARGGRAALGREVPMAAPPEAPPPSGSWRRLSGRPGCSPEASTQETAVPWQRLAVDCLTLARPQHAPGERPPLSRPAAPRLTSEAETRPLLRRVVARESLPRRAAPSRGPPGGATGLSAQGRGAAWPPPALAAVPRARERGPFAASQLLPLGHLSSLAHAAWEARFCRLLAALALASPTPAALQGRTSPCPAEGRPTPSLRAFLPDRHQTPRCPFQHRRPIPQFSDTS

SEQ ID NO: 2042 - DNA, 2262 bp, Homo sapiens
ctccgacccgggcttttccttcgtaccctgcggccccctccgcacccctcacggagctcctcgggtcctgccccctcccagcgcttgcccgcgccgccccgcccccgtttttaaacctggcgcgcgggtaggtgagcgcgttagcccgagtggatctaggcgcgctcgtaggccggcgccgcagcaaggggcgcgggctccgccggcaccatggagcccgaagcggcggccggagcccggaaggcgcgggggcgcggctgtcactgccccggggacgctccctggaggcctccgccaccgcgcgggccggagagccccgcgccgtggcgaccttggatccagacacctggagatgctgagctgaccagaactggaaggccgcttgaacctagggctgaccaacacacttttggatcaaagggagcctttgggtttcagcatcctgtaagagtctatttacccatgtcaaagcgtcaagaatacctgcggagttccggggagcaagtactggccagtttcccagtgcaagccacgattgacttctacgacgatgagtctactgagtctgcttccgaagctgaagagccagaggaaggacccccacccctccatcttctgccccaggaggtgggaggtcggcaggaaaatggcccagggggaaagggcagagaccagggcatcaaccaagggcagcgatcctcaggagggggtgaccactggggggagggtccgctccctcaaggtgtctcctcaaggggtggcaagtgctcctcatccaaatgaatcagtctctgtctcctgggccctgctctgggacctgcccctcacgttctcttggggacacccgagccaggacactacgcatccctgctgagtgtgcagaggctagaggcttctcgggcagcccctggcctgcacactactcatgacagaaagtcagcttttacttttctttcccctggcaattcgtttttggtgcactcatgcatgcctttgagaaaggattctaggagaaagagaaggtctatgtcaacagagttgttatctcatagagccagttttcaaagctccttctgcattgtcactcactgatcaggtgatgaattcttcctagatagtcgcccactccacctcctacttaacctgagactcattatttagctatttctgcttttgtaaaaataattcagatattaaactccaattttaatctatcatccaagggtagatgtagttgcttagtagcattttggaaaaaaaagaaaaaaaggtttggtttggttttgtgacggagttttgctcttgtctcccaggctggagtgcagtgacacaatctcggctcactgcaacctccacttcttgggttcaagtgattctcctgtctcagcctcccaagtggctgggattgcaggcatgagctaccacgcctggctaattttttgtatttttagtagagactcggtttcaccatgttggtcaggctggctttgaactcctgacctcaggtgatccacccgccttggcctcccaaagtgctgggattacaggcgtgagccactgagcccggccaaaaaaaaatgtatttattaaaaaaaaatttttttaacccgccgaataattcccataagagtaacaaaaaggaccagcctgaccagcgtggagaaactctgtctctactaaaaatacaaaattagccaggcgtgatggctcatgcctgtgatcccagctactcgggaggctgaggcaggagaatggctggaacccgggaggcggaggttgccgtgagtcgagatcgcaccattgcattccagcctgggcaacaagagcgaaactccgtctcaaaaaaaaaaaaaaaaaaaaaaagaaagaaaagagtaacagaaagatagggatttttaggagacaattagataaaaatgtatgtgatgactgtataaggaggcctgtgtgtatgaatttatagggagtagaaccgtctctcttcttagttggtgactgtttggggcctggtattttaatagatgaacactacttttttaattttttatttttttaaccctacccttaacccatgaacactatttttaattaaagtatctgatgtaaaattattttgagtttttaatattttgataaacgtgtattcctgaaactttttgacttacttatcttacatgtggtgtcttcctgtatatagtacattatatcaatttctacttgaaataaatattttgaaaaaaaaaaaaaaaaaaaaaaaaaaaa

SEQ ID NO: 2043 - protein, 190 aa, Homo sapiens
MEPEAAAGARKARGRGCHCPGDAPWRPPPPRGPESPAPWRPWIQTPGDAELTRTGRPLEPRADQHTFGSKGAFGFQHPVRVYLPMSKRQEYLRSSGEQVLASFPVQATIDFYDDESTESASEAEEPEEGPPPLHLLPQEVGGRQENGPGGKGRDQGINQGQRSSGGGDHWGEGPLPQGVSSRGGKCSSSK

SEQ ID NO: 2044 - DNA, 911 bp, Homo sapiens
ggaggccacgcttgcagagctggagcgcgcgtctatcgccccagaacccccctccctgccctatcctccgccaccccttctgttgcggggcgcgcgccagcctgggtgtctgtatgcgctcgaggcgggggcgcgggttgcggacggaggcgcgggaggcggttctgcgcggcgggggccgtacccgcggcggagcgaggaggcgagaatggatcaatggtgccacggagcacatcgctgacgctgattgtgttccttttccacagattgtctaaagccccaggaaaaatggtggaaaattcaccgtcgccattgccagaaagagcgatttatggctttgttcttttcttaagctcccaatttggcttcatactttacctcgtgtgggcctttattcctgaatcttggctaaactctttaggtttaacctattggcctcaaaaatattgggcagttgcattacctgtctacctccttattgctatagtaattggctacgtgctcttgtttgggattaacatgatgagtacctctccactcgactccatccatacaatcacagataactatgcaaaaaatcaacagcagaagaaataccaagaggaggccattccagccttaagagatatttctattagtgaagtaaaccaaatgttctttcttgcagccaaagaactttacaccaaaaactgaactgtgtgtaaccatagtaacaccaagcacgtatttatttataagtttttgccattataattttgaccataaattaatttgaccatctctcttattaatagagaagtaaaaaatgtaagttgaccttctcttagattatgttcaatgaatattgtaaatgttcaagtattgttaatgaatagaataaatacaatattgcattcccatatagcagactt

SEQ ID NO: 2045 - protein, 158 aa, Homo sapiens
MVPRSTSLTLIVFLFHRLSKAPGKMVENSPSPLPERAIYGFVLFLSSQFGFILYLVWAFIPESWLNSLGLTYWPQKYWAVALPVYLLIAIVIGYVLLFGINMMSTSPLDSIHTITDNYAKNQQQKKYQEEAIPALRDISISEVNQMFFLAAKELYTKN

SEQ ID NO: 2046 - DNA, 804 bp, Homo sapiens
cacgcccgcccccgcgctcgctggctcccacccggggagggtcgttgtgcgcctgcgccagggtgggggttgccgtcgcgcctaggcctttccctcaggttttcctcttccccactgcggctccccagtcggcgcttgcgcggagaactcagcgctgagattgtctaaagccccaggaaaaatggtggaaaattcaccgtcgccattgccagaaagagcgatttatggctttgttcttttcttaagctcccaatttggcttcatactttacctcgtgtgggcctttattcctgaatcttggctaaactctttaggtttaacctattggcctcaaaaatattgggcagttgcattacctgtctacctccttattgctatagtaattggctacgtgctcttgtttgggattaacatgatgagtacctctccactcgactccatccatacaatcacagataactatgcaaaaaatcaacagcagaagaaataccaagaggaggccattccagccttaagagatatttctattagtgaagtaaaccaaatgttctttcttgcagccaaagaactttacaccaaaaactgaactgtgtgtaaccatagtaacaccaagcacgtatttatttataagtttttgccattataattttgaccataaattaatttgaccatctctcttattaatagagaagtaaaaaatgtaagttgaccttctcttagattatgttcaatgaatattgtaaatgttcaagtattgttaatgaatagaataaatacaatattgcattcccatatagcagactt

SEQ ID NO: 2047 - protein, 134 aa, Homo sapiens
MVENSPSPLPERAIYGFVLFLSSQFGFILYLVWAFIPESWLNSLGLTYWPQKYWAVALPVYLLIAIVIGYVLLFGINMMSTSPLDSIHTITDNYAKNQQQKKYQEEAIPALRDISISEVNQMFFLAAKELYTKN

SEQ ID NO: 2048 - DNA, 7730 bp, Homo sapiens
gtcggctgacgtggagggccggaggtggcggcggcggcggcggcggctgctgctgctgctgcccgcgtccgaggctcgcgggcggcgggcccggacttgtgcaccatggacaattttgctgagggagatttcactgtggcggattatgccttgttagaagattgccctcacgtggatgattgtgtctttgctgctgaatttatgagcaatgattatgttcgtgtgactcagctttactgtgatggggtgggtgtgcaatataaagattatatccaaagtgagaggaatttggaatttgacatctgcagtatatggtgtagtaaaccaatttctgtcctgcaagattattgcgatgccattaaaataaacatcttctggccacttctgtttcaacatcaaaacagttccgtaatatcacgattgcatccctgtgtggacgccaacaattcacgtgcttctgagataaatttgaagaaactacaacatcttgagttgatggaagatattgtggatttggcaaagaaagttgctaatgattcattccttattggaggcttattgagaattggttgtaaaatagaaaataaaatcttggcaatggaagaagctctgaattggataaaatatgcaggcgatgtaacaattctaactaaattaggatcaattgacaattgttggcctatgttaagtattttctttactgaatacaagtaccacataactaaaattgtaatggaagactgcaatttgcttgaagaacttaaaactcaaagttgtatggattgtatagaggaaggagaactaatgaaaatgaaaggaaatgaagagttttccaaagaaagatttgatatagctattatctattacaccagagccattgaatatagacctgaaaactaccttctttatggtaaccgagctctttgttttcttcgtactggacagtttagaaatgcactcggtgatggaaagagagccactattctgaagaacacttggccaaagggtcattatcgttattgtgatgctctttctatgctgggggaatatgactgggccctgcaagcaaacataaaagctcaaaaactctgtaaaaatgaccctgagggaatcaaggatctaattcagcagcatgtaaagttacaaaaacaaatagaagacctacaaggtcgaacagcaaataaggatccaattaaagccttttatgaaaacagggcctacacacctaggagtttatcagcacctatatttactacttcacttaactttgtggagaaggaaagagatttcagaaaaattaatcacgaaatggccaacggtggtaatcagaatctaaaggtggcggatgaggcgttgaaggtagatgattgtgactgtcatcctgaattttcaccaccatcaagtcagcctccaaaacataaaggaaaacaaaaatctcgaaacaatgaatcagaaaagttcagttctagttcaccattgactttaccagcagatttgaagaacatcttggagaaacagttttctaaatcttccagagctgcacaccaggattttgctaatataatgaaaatgctgagaagcttaattcaagatggctatatggccttattggagcagcgttgccgcagcgctgcacaggcctttacagagttgctgaacggtttagatcctcaaaaaataaagcaattgaacctggccatgattaactatgttttggtcgtctatggacttgccatttctctccttggaataggacagcctgaggaattatctgaagccgaaaaccagtttaagaggattattgaacactaccccagtgagggccttgattgcttggcctactgtggaattggaaaagtatatttgaaaaaaaacagatttctagaagctctcaatcactttgagaaagcaagaaccttgatttatcgtcttcctggagtgttaacttggcccacgagtaatgtgattattgaagagtctcagccacaaaaaataaagatgctgttagagaaatttgttgaagaatgcaagttccctccagtgccagatgccatttgttgctatcagaagtgccatggatattctaagatccagatatacataactgatccagactttaagggttttatacgcatcagctgttgccagtactgtaaaatagaatttcacatgaattgctggaagaagttaaaaactacaacctttaatgataaaattgacaaggattttctacaaggaatatgtcttacccctgactgtgaaggtgtcatttctaagattatcatcttcagcagtggtggtgaagttaaatgtgaatttgaacacaaggtcataaaagaaaaggttcctccaagacctattctgaaacagaaatgttctagcctagagaaactaagactgaaagaagacaaaaaattgaagagaaagatccaaaaaaaagaagcaaaaaagttagcacaagaaagaatggaggaggacttaagagaaagtaatccacccaaaaatgaagagcagaaagaaactgtagacaatgttcagcgttgtcagttccttgatgacagaattctacagtgtataaagcagtatgctgacaagattaaatccggcatacagaatacagccatgcttctcaaagaattgctttcttggaaagttttgagcacagaagactatacaacctgtttttctagcagaaattttctaaatgaagcagtggactatgttattcgccacttgattcaagaaaataacagagtaaagacaagaatatttctgcatgttttgagtgagcttaaagaagtggagcccaaattagccgcctggatccaaaaacttaatagctttggcttagatgccacaggaactttcttttctcgttatggagcatctcttaaactgcttgattttagtatcatgactttcctctggaatgagaaatatggtcacaaactagactctatagaaggaaagcaacttgattatttctctgagccagcatcattgaaggaagcccgttgtttaatatggctgctagaagaacacagagacaagttcccagcattgcatagtgctttagatgaattctttgatataatggacagccgctgtactgtgttaaggaaacaagatagtggtgaagcaccgtttagttcaaccaaggtgaaaaacaaaagcaagaaaaagaagccaaaggattcaaagcctatgttagttgggtctggaacaacttcagtaacttcaaataatgagatcatcacttcaagtgaagaccatagcaatcgaaattcagattctgcaggcccatttgcagtgcctgaccatcttcggcaagatgtagaagaattcgaagctctctatgaccaacacagtaacgaatatgttgtccgcaataagaagctatgggacatgaacccaaaacaaaaatgttcaactctatatgattacttctctcagtttttggaggaacatggtcccttggacatgagtaacaagatgttctctgcagaatatgagtttttcccagaagaaactcgacagatactagaaaaagcaggaggtttaaaaccttttctcttgggatgccctcgttttgttgtgattgacaactgtattgcactgaagaaggttgcatcacggctcaagaaaaaaaggaagaagaaaaacattaaaacaaaagtagaagaaatttcaaaagcaggggagtatgtacgagttaaactacaactgaatccagctgctagggaatttaaaccagatgtaaagtctaaaccagtgtcagattcatcttcagcaccagcttttgaaaatgtgaaacccaaacctgtgtctgcaaattctcccaagccagcttgtgaagatgtgaaggccaaaccagtatccgacaattcttctagacaagtttctgaggatgggcaacccaaaggggtctcttctaattctcctaaaccaggctctgaggatgcaaattacaagcgagtctcctgtaattcccccaaaccggttcttgaggatgtgaaaccaacttattgggctcaatcccatttggtcacaggatactgtacgtatcttcctttccagagatttgatatcacccagacaccgccagcatacataaacgtgttaccaggtttgccccagtacaccagcatatatacacccttggccagcctttctcctgaatatcagctaccaagatcagtaccagtggtgccgtcttttgtagccaatgacagagcagataaaaatgctgctgcctattttgagggtcatcatttgaatgctgagaatgttgctggtcaccagattgcctctgaaacacagatccttgagggctctttgggaatatctgtaaagtcacactgcagcacaggtgatgctcatacagtcctgagtgagtctaacagaaatgatgagcactgtggaaattctaacaacaaatgtgaagtaattccagaaagcaccagtgcagtaacaaacattccacacgtgcagatggttgccatacaggtatcttggaacataatacaccaagaagtcaatactgagccatataatccttttgaggaacgacaaggggaaatttcacggattgaaaaggagcaccaagtattacaagaccaacttcaagaagtgtatgaaaattatgagcagataaaacttaagggcttagaagagaccagggacctggaagagaagttgaaaaggcacttagaagaaaacaagatctcaaagacggaattagattggttccttcaagatttggaaagagaaattaaaaaatggcaacaggaaaaaaaagaaatccaagaaagactaaaatcactgaagaagaaaattaaaaaggtttcaaatgccagtgaaatgtatacccagaaaaatgatggaaaggaaaaggaacatgaattacatctggatcagtcccttgaaatcagcaacacacttacaaatgagaaaatgaaaatagaagagtatataaagaaagggaaagaggattatgaagagagtcatcagagagctgtggctgcagaggtatccgtacttgaaaactggaaggagagtgaagtgtataagctacagatcatggagtcacaagcagaagcctttctgaagaagctggggctgattagccgtgatcctgcagcatatcctgacatggagtctgatatacgttcatgggaattgtttctttctaatgttacaaaagaaattgagaaagcaaagtctcagtttgaagaacaaattaaggcaattaaaaatggttctcggctcagtgaactttctaaagtgcagatttctgagctttcatttcctgcctgtaacacggttcatcccgagttactccctgagtcttcaggcgacgatggccaagggcttgtgacttctgcaagcgacgtgactggaaaccacgcagcacttcacagggatcctagtgtgttctctgctggtgattccccaggggaggctccttctgcgctgttgccagggccaccccctggtcagcctgaagccactcagctgacagggccaaaacgggctggccaggcagctctgtcagaacgaagccctgtggctgatcggaagcagcctgttcctccaggacgtgctgcgcgttcaagccagtctccaaaaaagccgttcaatagtattattgagcacctgtcagtggtattcccatgttacaacagcactgagcttgctggttttattaaaaaagtgcgaagcaaaaacaagaactcactctcaggattgagtattgatgaaattgtccaaagagtgacagaacacattctagatgaacagaaaaagaaaaagccaaacccaggaaaggacaagaggacttatgagcccagctctgccacccccgtgaccaggtcctcccagggctcaccctcggtggttgttgcaccatcacccaaaaccaaggggcagaaagcagaagatgtccctgtgaggattgcactgggtgcaagttcctgtgaaatatgccacgaggtgttcaaatcaaaaaacgtgcgtgtgctcaaatgtgggcacaagtatcacaaagggtgctttaagcagtggcttaaagggcagagcgcttgcccggcctgccagggtcgtgatctcctgacagaagagtcaccttctggaagaggctggcccagtcagaatcaggagctgccttcctgctcttctaggtagtcacacttcactaaagtgtcatccaccagtgtgttgaatccgaagaatgacaattttctaccactggtgtaaaaaacaaacatttgaagacccttgtgcattgtgtgtcacaaagctaaatacatggaaatcgttaatatcgctgatattaagtaatttccccactctgagtgaatactttgatgattgccaacagtggctaataaaatgacggctaccacactcatgggtcactggggctgcgcagggctctttgaggtgggtggcttcttttggaaagtactatgaacgtctcgaagcagtattctagtgataagaattcttaacatagccaagcgccccacgtttgttccccacgtttgttccccttttctgtttgaaaaacctgttctggtagctccacaagagagatgatactgactttttaaattttttacaagagtctgtattcctgatatgcctatatttttcctcaaagattctgcattttaaggatgggcataagcaaactatattttaataatttatagttaatgttaaaatattggctgatttagaccaaaagattcaaatctcctctttgtgaaatcccatctgcatttgattttttattattttatgttcccccgttagattgttttaagtgtttgcttttcatcttttatagatgtaatctgattttcaaaaatcattaacactttttaattagtatcgactaagactttttccccctggaatcgaggctgtgtgtccgtcatcccagcccccggttggagcctgctctttgaactccgctgccttccttagcagcttctgtcctcttctgtgagtcagtcagcgagtgcttgggatccgcatccagccgtgctgagcacacaacaggctgtgtgtggaaatggccaccaccattctccttccccaccccaccacaaaaagagaagctgtgtctttagacaaccctgaggtatctgtgttacaatcgttctgtgtttgatatttgtgtaaagtatgcatgcagtcttgtactgtgacctaagaacaaaactgtaactgcattagaaaccatgaaaaaattagatattgttttgtgacttttagacagtggtaaatatagaaccatgaattctggtcacattccatttctctccaacatgaaggatcaaaaaatgtttttcaatgtgttctttgttccactggaaacttagagtcatgagtttatgagctgatttggtcaccttcctctgcctttgttcactgtgagttctgatgtcttagtgacttagttcttagaagctcacgccttagtttgaaacagattctccacggtggtccccaaaacactgtctgcatatccataagaattgagcgctatgggtgttaacgtgcatgaggatcagtttgcagcagcaagtacaaaaggagaagaggaacatccgttgaatgagtgtgttttgtacataacttcagatacttgtgaacatgccttatatttgtccaacaactgtcagaataaagaacattctaaaatgagaaaaaaaaaaaaaaaa

SEQ ID NO: 2049 - protein, 2025 aa, Homo sapiens
MDNFAEGDFTVADYALLEDCPHVDDCVFAAEFMSNDYVRVTQLYCDGVGVQYKDYIQSERNLEFDICSIWCSKPISVLQDYCDAIKINIFWPLLFQHQNSSVISRLHPCVDANNSRASEINLKKLQHLELMEDIVDLAKKVANDSFLIGGLLRIGCKIENKILAMEEALNWIKYAGDVTILTKLGSIDNCWPMLSIFFTEYKYHITKIVMEDCNLLEELKTQSCMDCIEEGELMKMKGNEEFSKERFDIAIIYYTRAIEYRPENYLLYGNRALCFLRTGQFRNALGDGKRATILKNTWPKGHYRYCDALSMLGEYDWALQANIKAQKLCKNDPEGIKDLIQQHVKLQKQIEDLQGRTANKDPIKAFYENRAYTPRSLSAPIFTTSLNFVEKERDFRKINHEMANGGNQNLKVADEALKVDDCDCHPEFSPPSSQPPKHKGKQKSRNNESEKFSSSSPLTLPADLKNILEKQFSKSSRAAHQDFANIMKMLRSLIQDGYMALLEQRCRSAAQAFTELLNGLDPQKIKQLNLAMINYVLVVYGLAISLLGIGQPEELSEAENQFKRIIEHYPSEGLDCLAYCGIGKVYLKKNRFLEALNHFEKARTLIYRLPGVLTWPTSNVIIEESQPQKIKMLLEKFVEECKFPPVPDAICCYQKCHGYSKIQIYITDPDFKGFIRISCCQYCKIEFHMNCWKKLKTTTFNDKIDKDFLQGICLTPDCEGVISKIIIFSSGGEVKCEFEHKVIKEKVPPRPILKQKCSSLEKLRLKEDKKLKRKIQKKEAKKLAQERMEEDLRESNPPKNEEQKETVDNVQRCQFLDDRILQCIKQYADKIKSGIQNTAMLLKELLSWKVLSTEDYTTCFSSRNFLNEAVDYVIRHLIQENNRVKTRIFLHVLSELKEVEPKLAAWIQKLNSFGLDATGTFFSRYGASLKLLDFSIMTFLWNEKYGHKLDSIEGKQLDYFSEPASLKEARCLIWLLEEHRDKFPALHSALDEFFDIMDSRCTVLRKQDSGEAPFSSTKVKNKSKKKKPKDSKPMLVGSGTTSVTSNNEIITSSEDHSNRNSDSAGPFAVPDHLRQDVEEFEALYDQHSNEYVVRNKKLWDMNPKQKCSTLYDYFSQFLEEHGPLDMSNKMFSAEYEFFPEETRQILEKAGGLKPFLLGCPRFVVIDNCIALKKVASRLKKKRKKKNIKTKVEEISKAGEYVRVKLQLNPAAREFKPDVKSKPVSDSSSAPAFENVKPKPVSANSPKPACEDVKAKPVSDNSSRQVSEDGQPKGVSSNSPKPGSEDANYKRVSCNSPKPVLEDVKPTYWAQSHLVTGYCTYLPFQRFDITQTPPAYINVLPGLPQYTSIYTPLASLSPEYQLPRSVPVVPSFVANDRADKNAAAYFEGHHLNAENVAGHQIASETQILEGSLGISVKSHCSTGDAHTVLSESNRNDEHCGNSNNKCEVIPESTSAVTNIPHVQMVAIQVSWNIIHQEVNTEPYNPFEERQGEISRIEKEHQVLQDQLQEVYENYEQIKLKGLEETRDLEEKLKRHLEENKISKTELDWFLQDLEREIKKWQQEKKEIQERLKSLKKKIKKVSNASEMYTQKNDGKEKEHELHLDQSLEISNTLTNEKMKIEEYIKKGKEDYEESHQRAVAAEVSVLENWKESEVYKLQIMESQAEAFLKKLGLISRDPAAYPDMESDIRSWELFLSNVTKEIEKAKSQFEEQIKAIKNGSRLSELSKVQISELSFPACNTVHPELLPESSGDDGQGLVTSASDVTGNHAALHRDPSVFSAGDSPGEAPSALLPGPPPGQPEATQLTGPKRAGQAALSERSPVADRKQPVPPGRAARSSQSPKKPFNSIIEHLSVVFPCYNSTELAGFIKKVRSKNKNSLSGLSIDEIVQRVTEHILDEQKKKKPNPGKDKRTYEPSSATPVTRSSQGSPSVVVAPSPKTKGQKAEDVPVRIALGASSCEICHEVFKSKNVRVLKCGHKYHKGCFKQWLKGQSACPACQGRDLLTEESPSGRGWPSQNQELPSCSSR

SEQ ID NO: 2050 - DNA, 9021 bp, Homo sapiens
cctaaagaaaagtattaagtaaatagcagtacagatggcaaatggattgcacaatatatcctctggatccatagtgaccctgcagagataaacctgtgatggtcaaacaatgtgaaaactgctgtcagagacatgggcagggtgctcttgtttacagagaagaggtgcaaaaatcaacttgatggtagtgggaagatcaggaaatgcttcctgaaattgagtattaagaactaatagacattaggtggttgcagaataagttttgtttaggaaggacaagcagttgggtatgactggcttctaggttgtgtgttgtggagtgactggggataaaagcaggagcaagatcacaaaaggtcttctatgcttatattagggaagttggactttattctcaagctgaagggaagctgttgcatggttttaagcagtaaagtgatatgatcagagttttagaggatgccaagattgaaggcaagtctgaccagttaggagactgcttgttaaattagttcagaggagaaacagtgaaggcagtggcactgggcatgaagaagtatatgtgtgctaattttagatttcttagggaagcagaaatgacaagagttagtggtccattggacagaaatattgaaggagactggggagtctaggttgactcccagggtttaggtttgggcagtaaaatgacatgtagaacaattaactgataaacagcatacagaaagaggaaagaacttcatttcatatgtttgtttttgaggaaaagatgtttgtttttgaacttcctgattcagaggggcttgtgggacatcttggttaagatcctgtagtagttctagtagggtctagaagtcaagagatacaaccccgcctggaaggatttgggagtcttcagcatttggaattttggaagccattgtttactgcagtgcatatgagataatttaaactggtacatagataaacacttgaaaaaattttaatagataggaatttaatgtgtatgagaaacataacttgcacatctaacctttgataatcatggacattatcacttaggccaagtgagctcaataaaagggaaatattaactaaaaatatatgtgatacatggaaatggcaaaaatcacggtgaagctatgcaaacgatgcaagttcagaaagtgctgtgttaagtcatgggtgtggtggataaattcacccaaggagagagtaagagtgagaagaaaagagagttgacattgggtggcggggaatggagaagaagaacccatgaaggaaactgaggaagagcagccagacgaataggaggaaaaccaggagaagatggtctttggagtccaaatgaagagttctgaggaggaagtggtccacagcgtcaaacttgtgcaccatggacaattttgctgagggagatttcactgtggcggattatgccttgttagaagattgccctcacgtggatgattgtgtctttgctgctgaatttatgagcaatgattatgttcgtgtgactcagctttactgtgatggggtgggtgtgcaatataaagattatatccaaagtgagaggaatttggaatttgacatctgcagtatatggtgtagtaaaccaatttctgtcctgcaagattattgcgatgccattaaaataaacatcttctggccacttctgtttcaacatcaaaacagttccgtaatatcacgattgcatccctgtgtggacgccaacaattcacgtgcttctgagataaatttgaagaaactacaacatcttgagttgatggaagatattgtggatttggcaaagaaagttgctaatgattcattccttattggaggcttattgagaattggttgtaaaatagaaaataaaatcttggcaatggaagaagctctgaattggataaaatatgcaggcgatgtaacaattctaactaaattaggatcaattgacaattgttggcctatgttaagtattttctttactgaatacaagtaccacataactaaaattgtaatggaagactgcaatttgcttgaagaacttaaaactcaaagttgtatggattgtatagaggaaggagaactaatgaaaatgaaaggaaatgaagagttttccaaagaaagatttgatatagctattatctattacaccagagccattgaatatagacctgaaaactaccttctttatggtaaccgagctctttgttttcttcgtactggacagtttagaaatgcactcggtgatggaaagagagccactattctgaagaacacttggccaaagggtcattatcgttattgtgatgctctttctatgctgggggaatatgactgggccctgcaagcaaacataaaagctcaaaaactctgtaaaaatgaccctgagggaatcaaggatctaattcagcagcatgtaaagttacaaaaacaaatagaagacctacaaggtcgaacagcaaataaggatccaattaaagccttttatgaaaacagggcctacacacctaggagtttatcagcacctatatttactacttcacttaactttgtggagaaggaaagagatttcagaaaaattaatcacgaaatggccaacggtggtaatcagaatctaaaggtggcggatgaggcgttgaaggtagatgattgtgactgtcatcctgaattttcaccaccatcaagtcagcctccaaaacataaaggaaaacaaaaatctcgaaacaatgaatcagaaaagttcagttctagttcaccattgactttaccagcagatttgaagaacatcttggagaaacagttttctaaatcttccagagctgcacaccaggattttgctaatataatgaaaatgctgagaagcttaattcaagatggctatatggccttattggagcagcgttgccgcagcgctgcacaggcctttacagagttgctgaacggtttagatcctcaaaaaataaagcaattgaacctggccatgattaactatgttttggtcgtctatggacttgccatttctctccttggaataggacagcctgaggaattatctgaagccgaaaaccagtttaagaggattattgaacactaccccagtgagggccttgattgcttggcctactgtggaattggaaaagtatatttgaaaaaaaacagatttctagaagctctcaatcactttgagaaagcaagaaccttgatttatcgtcttcctggagtgttaacttggcccacgagtaatgtgattattgaagagtctcagccacaaaaaataaagatgctgttagagaaatttgttgaagaatgcaagttccctccagtgccagatgccatttgttgctatcagaagtgccatggatattctaagatccagatatacataactgatccagactttaagggttttatacgcatcagctgttgccagtactgtaaaatagaatttcacatgaattgctggaagaagttaaaaactacaacctttaatgataaaattgacaaggattttctacaaggaatatgtcttacccctgactgtgaaggtgtcatttctaagattatcatcttcagcagtggtggtgaagttaaatgtgaatttgaacacaaggtcataaaagaaaaggttcctccaagacctattctgaaacagaaatgttctagcctagagaaactaagactgaaagaagacaaaaaattgaagagaaagatccaaaaaaaagaagcaaaaaagttagcacaagaaagaatggaggaggacttaagagaaagtaatccacccaaaaatgaagagcagaaagaaactgtagacaatgttcagcgttgtcagttccttgatgacagaattctacagtgtataaagcagtatgctgacaagattaaatccggcatacagaatacagccatgcttctcaaagaattgctttcttggaaagttttgagcacagaagactatacaacctgtttttctagcagaaattttctaaatgaagcagtggactatgttattcgccacttgattcaagaaaataacagagtaaagacaagaatatttctgcatgttttgagtgagcttaaagaagtggagcccaaattagccgcctggatccaaaaacttaatagctttggcttagatgccacaggaactttcttttctcgttatggagcatctcttaaactgcttgattttagtatcatgactttcctctggaatgagaaatatggtcacaaactagactctatagaaggaaagcaacttgattatttctctgagccagcatcattgaaggaagcccgttgtttaatatggctgctagaagaacacagagacaagttcccagcattgcatagtgctttagatgaattctttgatataatggacagccgctgtactgtgttaaggaaacaagatagtggtgaagcaccgtttagttcaaccaaggtgaaaaacaaaagcaagaaaaagaagccaaaggattcaaagcctatgttagttgggtctggaacaacttcagtaacttcaaataatgagatcatcacttcaagtgaagaccatagcaatcgaaattcagattctgcaggcccatttgcagtgcctgaccatcttcggcaagatgtagaagaattcgaagctctctatgaccaacacagtaacgaatatgttgtccgcaataagaagctatgggacatgaacccaaaacaaaaatgttcaactctatatgattacttctctcagtttttggaggaacatggtcccttggacatgagtaacaagatgttctctgcagaatatgagtttttcccagaagaaactcgacagatactagaaaaagcaggaggtttaaaaccttttctcttgggatgccctcgttttgttgtgattgacaactgtattgcactgaagaaggttgcatcacggctcaagaaaaaaaggaagaagaaaaacattaaaacaaaagtagaagaaatttcaaaagcaggggagtatgtacgagttaaactacaactgaatccagctgctagggaatttaaaccagatgtaaagtctaaaccagtgtcagattcatcttcagcaccagcttttgaaaatgtgaaacccaaacctgtgtctgcaaattctcccaagccagcttgtgaagatgtgaaggccaaaccagtatccgacaattcttctagacaagtttctgaggatgggcaacccaaaggggtctcttctaattctcctaaaccaggctctgaggatgcaaattacaagcgagtctcctgtaattcccccaaaccggttcttgaggatgtgaaaccaacttattgggctcaatcccatttggtcacaggatactgtacgtatcttcctttccagagatttgatatcacccagacaccgccagcatacataaacgtgttaccaggtttgccccagtacaccagcatatatacacccttggccagcctttctcctgaatatcagctaccaagatcagtaccagtggtgccgtcttttgtagccaatgacagagcagataaaaatgctgctgcctattttgagggtcatcatttgaatgctgagaatgttgctggtcaccagattgcctctgaaacacagatccttgagggctctttgggaatatctgtaaagtcacactgcagcacaggtgatgctcatacagtcctgagtgagtctaacagaaatgatgagcactgtggaaattctaacaacaaatgtgaagtaattccagaaagcaccagtgcagtaacaaacattccacacgtgcagatggttgccatacaggtatcttggaacataatacaccaagaagtcaatactgagccatataatccttttgaggaacgacaaggggaaatttcacggattgaaaaggagcaccaagtattacaagaccaacttcaagaagtgtatgaaaattatgagcagataaaacttaagggcttagaagagaccagggacctggaagagaagttgaaaaggcacttagaagaaaacaagatctcaaagacggaattagattggttccttcaagatttggaaagagaaattaaaaaatggcaacaggaaaaaaaagaaatccaagaaagactaaaatcactgaagaagaaaattaaaaaggtttcaaatgccagtgaaatgtatacccagaaaaatgatggaaaggaaaaggaacatgaattacatctggatcagtcccttgaaatcagcaacacacttacaaatgagaaaatgaaaatagaagagtatataaagaaagggaaagaggattatgaagagagtcatcagagagctgtggctgcagaggtatccgtacttgaaaactggaaggagagtgaagtgtataagctacagatcatggagtcacaagcagaagcctttctgaagaagctggggctgattagccgtgatcctgcagcatatcctgacatggagtctgatatacgttcatgggaattgtttctttctaatgttacaaaagaaattgagaaagcaaagtctcagtttgaagaacaaattaaggcaattaaaaatggttctcggctcagtgaactttctaaagtgcagatttctgagctttcatttcctgcctgtaacacggttcatcccgagttactccctgagtcttcaggcgacgatggccaagggcttgtgacttctgcaagcgacgtgactggaaaccacgcagcacttcacagggatcctagtgtgttctctgctggtgattccccaggggaggctccttctgcgctgttgccagggccaccccctggtcagcctgaagccactcagctgacagggccaaaacgggctggccaggcagctctgtcagaacgaagccctgtggctgatcggaagcagcctgttcctccaggacgtgctgcgcgttcaagccagtctccaaaaaagccgttcaatagtattattgagcacctgtcagtggtattcccatgttacaacagcactgagcttgctggttttattaaaaaagtgcgaagcaaaaacaagaactcactctcaggattgagtattgatgaaattgtccaaagagtgacagaacacattctagatgaacagaaaaagaaaaagccaaacccaggaaaggacaagaggacttatgagcccagctctgccacccccgtgaccaggtcctcccagggctcaccctcggtggttgttgcaccatcacccaaaaccaaggggcagaaagcagaagatgtccctgtgaggattgcactgggtgcaagttcctgtgaaatatgccacgaggtgttcaaatcaaaaaacgtgcgtgtgctcaaatgtgggcacaagtatcacaaagggtgctttaagcagtggcttaaagggcagagcgcttgcccggcctgccagggtcgtgatctcctgacagaagagtcaccttctggaagaggctggcccagtcagaatcaggagctgccttcctgctcttctaggtagtcacacttcactaaagtgtcatccaccagtgtgttgaatccgaagaatgacaattttctaccactggtgtaaaaaacaaacatttgaagacccttgtgcattgtgtgtcacaaagctaaatacatggaaatcgttaatatcgctgatattaagtaatttccccactctgagtgaatactttgatgattgccaacagtggctaataaaatgacggctaccacactcatgggtcactggggctgcgcagggctctttgaggtgggtggcttcttttggaaagtactatgaacgtctcgaagcagtattctagtgataagaattcttaacatagccaagcgccccacgtttgttccccacgtttgttccccttttctgtttgaaaaacctgttctggtagctccacaagagagatgatactgactttttaaattttttacaagagtctgtattcctgatatgcctatatttttcctcaaagattctgcattttaaggatgggcataagcaaactatattttaataatttatagttaatgttaaaatattggctgatttagaccaaaagattcaaatctcctctttgtgaaatcccatctgcatttgattttttattattttatgttcccccgttagattgttttaagtgtttgcttttcatcttttatagatgtaatctgattttcaaaaatcattaacactttttaattagtatcgactaagactttttccccctggaatcgaggctgtgtgtccgtcatcccagcccccggttggagcctgctctttgaactccgctgccttccttagcagcttctgtcctcttctgtgagtcagtcagcgagtgcttgggatccgcatccagccgtgctgagcacacaacaggctgtgtgtggaaatggccaccaccattctccttccccaccccaccacaaaaagagaagctgtgtctttagacaaccctgaggtatctgtgttacaatcgttctgtgtttgatatttgtgtaaagtatgcatgcagtcttgtactgtgacctaagaacaaaactgtaactgcattagaaaccatgaaaaaattagatattgttttgtgacttttagacagtggtaaatatagaaccatgaattctggtcacattccatttctctccaacatgaaggatcaaaaaatgtttttcaatgtgttctttgttccactggaaacttagagtcatgagtttatgagctgatttggtcaccttcctctgcctttgttcactgtgagttctgatgtcttagtgacttagttcttagaagctcacgccttagtttgaaacagattctccacggtggtccccaaaacactgtctgcatatccataagaattgagcgctatgggtgttaacgtgcatgaggatcagtttgcagcagcaagtacaaaaggagaagaggaacatccgttgaatgagtgtgttttgtacataacttcagatacttgtgaacatgccttatatttgtccaacaactgtcagaataaagaacattctaaaatgagaaaaaaaaaaaaaaaa

SEQ ID NO: 2051 - protein, 2025 aa, Homo sapiens; identical to SEQ ID NO: 2049

SEQ ID NO: 2052 - DNA, 1681 bp, Homo sapiens
cttctacccgggggctccagtgcatctggctttatctctggggtgcttccatacaaaggggacagaagagatgatggaaggcctcagtactgcaggaggggagacggatgtcatctacaatcacacaatacatgggaggtcacagaacgccagggtgacgtaacaattcaaaccatgaagaggtaacagagcccttcgcgcgtctcaacacgtggtgacgcagctaataacctgtgatgcatacatgggaacaaatgcatagaaaaacttgtcaatgacacggcaaagtaaaacccaaatgaagcgaggtgaaagaatgggctgcagcgcaggcaaaactgcaccacgttacagactgctcgcctgggatggaacggtggggaggtgcgcagacggatggacaagcgcctggcaaaatggatttcttttcctagactgctaatgctactaacagttccctcctcacagggtcgctataacgaggtaacatacagcacttagaagacggcctgacccagaataacactaatgttcacatggctgcgagtctcagaccaaaatcaatagccggtatctactgaaactgcagcaaggcgaaaccacgggaatggcgctccgttgagtagagcaacgcacagcacatcacatcgcatcctccgtagcgggaggctctggcctcaccgcagcggcacttcccggaagagcccaggatattcggggacccgcaccggacaggcggcccaggccccctggcgcccagctggccgccctgttgcagctctcatgccaagacctgcgcctaacggcagggattccggcggtcatcatttattcttggcgctaagctgccgcttctcttttttatcaccacagagtaacgcagaccccaccgtttccttccattctgagccaaccactccagcagccaccggggcgccaggttatgctggggctgcaccacccggcccgaggcttttgaagccacgcctgagcgcggaggatgggcaggatttgccccgtgaactcccgcgcacgcaggctccgcgcgaggcccgggcgcccgagcggcgattccctcccctatcaccagctccagggtggtgccccccggctgtggagcccagaccccggccgtccagcagcgtatagacgagcccatgtctgcgatgtaactgcaccgcgctggggatccacctcccgccagggtgagggcgccgtcctccagcgtatgctaggcaggcgcgccccgccctcctggtcacgtgaccacgcctacagccgaagaggatgggaaaatgcggccctgttcctgaacaggaagcggaagcaggaaggaactgagaacaccagcatctgctgccgccctgaatcagcgttagcatgtggaggcaacctcagcccccagtttttgaagaaggtgattcagattcagacacaggaattatggtgacggtagaaatggactggaaggttcgttccccttgcccaccaagactccagagcaggtgggttcttgatgtctactctgcatgaagccctgggctttccggccctccctacttttcctccgaattcacagcacagcggagccaaaatgtattcctgccaaaacgggcatttcccaaaagaaaatattgttttagaaaaaaaaaaaaaaaaaaaaaaaaaaaaaaaaaaaaaa

SEQ ID NO: 2053 - protein, 149 aa, Homo sapiens
MGRICPVNSRARRLRARPGRPSGDSLPYHQLQGGAPRLWSPDPGRPAAYRRAHVCDVTAPRWGSTSRQGEGAVLQRMLGRRAPPSWSRDHAYSRRGWENAALFLNRKRKQEGTENTSICCRPESALACGGNLSPQFLKKVIQIQTQELW

SEQ ID NO: 2054 - DNA, 1102 bp, Homo sapiens
cagtcacgggccagcctttcccttaaggatgtctgagagctggtctcctcactcttttcttccgcctattaaactttccgcttcttaactcacccatgtgtgtccatgtcgttaatcatcttgacgagagatgatgaaccccggatatttaccccagacagtgatgccgcttcaccagcattgcactctacttccccgcttcctgatcctgcctcagcttctcctctccacagagaagaaaaaattctgcctaaagtctgcaacatcgtttcctgcctgagtttcagcctgccagcttctcctacggattctggacttgccagccccacaatcataaccagagaggggcagcaattttgggcaaaatgtctgatttggaaataccaactttacctccatgggctccacaagaaatcagatgggagaagggacaagcagataagcgcaagcccatcaacctgaaggcataaaccacatccagccacctccttctgatcagcagcaaagctgacgttttgatctccatctgtctgattcttgtgtctacttctcagtttacaactccagtgggaaagaaagagctttatttacagacccataaaaatcccatcagtgtcgtcccctgctgagaggccatgtgagaccatatggaaaaacaacagccataatggcagcatggcagtggaagggtttgtcttgtgcccaggccttgcggtcatgcaagtttcttgtggatcctgttgggaccagccactcaccaaggctgagtaggtccacaaataatggggactttctaccagactcacagagaactgctgggtttttgggaagggtgtgcgtgtctttggggcatggaagttggggttatagtggagacccagaggatgagaaaacttctctgcctcagcagaagagtggcagctgagagagaggcaagaaactcgcacccactgtggactggggcagagagattttgaggagaatgaaatccagaaactctgtgtggtattagtttgtatccagagggtgaccctcttctcaaggaaatgggtgtcatcaattttctacactattaaagatataaagttcttggcattaaaaa

SEQ ID NO: 2055 - protein, 118 aa, Homo sapiens
MSLIILTRDDEPRIFTPDSDAASPALHSTSPLPDPASASPLHREEKILPKVCNIVSCLSFSLPASPTDSGLASPTIITREGQQFWAKCLIWKYQLYLHGLHKKSDGRRDKQISASPST

SEQ ID NO: 2056 - DNA, 538 bp, Homo sapiens
accccaccctaatcttgttatgcaaataggcttcccacttggcaggggccgtcttgtccactcgtttctgtaaacatgggtggcaaaaagagaagatggagctgccatttagaacatgcctaatcccagcttcatcttgctgagcaaaaatgaaggagcctggacccaactttgttactgtgagaaagggtcttcattcattcaagatggcatttgttaagcacctactgctggagtgcagtggttcaatcacggatcactgcagcctccacctcccagttcaagaaattctcatgtctcagcctcctgagcagctaggattacagacaaaccttggaaatcaagaaagttctggaatgatgaagctgttcatgccaagaccgaaagtgctggcccagtatgagtccattcagttcatgccgtgacaattttcttggaactcctttttattgttagttctcacttgtttccatatttagtgaatgtacatttaattgcaaagctgtcattaataaaaattcttatagtacctcaaaaa

SEQ ID NO: 2057 - protein, 91 aa, Homo sapiens
MKEPGPNFVTVRKGLHSFKMAFVKHLLLECSGSITDHCSLHLPVQEILMSQPPEQLGLQTNLGNQESSGMMKLFMPRPKVLAQYESIQFMP

SEQ ID NO: 2058 - DNA, 441 bp, Homo sapiens
accccaccctaatcttgttatgcaaataggcttcccacttggcaggggccgtcttgtccactcgtttctgtaaacatgggtggcaaaaagagaagatggagctgccatttagaacatgcctaatcccagcttcatcttgctgagcaaaaatgaaggagcctggacccaactttgttactgtgagaaagggtcttcattcattcaagatggcatttgttaagcacctactacaaaccttggaaatcaagaaagttctggaatgatgaagctgttcatgccaagaccgaaagtgctggcccagtatgagtccattcagttcatgccgtgacaattttcttggaactcctttttattgttagttctcacttgtttccatatttagtgaatgtacatttaattgcaaagctgtcattaataaaaattcttatagtacctcaaaaa

SEQ ID NO: 2059 - protein, 37 aa, Homo sapiens
MKEPGPNFVTVRKGLHSFKMAFVKHLLQTLEIKKVLE

SEQ ID NO: 2060 - DNA, 698 bp, Homo sapiens
accccaccctaatcttgttatgcaaataggcttcccacttggcaggggccgtcttgtccactcgtttctgtaaacatgggtggcaaaaagagaagatggagctgccatttagaacatgcctaatcccagcttcatcttgctgagcaaaaatgaaggagcctggacccaactttgttactgtgagaaagggtcttcattcattcaagatggcatttgttaagcacctactgtgagtagatgatctcctgtcaaagacagttaacaaatcctcggaatattgcttcatgtacagttattggagatgagtaacttacattctcttaattgtaatggttccttggaaagtcatcgtggaaaatgaaggctggctcatacattttcccagacaggaatttggctgccaacagggaattctaaacaactaaaaactccagatgatgaatgcacaacataatgatggttaaattaaaaaaaaaaaagagcacgacaaaccttggaaatcaagaaagttctggaatgatgaagctgttcatgccaagaccgaaagtgctggcccagtatgagtccattcagttcatgccgtgacaattttcttggaactcctttttattgttagttctcacttgtttccatatttagtgaatgtacatttaattgcaaagctgtcattaataaaaattcttatagtacctcaaaaa

SEQ ID NO: 2061 - protein, 27 aa, Homo sapiens
MKEPGPNFVTVRKGLHSFKMAFVKHLL

SEQ ID NO: 2062 - DNA, 863 bp, Homo sapiens
ggcaaccaggatagaagatcagttgtgctgggggaggggagccagccaggttgtagaaacagcatccctgactttgttctgctaactgtgcagagagaggtgatagtctccgcccaggccatgagggacctggaaatggctgatgacacggtggagctcggccacaccaggcccagctggccccacagcaaaccagagggtccaaggaagctgggtcctgcccaccaaggtcccagggatcctcctctgaggccccctctctcctttgggtttagtcaacggagagggagatggggagaggactgaaaggtctccccaaaggtacaagctgagagacctggatttgcaatcagacagctcacatggacccaagttggggttaacatgcagattgtgcaggggttccctgcggatgcacccctgtgtgccctgatgtggacctgctccttcctgcttcctgggctccagacagaaacaccgtacccctgcaccagcctctgcctcagctcttcacagtcagcacaccctccgcttcctgtcagggtgttctctgctgagtctggttatgggatccctttctgtgcagagccatgctcccgtgtcactgtgtgtcaccttcaagctgtccccgtgtgtatgcctgtgtgagaatatgtgtgtgtgggtttgccatcgaaggaaaacctttattttggctgctaacatttggaaacatttagagaacaaacaatatcttttaaaaaacatcaaaggttcaaaaaaacaagacaagaaacaaactgttgtaaaatttcaactcctctaaatttgtcttaaattgaacttagaactaatctaataaaaatagtatgaagtttcaaaaa

SEQ ID NO: 2063 - protein, 87 aa, Homo sapiens
MQIVQGFPADAPLCALMWTCSFLLPGLQTETPYPCTSLCLSSSQSAHPPLPVRVFSAESGYGIPFCAEPCSRVTVCHLQAVPVCMPV

SEQ ID NO: 2064 - DNA, 1254 bp, Homo sapiens
atggcttgccttatccctaagaacaacatagaaaagaacatcaacccttctgtactcgacaaagacaagtttaaacagattccgggcccaacaggggactcatttgccattttccatggcaaagaatctgagcactggaataagccagagcgtggcttggacatgcattgttgtgagatgactggcaaaacaggaacactgatgtctggaagtgagtgtggagggggtgaggaggcgaattgtactgtgtcagcctccaccctcttggaagctgcactcgctcttgcagatgacttggtagatgactcttatgccgtgaatcacccgtatcctccaagagcacgtggaagttcagatacagcttttctccctgagagtgctacaagcatcctaaggggccttaccttgagtccaggtgctggggcccaatctcagctgaagatcccagagatctggggaagtgatgaagagatctggggaactgactcagcagggggaagcctgtgtacaacccacacctgcaggctacgtgctcctgtgctggctgagccggttggaatagacatgaaggataactcaggaaataagaaagcaagattcagggagctgaccttgtattttttggcaaagaggtctaagatgaagcaagatatcaatctgcaaatatttgaaaatgtaaacatcattgacaacctgtgggaactgagcagtggtcacaaacatcaaagttgtaaaataaatgtcaaatcaaagagatttctggttgaatccttagagaggacattcctcctagagtttaaaacattacagtctccagagcccagcgccaattccgtgtcagcccacaacccgctctggttgcacagcttcacgagtcacaaggactggatggacaagtgtgtgtgcctagtgactgccttctcccagcacatgcaccatgtcccggtggcattgccggagatggtccgtgccctctcagcccagcagcagaccctcaggcagatcaccatctgtggagaccgccaggccaaggacaccaaagttctggtgcagtgcgtccaccctgtctacattcctaacatggtgctgattctggctgatggggacccctcgagtttcctgtcccactggctgcctttcctgagtaccctccgaaggcaggaagaccaggccactgcgtatgtgtgtgagaatcaagcctgctcaatgctcatcatggatccctgtgaattacgaaaactgctacatccgtga

SEQ ID NO: 2065 - protein, 417 aa, Homo sapiens [sequence omitted]

SEQ ID NO: 2066 - DNA, 2867 bp, Homo sapiens
ggtgtttggagagcccggactggatgcccactagaatcctgtgctgtgaacagtgagagagttttcttcattttgaggaaccctaaacacctatctttcccaaggcaacctgtctggactgagcatttctctgacttgacataacttcccatccagccaggagtctgcactcttcagtctttgcaggcagtagcagaatcccatggtagccaggtgggtgaaggggagcgaggacgttctacctgccttgaagaagacacctgacctgcggagtgagtgaccagtgtttccagagcctggcaatggatgccattcacatcggcatgtccagcacccccctggtgaagcacactgctggggctgggctcaaggccaacagaccccgcgtcatgtccaagagtgggcacagcaacgtgagaattgacaaagtggatggcatatacctactctacctgcaagacctgtggaccacagttatcgacatgaagtggagatacaaactcaccctgttcgctgccacttttgtgatgacctggttcctttttggagtcatctactatgccatcgcgtttattcatggggacttagaacccggtgagcccatttcaaatcataccccctgcatcatgaaagtggactctctcactggggcgtttctcttttccctggaatcccagacaaccattggctatggagtccgttccatcacagaggaatgtcctcatgccatcttcctgttggttgctcagttggtcatcacgaccttgattgagatcttcatcaccggaaccttcctggccaaaatcgccagacccaaaaagcgggctgagaccatcaagttcagccactgtgcagtcatcaccaagcagaatgggaagctgtgcttggtgattcaggtagccaatatgaggaagagcctcttgattcagtgccagctctctggcaagctcctgcagacccacgtcaccaaggagggggagcggattctcctcaaccaagccactgtcaaattccacgtggactcctcctctgagagccccttcctcattctgcccatgacattctaccatgtgctggatgagacgagccccctgagagacctcacaccccaaaacctaaaggagaaggagtttgagcttgtggtcctcctcaatgccactgtggaatccaccagcgctgtctgccagagccgaacatcttatatcccagaggaaatctactggggttttgagtttgtgcctgtggtatctctctccaaaaatggaaaatatgtggctgatttcagtcagtttgaacagattcggaaaagcccagattgcacattttactgtgcagattctgagaaacagcaactcgaggagaagtacaggcaggaggatcagagggaaagagaactgaggacacttttattacaacagagcaatgtctgatcacaggggcgccatccaggtttaaccctgcaagctgtttccacatcagaactcccttcaaacacaaagattgctgtgaaaacgaaaatgtgtagacgcactctcaaaaactgcacggacatacaaaatcaatcttttcctttgatcttgtggctaaaccagcatttctgtgtttgagagatttcctgttaggtgcttcgtctgaaagtgaactctcataattcaaattgtataaaataaagctacatttctaagagcttggtgtagggcaattggaataatgtcctgttagataaacagacatttagcaatcctgacattaaaaggaaatgtatttctatacaagattattagctgtaatacaagatatttatttaaccaatgaccttatggctgagagttgaattgtggttcagtattcattgatctcactgctttaaaacatgctctttttgttcaagcaggaaaaatattatatctaattatgtctatgtggtaatacctaaaaagaggtagagagactctatgttcacaaaatatagtaatttcatttttacctttcttcagtggactgaattgtatggaaggaaattgatcagatctgtaattcacaactgtggaaacctacacaaatggggctgatgccattgtttcctctattttattttatttatttttgaatccactatctctttccattcaaaatatttccattcaaaatgtggttcacagacccgccacatcagcaccatccgagagcttattagtaatgtgtagattctcatgtcccagccagacttacagaattggggtctgtatcttaacaagaaccccagatgatttgtgtacaaatgaaagttcgaaagctgtgctctggacagtgttctcaaagcaactttctgaagccgtgtggaaaactgactctgtgtgggtcccgtatccctgtggcatccagacctggcctctcttcatttcattattattggccaatatttctttcagccatttcatttcttatctattaaaatggcttgcccataaaggaactgcataggattatcccctgacattccaagagcaaaataaagctcttgagagtaattgttgtctcagtcatgcttgctgattacagttagcacaaaagaaaaattcagctgcctgacaatacaggaaatgttctcagatgctgatgtttgtaaggtccggtggggccatgaggaagaagaggagctgaaggtaagaaactcataaacaagatgactctttgatgcatgaacaagatttgaaaatctcaagcctgtaaagaatacccctgctatttaaataaagctcataccaagaggtaacattttgccccgggccaaattcaggggtctagtgccctgcattcctttgaggcaaaaaataaatgggctatgactggttaaatgtccaaaa

SEQ ID NO: 2067 - protein, 375 aa, Homo sapiens
MDAIHIGMSSTPLVKHTAGAGLKANRPRVMSKSGHSNVRIDKVDGIYLLYLQDLWTTVIDMKWRYKLTLFAATFVMTWFLFGVIYYAIAFIHGDLEPGEPISNHTPCIMKVDSLTGAFLFSLESQTTIGYGVRSITEECPHAIFLLVAQLVITTLIEIFITGTFLAKIARPKKRAETIKFSHCAVITKQNGKLCLVIQVANMRKSLLIQCQLSGKLLQTHVTKEGERILLNQATVKFHVDSSSESPFLILPMTFYHVLDETSPLRDLTPQNLKEKEFELVVLLNATVESTSAVCQSRTSYIPEEIYWGFEFVPVVSLSKNGKYVADFSQFEQIRKSPDCTFYCADSEKQQLEEKYRQEDQRERELRTLLLQQSNV

SEQ ID NO: 2068 - DNA, 2919 bp, Homo sapiens
ctcctctgcccaatgtctcccaatctctttcctttctctcttcagttcctccaggtaattcttactcaaacttgtaccaacttgtttttgactgacagtgaacagtgagagagttttcttcattttgaggaaccctaaacacctatctttcccaaggcaacctgtctggactgagcatttctctgacttgacataacttcccatccagccaggagtctgcactcttcagtctttgcaggcagtagcagaatcccatggtagccaggtgggtgaaggggagcgaggacgttctacctgccttgaagaagacacctgacctgcggagtgagtgaccagtgtttccagagcctggcaatggatgccattcacatcggcatgtccagcacccccctggtgaagcacactgctggggctgggctcaaggccaacagaccccgcgtcatgtccaagagtgggcacagcaacgtgagaattgacaaagtggatggcatatacctactctacctgcaagacctgtggaccacagttatcgacatgaagtggagatacaaactcaccctgttcgctgccacttttgtgatgacctggttcctttttggagtcatctactatgccatcgcgtttattcatggggacttagaacccggtgagcccatttcaaatcataccccctgcatcatgaaagtggactctctcactggggcgtttctcttttccctggaatcccagacaaccattggctatggagtccgttccatcacagaggaatgtcctcatgccatcttcctgttggttgctcagttggtcatcacgaccttgattgagatcttcatcaccggaaccttcctggccaaaatcgccagacccaaaaagcgggctgagaccatcaagttcagccactgtgcagtcatcaccaagcagaatgggaagctgtgcttggtgattcaggtagccaatatgaggaagagcctcttgattcagtgccagctctctggcaagctcctgcagacccacgtcaccaaggagggggagcggattctcctcaaccaagccactgtcaaattccacgtggactcctcctctgagagccccttcctcattctgcccatgacattctaccatgtgctggatgagacgagccccctgagagacctcacaccccaaaacctaaaggagaaggagtttgagcttgtggtcctcctcaatgccactgtggaatccaccagcgctgtctgccagagccgaacatcttatatcccagaggaaatctactggggttttgagtttgtgcctgtggtatctctctccaaaaatggaaaatatgtggctgatttcagtcagtttgaacagattcggaaaagcccagattgcacattttactgtgcagattctgagaaacagcaactcgaggagaagtacaggcaggaggatcagagggaaagagaactgaggacacttttattacaacagagcaatgtctgatcacaggggcgccatccaggtttaaccctgcaagctgtttccacatcagaactcccttcaaacacaaagattgctgtgaaaacgaaaatgtgtagacgcactctcaaaaactgcacggacatacaaaatcaatcttttcctttgatcttgtggctaaaccagcatttctgtgtttgagagatttcctgttaggtgcttcgtctgaaagtgaactctcataattcaaattgtataaaataaagctacatttctaagagcttggtgtagggcaattggaataatgtcctgttagataaacagacatttagcaatcctgacattaaaaggaaatgtatttctatacaagattattagctgtaatacaagatatttatttaaccaatgaccttatggctgagagttgaattgtggttcagtattcattgatctcactgctttaaaacatgctctttttgttcaagcaggaaaaatattatatctaattatgtctatgtggtaatacctaaaaagaggtagagagactctatgttcacaaaatatagtaatttcatttttacctttcttcagtggactgaattgtatggaaggaaattgatcagatctgtaattcacaactgtggaaacctacacaaatggggctgatgccattgtttcctctattttattttatttatttttgaatccactatctctttccattcaaaatatttccattcaaaatgtggttcacagacccgccacatcagcaccatccgagagcttattagtaatgtgtagattctcatgtcccagccagacttacagaattggggtctgtatcttaacaagaaccccagatgatttgtgtacaaatgaaagttcgaaagctgtgctctggacagtgttctcaaagcaactttctgaagccgtgtggaaaactgactctgtgtgggtcccgtatccctgtggcatccagacctggcctctcttcatttcattattattggccaatatttctttcagccatttcatttcttatctattaaaatggcttgcccataaaggaactgcataggattatcccctgacattccaagagcaaaataaagctcttgagagtaattgttgtctcagtcatgcttgctgattacagttagcacaaaagaaaaattcagctgcctgacaatacaggaaatgttctcagatgctgatgtttgtaaggtccggtggggccatgaggaagaagaggagctgaaggtaagaaactcataaacaagatgactctttgatgcatgaacaagatttgaaaatctcaagcctgtaaagaatacccctgctatttaaataaagctcataccaagaggtaacattttgccccgggccaaattcaggggtctagtgccctgcattcctttgaggcaaaaaataaatgggctatgactggttaaatgtccaaaa

SEQ ID NO: 2069 - protein, 375 aa, Homo sapiens; identical to SEQ ID NO: 2067

SEQ ID NO: 2070 - DNA, 2732 bp, Homo sapiens
cagatctctgggatcttcagctgagattgggccccagcacctggactcaaggcagtagcagaatcccatggtagccaggtgggtgaaggggagcgaggacgttctacctgccttgaagaagacacctgacctgcggagtgagtgaccagtgtttccagagcctggcaatggatgccattcacatcggcatgtccagcacccccctggtgaagcacactgctggggctgggctcaaggccaacagaccccgcgtcatgtccaagagtgggcacagcaacgtgagaattgacaaagtggatggcatatacctactctacctgcaagacctgtggaccacagttatcgacatgaagtggagatacaaactcaccctgttcgctgccacttttgtgatgacctggttcctttttggagtcatctactatgccatcgcgtttattcatggggacttagaacccggtgagcccatttcaaatcataccccctgcatcatgaaagtggactctctcactggggcgtttctcttttccctggaatcccagacaaccattggctatggagtccgttccatcacagaggaatgtcctcatgccatcttcctgttggttgctcagttggtcatcacgaccttgattgagatcttcatcaccggaaccttcctggccaaaatcgccagacccaaaaagcgggctgagaccatcaagttcagccactgtgcagtcatcaccaagcagaatgggaagctgtgcttggtgattcaggtagccaatatgaggaagagcctcttgattcagtgccagctctctggcaagctcctgcagacccacgtcaccaaggagggggagcggattctcctcaaccaagccactgtcaaattccacgtggactcctcctctgagagccccttcctcattctgcccatgacattctaccatgtgctggatgagacgagccccctgagagacctcacaccccaaaacctaaaggagaaggagtttgagcttgtggtcctcctcaatgccactgtggaatccaccagcgctgtctgccagagccgaacatcttatatcccagaggaaatctactggggttttgagtttgtgcctgtggtatctctctccaaaaatggaaaatatgtggctgatttcagtcagtttgaacagattcggaaaagcccagattgcacattttactgtgcagattctgagaaacagcaactcgaggagaagtacaggcaggaggatcagagggaaagagaactgaggacacttttattacaacagagcaatgtctgatcacaggggcgccatccaggtttaaccctgcaagctgtttccacatcagaactcccttcaaacacaaagattgctgtgaaaacgaaaatgtgtagacgcactctcaaaaactgcacggacatacaaaatcaatcttttcctttgatcttgtggctaaaccagcatttctgtgtttgagagatttcctgttaggtgcttcgtctgaaagtgaactctcataattcaaattgtataaaataaagctacatttctaagagcttggtgtagggcaattggaataatgtcctgttagataaacagacatttagcaatcctgacattaaaaggaaatgtatttctatacaagattattagctgtaatacaagatatttatttaaccaatgaccttatggctgagagttgaattgtggttcagtattcattgatctcactgctttaaaacatgctctttttgttcaagcaggaaaaatattatatctaattatgtctatgtggtaatacctaaaaagaggtagagagactctatgttcacaaaatatagtaatttcatttttacctttcttcagtggactgaattgtatggaaggaaattgatcagatctgtaattcacaactgtggaaacctacacaaatggggctgatgccattgtttcctctattttattttatttatttttgaatccactatctctttccattcaaaatatttccattcaaaatgtggttcacagacccgccacatcagcaccatccgagagcttattagtaatgtgtagattctcatgtcccagccagacttacagaattggggtctgtatcttaacaagaaccccagatgatttgtgtacaaatgaaagttcgaaagctgtgctctggacagtgttctcaaagcaactttctgaagccgtgtggaaaactgactctgtgtgggtcccgtatccctgtggcatccagacctggcctctcttcatttcattattattggccaatatttctttcagccatttcatttcttatctattaaaatggcttgcccataaaggaactgcataggattatcccctgacattccaagagcaaaataaagctcttgagagtaattgttgtctcagtcatgcttgctgattacagttagcacaaaagaaaaattcagctgcctgacaatacaggaaatgttctcagatgctgatgtttgtaaggtccggtggggccatgaggaagaagaggagctgaaggtaagaaactcataaacaagatgactctttgatgcatgaacaagatttgaaaatctcaagcctgtaaagaatacccctgctatttaaataaagctcataccaagaggtaacattttgccccgggccaaattcaggggtctagtgccctgcattcctttgaggcaaaaaataaatgggctatgactggttaaatgtccaaaa

SEQ ID NO: 2071 - protein, 375 aa, Homo sapiens; identical to SEQ ID NO: 2067

SEQ ID NO: 2072 - DNA, 1923 bp, Homo sapiens
tcccgcggcggctggcgtcgggaaagtacagtaaaaagtccgagtgcagccgccgggcgcaggatgggatccggctcctccagctaccggcccaaggccatctacctggacatcgatggacgcattcagaaggtaatcttcagcaagtactgcaactccagcgacatcatggacctgttctgcatcgccaccggcctgcctcggaacacgaccatctccctgctgaccaccgacgacgccatggtctccatcgaccccaccatgcccgcgaattcagaacgcactccgtacaaagtgagacctgtggccatcaagcaactctccgagagagaagaattaatccagagcgtgctggcgcaggttgcagagcagttctcaagagcattcaaaatcaatgaactgaaagctgaagttgcaaatcacttggctgtcctagagaaacgcgtggaattggaaggactaaaagtggtggagattgagaaatgcaagagtgacattaagaagatgagggaggagctggcggccagaagcagcaggaccaactgcccctgtaagtacagttttttggataaccacaagaagttgactcctcgacgcgatgttcccacttaccccaagtacctgctctctccagagaccatcgaggccctgcggaagccgacctttgacgtctggctttgggagcccaatgagatgctgagctgcctggagcacatgtaccacgacctcgggctggtcagggacttcagcatcaaccctgtcaccctcaggaggtggctgttctgcgtccacgacaactacagaaacaaccccttccacaacttccggcactgcttctgcgtggcccagatgatgtacagcatggtctggctctgcagtctccaggagaagttctcacaaacggatatcctgatcctaatgacagcggccatctgccacgatctggaccatcccggctacaacaacacgtaccagatcaatgcccgcacagagctggcggtccgctacaatgacatctcaccgctggagaaccaccactgcgccgtggccttccagatcctcgccgagcctgagtgcaacatcttctccaacatcccacctgatgggttcaagcagatccgacagggaatgatcacattaatcttggccactgacatggcaagacatgcagaaattatggattctttcaaagagaaaatggagaattttgactacagcaacgaggagcacatgaccctgctgaagatgattttgataaaatgctgtgatatctctaacgaggtccgtccaatggaagtcgcagagccttgggtggactgtttattagaggaatattttatgcagagcgaccgtgagaagtcagaaggccttcctgtggcaccgttcatggaccgagacaaagtgaccaaggccacagcccagattgggttcatcaagtttgtcctgatcccaatgtttgaaacagtgaccaagctcttccccatggttgaggagatcatgctgcagccactttgggaatcccgagatcgctacgaggagctgaagcggatagatgacgccatgaaagagttacagaagaagactgacagcttgacgtctggggccaccgagaagtccagagagagaagcagagatgtgaaaaacagtgaaggagactgtgcctgaggaaagcggggggcgtggctgcagttctggacgggctggccgagctgcgcgggatccttgtgcagggaagagctgccctgggcacctggcaccacaagaccatgttttctaagaaccattttgttcactgatacaaaaaaaaaaaaaggaattcatgatgctgtacagaattttatttttaaactgtcttttaaataatatattcttatacggaaaaaaaaaaaaaaaaaaaaaaaaaaaaaaaaaaaaaaaaaaaaa

SEQ ID NO: 2073 - protein, 533 aa, Homo sapiens
MGSGSSSYRPKAIYLDIDGRIQKVIFSKYCNSSDIMDLFCIATGLPRNTTISLLTTDDAMVSIDPTMPANSERTPYKVRPVAIKQLSEREELIQSVLAQVAEQFSRAFKINELKAEVANHLAVLEKRVELEGLKVVEIEKCKSDIKKMREELAARSSRTNCPCKYSFLDNHKKLTPRRDVPTYPKYLLSPETIEALRKPTFDVWLWEPNEMLSCLEHMYHDLGLVRDFSINPVTLRRWLFCVHDNYRNNPFHNFRHCFCVAQMMYSMVWLCSLQEKFSQTDILILMTAAICHDLDHPGYNNTYQINARTELAVRYNDISPLENHHCAVAFQILAEPECNIFSNIPPDGFKQIRQGMITLILATDMARHAEIMDSFKEKMENFDYSNEEHMTLLKMILIKCCDISNEVRPMEVAEPWVDCLLEEYFMQSDREKSEGLPVAPFMDRDKVTKATAQIGFIKFVLIPMFETVTKLFPMVEEIMLQPLWESRDRYEELKRIDDAMKELQKKTDSLTSGATEKSRERSRDVKNSEGDCA

SEQ ID NO: 2074 - DNA, 1774 bp, Homo sapiens
tcccgcggcggctggcgtcgggaaagtacagtaaaaagtccgagtgcagccgccgggcgcaggatgggatccggctcctccagctaccggcccaaggccatctacctggacatcgatggacgcattcagaagcactccgtacaaagtgagacctgtggccatcaagcaactctccgagagagaagaattaatccagagcgtgctggcgcaggttgcagagcagttctcaagagcattcaaaatcaatgaactgaaagctgaagttgcaaatcacttggctgtcctagagaaacgcgtggaattggaaggactaaaagtggtggagattgagaaatgcaagagtgacattaagaagatgagggaggagctggcggccagaagcagcaggaccaactgcccctgtaagtacagttttttggataaccacaagaagttgactcctcgacgcgatgttcccacttaccccaagtacctgctctctccagagaccatcgaggccctgcggaagccgacctttgacgtctggctttgggagcccaatgagatgctgagctgcctggagcacatgtaccacgacctcgggctggtcagggacttcagcatcaaccctgtcaccctcaggaggtggctgttctgcgtccacgacaactacagaaacaaccccttccacaacttccggcactgcttctgcgtggcccagatgatgtacagcatggtctggctctgcagtctccaggagaagttctcacaaacggatatcctgatcctaatgacagcggccatctgccacgatctggaccatcccggctacaacaacacgtaccagatcaatgcccgcacagagctggcggtccgctacaatgacatctcaccgctggagaaccaccactgcgccgtggccttccagatcctcgccgagcctgagtgcaacatcttctccaacatcccacctgatgggttcaagcagatccgacagggaatgatcacattaatcttggccactgacatggcaagacatgcagaaattatggattctttcaaagagaaaatggagaattttgactacagcaacgaggagcacatgaccctgctgaagatgattttgataaaatgctgtgatatctctaacgaggtccgtccaatggaagtcgcagagccttgggtggactgtttattagaggaatattttatgcagagcgaccgtgagaagtcagaaggccttcctgtggcaccgttcatggaccgagacaaagtgaccaaggccacagcccagattgggttcatcaagtttgtcctgatcccaatgtttgaaacagtgaccaagctcttccccatggttgaggagatcatgctgcagccactttgggaatcccgagatcgctacgaggagctgaagcggatagatgacgccatgaaagagttacagaagaagactgacagcttgacgtctggggccaccgagaagtccagagagagaagcagagatgtgaaaaacagtgaaggagactgtgcctgaggaaagcggggggcgtggctgcagttctggacgggctggccgagctgcgcgggatccttgtgcagggaagagctgccctgggcacctggcaccacaagaccatgttttctaagaaccattttgttcactgatacaaaaaaaaaaaaaggaattcatgatgctgtacagaattttatttttaaactgtcttttaaataatatattcttatacggaaaaaaaaaaaaaaaaaaaaaaaaaaaaaaaaaaaaaaaaaaaaa

SEQ ID NO: 2075 - protein, 466 aa, Homo sapiens
MDAFRSTPYKVRPVAIKQLSEREELIQSVLAQVAEQFSRAFKINELKAEVANHLAVLEKRVELEGLKVVEIEKCKSDIKKMREELAARSSRTNCPCKYSFLDNHKKLTPRRDVPTYPKYLLSPETIEALRKPTFDVWLWEPNEMLSCLEHMYHDLGLVRDFSINPVTLRRWLFCVHDNYRNNPFHNFRHCFCVAQMMYSMVWLCSLQEKFSQTDILILMTAAICHDLDHPGYNNTYQINARTELAVRYNDISPLENHHCAVAFQILAEPECNIFSNIPPDGFKQIRQGMITLILATDMARHAEIMDSFKEKMENFDYSNEEHMTLLKMILIKCCDISNEVRPMEVAEPWVDCLLEEYFMQSDREKSEGLPVAPFMDRDKVTKATAQIGFIKFVLIPMFETVTKLFPMVEEIMLQPLWESRDRYEELKRIDDAMKELQKKTDSLTSGATEKSRERSRDVKNSEGDCA

SEQ ID NO: 2076 - DNA, 1719 bp, Homo sapiens
tcccgcggcggctggcgtcgggaaagtacagtaaaaagtccgagtgcagccgccgggcgcaggatgggatccggctcctccagctaccggcccaaggccatctacctggacatcgatggacgcattcagaagcactccgtacaaagtgagacctgtggccatcaagcaactctccgagcattcaaaatcaatgaactgaaagctgaagttgcaaatcacttggctgtcctagagaaacgcgtggaattggaaggactaaaagtggtggagattgagaaatgcaagagtgacattaagaagatgagggaggagctggcggccagaagcagcaggaccaactgcccctgtaagtacagttttttggataaccacaagaagttgactcctcgacgcgatgttcccacttaccccaagtacctgctctctccagagaccatcgaggccctgcggaagccgacctttgacgtctggctttgggagcccaatgagatgctgagctgcctggagcacatgtaccacgacctcgggctggtcagggacttcagcatcaaccctgtcaccctcaggaggtggctgttctgcgtccacgacaactacagaaacaaccccttccacaacttccggcactgcttctgcgtggcccagatgatgtacagcatggtctggctctgcagtctccaggagaagttctcacaaacggatatcctgatcctaatgacagcggccatctgccacgatctggaccatcccggctacaacaacacgtaccagatcaatgcccgcacagagctggcggtccgctacaatgacatctcaccgctggagaaccaccactgcgccgtggccttccagatcctcgccgagcctgagtgcaacatcttctccaacatcccacctgatgggttcaagcagatccgacagggaatgatcacattaatcttggccactgacatggcaagacatgcagaaattatggattctttcaaagagaaaatggagaattttgactacagcaacgaggagcacatgaccctgctgaagatgattttgataaaatgctgtgatatctctaacgaggtccgtccaatggaagtcgcagagccttgggtggactgtttattagaggaatattttatgcagagcgaccgtgagaagtcagaaggccttcctgtggcaccgttcatggaccgagacaaagtgaccaaggccacagcccagattgggttcatcaagtttgtcctgatcccaatgtttgaaacagtgaccaagctcttccccatggttgaggagatcatgctgcagccactttgggaatcccgagatcgctacgaggagctgaagcggatagatgacgccatgaaagagttacagaagaagactgacagcttgacgtctggggccaccgagaagtccagagagagaagcagagatgtgaaaaacagtgaaggagactgtgcctgaggaaagcggggggcgtggctgcagttctggacgggctggccgagctgcgcgggatccttgtgcagggaagagctgccctgggcacctggcaccacaagaccatgttttctaagaaccattttgttcactgatacaaaaaaaaaaaaaggaattcatgatgctgtacagaattttatttttaaactgtcttttaaataatatattcttatacggaaaaaaaaaaaaaaaaaaaaaaaaaaaaaaaaaaaaaaaaaaaaa

SEQ ID NO: 2077 - protein, 465 aa, Homo sapiens
MGSGSSSYRPKAIYLDIDGRIQKHSVQSETCGHQATLRAFKINELKAEVANHLAVLEKRVELEGLKVVEIEKCKSDIKKMREELAARSSRTNCPCKYSFLDNHKKLTPRRDVPTYPKYLLSPETIEALRKPTFDVWLWEPNEMLSCLEHMYHDLGLVRDFSINPVTLRRWLFCVHDNYRNNPFHNFRHCFCVAQMMYSMVWLCSLQEKFSQTDILILMTAAICHDLDHPGYNNTYQINARTELAVRYNDISPLENHHCAVAFQILAEPECNIFSNIPPDGFKQIRQGMITLILATDMARHAEIMDSFKEKMENFDYSNEEHMTLLKMILIKCCDISNEVRPMEVAEPWVDCLLEEYFMQSDREKSEGLPVAPFMDRDKVTKATAQIGFIKFVLIPMFETVTKLFPMVEEIMLQPLWESRDRYEELKRIDDAMKELQKKTDSLTSGATEKSRERSRDVKNSEGDCA

SEQ ID NO: 2078 - DNA, 1944 bp, Homo sapiens
tcccgcggcggctggcgtcgggaaagtacagtaaaaagtccgagtgcagccgccgggcgcaggatgggatccggctcctccagctaccggcccaaggccatctacctggacatcgatggacgcattcagaaggtaatcttcagcaagtactgcaactccagcgacatcatggacctgttctgcatcgccaccggcctgcctcggaacacgaccatctccctgctgaccaccgacgacgccatggtctccatcgaccccaccatgcccgcgaattcagaacggaatgagctcattctctatacatcactccgtaacttgttgtttttacctagtaaggagtcatgggcgtcccaccagcactccgtacaaagtgagacctgtggccatcaagcaactctccgagcattcaaaatcaatgaactgaaagctgaagttgcaaatcacttggctgtcctagagaaacgcgtggaattggaaggactaaaagtggtggagattgagaaatgcaagagtgacattaagaagatgagggaggagctggcggccagaagcagcaggaccaactgcccctgtaagtacagttttttggataaccacaagaagttgactcctcgacgcgatgttcccacttaccccaagtacctgctctctccagagaccatcgaggccctgcggaagccgacctttgacgtctggctttgggagcccaatgagatgctgagctgcctggagcacatgtaccacgacctcgggctggtcagggacttcagcatcaaccctgtcaccctcaggaggtggctgttctgcgtccacgacaactacagaaacaaccccttccacaacttccggcactgcttctgcgtggcccagatgatgtacagcatggtctggctctgcagtctccaggagaagttctcacaaacggatatcctgatcctaatgacagcggccatctgccacgatctggaccatcccggctacaacaacacgtaccagatcaatgcccgcacagagctggcggtccgctacaatgacatctcaccgctggagaaccaccactgcgccgtggccttccagatcctcgccgagcctgagtgcaacatcttctccaacatcccacctgatgggttcaagcagatccgacagggaatgatcacattaatcttggccactgacatggcaagacatgcagaaattatggattctttcaaagagaaaatggagaattttgactacagcaacgaggagcacatgaccctgctgaagatgattttgataaaatgctgtgatatctctaacgaggtccgtccaatggaagtcgcagagccttgggtggactgtttattagaggaatattttatgcagagcgaccgtgagaagtcagaaggccttcctgtggcaccgttcatggaccgagacaaagtgaccaaggccacagcccagattgggttcatcaagtttgtcctgatcccaatgtttgaaacagtgaccaagctcttccccatggttgaggagatcatgctgcagccactttgggaatcccgagatcgctacgaggagctgaagcggatagatgacgccatgaaagagttacagaagaagactgacagcttgacgtctggggccaccgagaagtccagagagagaagcagagatgtgaaaaacagtgaaggagactgtgcctgaggaaagcggggggcgtggctgcagttctggacgggctggccgagctgcgcgggatccttgtgcagggaagagctgccctgggcacctggcaccacaagaccatgttttctaagaaccattttgttcactgatacaaaaaaaaaaaaaggaattcatgatgctgtacagaattttatttttaaactgtcttttaaataatatattcttatacggaaaaaaaaaaaaaaaaaaaaaaaaaaaaaaaaaaaaaaaaaaaaa

SEQ ID NO: 2079 - protein, 540 aa, Homo sapiens
MGSGSSSYRPKAIYLDIDGRIQKVIFSKYCNSSDIMDLFCIATGLPRNTTISLLTTDDAMVSIDPTMPANSERNELILYTSLRNLLFLPSKESWASHQHSVQSETCGHQATLRAFKINELKAEVANHLAVLEKRVELEGLKVVEIEKCKSDIKKMREELAARSSRTNCPCKYSFLDNHKKLTPRRDVPTYPKYLLSPETIEALRKPTFDVWLWEPNEMLSCLEHMYHDLGLVRDFSINPVTLRRWLFCVHDNYRNNPFHNFRHCFCVAQMMYSMVWLCSLQEKFSQTDILILMTAAICHDLDHPGYNNTYQINARTELAVRYNDISPLENHHCAVAFQILAEPECNIFSNIPPDGFKQIRQGMITLILATDMARHAEIMDSFKEKMENFDYSNEEHMTLLKMILIKCCDISNEVRPMEVAEPWVDCLLEEYFMQSDREKSEGLPVAPFMDRDKVTKATAQIGFIKFVLIPMFETVTKLFPMVEEIMLQPLWESRDRYEELKRIDDAMKELQKKTDSLTSGATEKSRERSRDVKNSEGDCA

SEQ ID NO: 2080 - DNA, 1852 bp, Homo sapiens
tcccgcggcggctggcgtcgggaaagtacagtaaaaagtccgagtgcagccgccgggcgcaggatgggatccggctcctccagctaccggcccaaggccatctacctggacatcgatggacgcattcagaaggaacacgaccatctccctgctgaccaccgacgacgccatggtctccatcgaccccaccatgcccgcgaattcagaacgcactccgtacaaagtgagacctgtggccatcaagcaactctccgagagagaagaattaatccagagcgtgctggcgcaggttgcagagcagttctcaagagcattcaaaatcaatgaactgaaagctgaagttgcaaatcacttggctgtcctagagaaacgcgtggaattggaaggactaaaagtggtggagattgagaaatgcaagagtgacattaagaagatgagggaggagctggcggccagaagcagcaggaccaactgcccctgtaagtacagttttttggataaccacaagaagttgactcctcgacgcgatgttcccacttaccccaagtacctgctctctccagagaccatcgaggccctgcggaagccgacctttgacgtctggctttgggagcccaatgagatgctgagctgcctggagcacatgtaccacgacctcgggctggtcagggacttcagcatcaaccctgtcaccctcaggaggtggctgttctgcgtccacgacaactacagaaacaaccccttccacaacttccggcactgcttctgcgtggcccagatgatgtacagcatggtctggctctgcagtctccaggagaagttctcacaaacggatatcctgatcctaatgacagcggccatctgccacgatctggaccatcccggctacaacaacacgtaccagatcaatgcccgcacagagctggcggtccgctacaatgacatctcaccgctggagaaccaccactgcgccgtggccttccagatcctcgccgagcctgagtgcaacatcttctccaacatcccacctgatgggttcaagcagatccgacagggaatgatcacattaatcttggccactgacatggcaagacatgcagaaattatggattctttcaaagagaaaatggagaattttgactacagcaacgaggagcacatgaccctgctgaagatgattttgataaaatgctgtgatatctctaacgaggtccgtccaatggaagtcgcagagccttgggtggactgtttattagaggaatattttatgcagagcgaccgtgagaagtcagaaggccttcctgtggcaccgttcatggaccgagacaaagtgaccaaggccacagcccagattgggttcatcaagtttgtcctgatcccaatgtttgaaacagtgaccaagctcttccccatggttgaggagatcatgctgcagccactttgggaatcccgagatcgctacgaggagctgaagcggatagatgacgccatgaaagagttacagaagaagactgacagcttgacgtctggggccaccgagaagtccagagagagaagcagagatgtgaaaaacagtgaaggagactgtgcctgaggaaagcggggggcgtggctgcagttctggacgggctggccgagctgcgcgggatccttgtgcagggaagagctgccctgggcacctggcaccacaagaccatgttttctaagaaccattttgttcactgatacaaaaaaaaaaaaaggaattcatgatgctgtacagaattttatttttaaactgtcttttaaataatatattcttatacggaaaaaaaaaaaaaaaaaaaaaaaaaaaaaaaaaaaaaaaaaaaaa

SEQ ID NO: 2081 - protein, 492 aa, Homo sapiens
MDAFRRNTTISLLTTDDAMVSIDPTMPANSERTPYKVRPVAIKQLSEREELIQSVLAQVAEQFSRAFKINELKAEVANHLAVLEKRVELEGLKVVEIEKCKSDIKKMREELAARSSRTNCPCKYSFLDNHKKLTPRRDVPTYPKYLLSPETIEALRKPTFDVWLWEPNEMLSCLEHMYHDLGLVRDFSINPVTLRRWLFCVHDNYRNNPFHNFRHCFCVAQMMYSMVWLCSLQEKFSQTDILILMTAAICHDLDHPGYNNTYQINARTELAVRYNDISPLENHHCAVAFQILAEPECNIFSNIPPDGFKQIRQGMITLILATDMARHAEIMDSFKEKMENFDYSNEEHMTLLKMILIKCCDISNEVRPMEVAEPWVDCLLEEYFMQSDREKSEGLPVAPFMDRDKVTKATAQIGFIKFVLIPMFETVTKLFPMVEEIMLQPLWESRDRYEELKRIDDAMKELQKKTDSLTSGATEKSRERSRDVKNSEGDCA

SEQ ID NO: 2082 - DNA, 1730 bp, Homo sapiens
tcccgcggcggctggcgtcgggaaagtacagtaaaaagtccgagtgcagccgccgggcgcaggatgggatccggctcctccagctaccggcccaaggccatctacctggacatcgatggacgcattcagaagagagagaagaattaatccagagcgtgctggcgcaggttgcagagcagttctcaagagcattcaaaatcaatgaactgaaagctgaagttgcaaatcacttggctgtcctagagaaacgcgtggaattggaaggactaaaagtggtggagattgagaaatgcaagagtgacattaagaagatgagggaggagctggcggccagaagcagcaggaccaactgcccctgtaagtacagttttttggataaccacaagaagttgactcctcgacgcgatgttcccacttaccccaagtacctgctctctccagagaccatcgaggccctgcggaagccgacctttgacgtctggctttgggagcccaatgagatgctgagctgcctggagcacatgtaccacgacctcgggctggtcagggacttcagcatcaaccctgtcaccctcaggaggtggctgttctgcgtccacgacaactacagaaacaaccccttccacaacttccggcactgcttctgcgtggcccagatgatgtacagcatggtctggctctgcagtctccaggagaagttctcacaaacggatatcctgatcctaatgacagcggccatctgccacgatctggaccatcccggctacaacaacacgtaccagatcaatgcccgcacagagctggcggtccgctacaatgacatctcaccgctggagaaccaccactgcgccgtggccttccagatcctcgccgagcctgagtgcaacatcttctccaacatcccacctgatgggttcaagcagatccgacagggaatgatcacattaatcttggccactgacatggcaagacatgcagaaattatggattctttcaaagagaaaatggagaattttgactacagcaacgaggagcacatgaccctgctgaagatgattttgataaaatgctgtgatatctctaacgaggtccgtccaatggaagtcgcagagccttgggtggactgtttattagaggaatattttatgcagagcgaccgtgagaagtcagaaggccttcctgtggcaccgttcatggaccgagacaaagtgaccaaggccacagcccagattgggttcatcaagtttgtcctgatcccaatgtttgaaacagtgaccaagctcttccccatggttgaggagatcatgctgcagccactttgggaatcccgagatcgctacgaggagctgaagcggatagatgacgccatgaaagagttacagaagaagactgacagcttgacgtctggggccaccgagaagtccagagagagaagcagagatgtgaaaaacagtgaaggagactgtgcctgaggaaagcggggggcgtggctgcagttctggacgggctggccgagctgcgcgggatccttgtgcagggaagagctgccctgggcacctggcaccacaagaccatgttttctaagaaccattttgttcactgatacaaaaaaaaaaaaaggaattcatgatgctgtacagaattttatttttaaactgtcttttaaataatatattcttatacggaaaaaaaaaaaaaaaaaaaaaaaaaaaaaaaaaaaaaaaaaaaaa

SEQ ID NO: 2083 - protein, 386 aa, Homo sapiens
MREELAARSSRTNCPCKYSFLDNHKKLTPRRDVPTYPKYLLSPETIEALRKPTFDVWLWEPNEMLSCLEHMYHDLGLVRDFSINPVTLRRWLFCVHDNYRNNPFHNFRHCFCVAQMMYSMVWLCSLQEKFSQTDILILMTAAICHDLDHPGYNNTYQINARTELAVRYNDISPLENHHCAVAFQILAEPECNIFSNIPPDGFKQIRQGMITLILATDMARHAEIMDSFKEKMENFDYSNEEHMTLLKMILIKCCDISNEVRPMEVAEPWVDCLLEEYFMQSDREKSEGLPVAPFMDRDKVTKATAQIGFIKFVLIPMFETVTKLFPMVEEIMLQPLWESRDRYEELKRIDDAMKELQKKTDSLTSGATEKSRERSRDVKNSEGDCA

SEQ ID NO: 2084 - DNA, 1910 bp, Homo sapiens
tcccgcggcggctggcgtcgggaaagtacagtaaaaagtccgagtgcagccgccgggcgcaggatgggatccggctcctccagctaccggcccaaggccatctacctggacatcgatggacgcattcagaagctggtgtcgaggacaagagaaccacaagccgtggccagtctgctgagagaccactgagggacagacgggttgtgggcctggagcagccccggagggaaggagcatttgaaagtggacaggtagagcccaggcccagagagccccagggctgctaccaggaaggccagcgcatccctccagagagagaagaattaatccagagcgtgctggcgcaggttgcagagcagttctcaagagcattcaaaatcaatgaactgaaagctgaagttgcaaatcacttggctgtcctagagaaacgcgtggaattggaaggactaaaagtggtggagattgagaaatgcaagagtgacattaagaagatgagggaggagctggcggccagaagcagcaggaccaactgcccctgtaagtacagttttttggataaccacaagaagttgactcctcgacgcgatgttcccacttaccccaagtacctgctctctccagagaccatcgaggccctgcggaagccgacctttgacgtctggctttgggagcccaatgagatgctgagctgcctggagcacatgtaccacgacctcgggctggtcagggacttcagcatcaaccctgtcaccctcaggaggtggctgttctgcgtccacgacaactacagaaacaaccccttccacaacttccggcactgcttctgcgtggcccagatgatgtacagcatggtctggctctgcagtctccaggagaagttctcacaaacggatatcctgatcctaatgacagcggccatctgccacgatctggaccatcccggctacaacaacacgtaccagatcaatgcccgcacagagctggcggtccgctacaatgacatctcaccgctggagaaccaccactgcgccgtggccttccagatcctcgccgagcctgagtgcaacatcttctccaacatcccacctgatgggttcaagcagatccgacagggaatgatcacattaatcttggccactgacatggcaagacatgcagaaattatggattctttcaaagagaaaatggagaattttgactacagcaacgaggagcacatgaccctgctgaagatgattttgataaaatgctgtgatatctctaacgaggtccgtccaatggaagtcgcagagccttgggtggactgtttattagaggaatattttatgcagagcgaccgtgagaagtcagaaggccttcctgtggcaccgttcatggaccgagacaaagtgaccaaggccacagcccagattgggttcatcaagtttgtcctgatcccaatgtttgaaacagtgaccaagctcttccccatggttgaggagatcatgctgcagccactttgggaatcccgagatcgctacgaggagctgaagcggatagatgacgccatgaaagagttacagaagaagactgacagcttgacgtctggggccaccgagaagtccagagagagaagcagagatgtgaaaaacagtgaaggagactgtgcctgaggaaagcggggggcgtggctgcagttctggacgggctggccgagctgcgcgggatccttgtgcagggaagagctgccctgggcacctggcaccacaagaccatgttttctaagaaccattttgttcactgatacaaaaaaaaaaaaaggaattcatgatgctgtacagaattttatttttaaactgtcttttaaataatatattcttatacggaaaaaaaaaaaaaaaaaaaaaaaaaaaaaaaaaaaaaaaaaaaaa

SEQ ID NO: 2085 - protein, 386 aa, Homo sapiens; identical to SEQ ID NO: 2083

SEQ ID NO: 2086 - DNA, 1845 bp, Homo sapiens
tcccgcggcggctggcgtcgggaaagtacagtaaaaagtccgagtgcagccgccgggcgcaggatgggatccggctcctccagctaccggcccaaggccatctacctggacatcgatggacgcattcagaaggtaatcttcagcaagtactgcaactccagcgacatcatggacctgttctgcatcgccaccggcctgcctcgcactccgtacaaagtgagacctgtggccatcaagcaactctccgagagagaagaattaatccagagcgtgctggcgcaggttgcagagcagttctcaagagcattcaaaatcaatgaactgaaagctgaagttgcaaatcacttggctgtcctagagaaacgcgtggaattggaaggactaaaagtggtggagattgagaaatgcaagagtgacattaagaagatgagggaggagctggcggccagaagcagcaggaccaactgcccctgtaagtacagttttttggataaccacaagaagttgactcctcgacgcgatgttcccacttaccccaagtacctgctctctccagagaccatcgaggccctgcggaagccgacctttgacgtctggctttgggagcccaatgagatgctgagctgcctggagcacatgtaccacgacctcgggctggtcagggacttcagcatcaaccctgtcaccctcaggaggtggctgttctgcgtccacgacaactacagaaacaaccccttccacaacttccggcactgcttctgcgtggcccagatgatgtacagcatggtctggctctgcagtctccaggagaagttctcacaaacggatatcctgatcctaatgacagcggccatctgccacgatctggaccatcccggctacaacaacacgtaccagatcaatgcccgcacagagctggcggtccgctacaatgacatctcaccgctggagaaccaccactgcgccgtggccttccagatcctcgccgagcctgagtgcaacatcttctccaacatcccacctgatgggttcaagcagatccgacagggaatgatcacattaatcttggccactgacatggcaagacatgcagaaattatggattctttcaaagagaaaatggagaattttgactacagcaacgaggagcacatgaccctgctgaagatgattttgataaaatgctgtgatatctctaacgaggtccgtccaatggaagtcgcagagccttgggtggactgtttattagaggaatattttatgcagagcgaccgtgagaagtcagaaggccttcctgtggcaccgttcatggaccgagacaaagtgaccaaggccacagcccagattgggttcatcaagtttgtcctgatcccaatgtttgaaacagtgaccaagctcttccccatggttgaggagatcatgctgcagccactttgggaatcccgagatcgctacgaggagctgaagcggatagatgacgccatgaaagagttacagaagaagactgacagcttgacgtctggggccaccgagaagtccagagagagaagcagagatgtgaaaaacagtgaaggagactgtgcctgaggaaagcggggggcgtggctgcagttctggacgggctggccgagctgcgcgggatccttgtgcagggaagagctgccctgggcacctggcaccacaagaccatgttttctaagaaccattttgttcactgatacaaaaaaaaaaaaaggaattcatgatgctgtacagaattttatttttaaactgtcttttaaataatatattcttatacggaaaaaaaaaaaaaaaaaaaaaaaaaaaaaaaaaaaaaaaaaaaaa

SEQ ID NO: 2087 - protein, 507 aa, Homo sapiens
MGSGSSSYRPKAIYLDIDGRIQKVIFSKYCNSSDIMDLFCIATGLPRTPYKVRPVAIKQLSEREELIQSVLAQVAEQFSRAFKINELKAEVANHLAVLEKRVELEGLKVVEIEKCKSDIKKMREELAARSSRTNCPCKYSFLDNHKKLTPRRDVPTYPKYLLSPETIEALRKPTFDVWLWEPNEMLSCLEHMYHDLGLVRDFSINPVTLRRWLFCVHDNYRNNPFHNFRHCFCVAQMMYSMVWLCSLQEKFSQTDILILMTAAICHDLDHPGYNNTYQINARTELAVRYNDISPLENHHCAVAFQILAEPECNIFSNIPPDGFKQIRQGMITLILATDMARHAEIMDSFKEKMENFDYSNEEHMTLLKMILIKCCDISNEVRPMEVAEPWVDCLLEEYFMQSDREKSEGLPVAPFMDRDKVTKATAQIGFIKFVLIPMFETVTKLFPMVEEIMLQPLWESRDRYEELKRIDDAMKELQKKTDSLTSGATEKSRERSRDVKNSEGDCA

SEQ ID NO: 2088 - DNA, 1675 bp, Homo sapiens
tcccgcggcggctggcgtcgggaaagtacagtaaaaagtccgagtgcagccgccgggcgcaggatgggatccggctcctccagctaccggcccaaggccatctacctggacatcgatggacgcattcagaagagcattcaaaatcaatgaactgaaagctgaagttgcaaatcacttggctgtcctagagaaacgcgtggaattggaaggactaaaagtggtggagattgagaaatgcaagagtgacattaagaagatgagggaggagctggcggccagaagcagcaggaccaactgcccctgtaagtacagttttttggataaccacaagaagttgactcctcgacgcgatgttcccacttaccccaagtacctgctctctccagagaccatcgaggccctgcggaagccgacctttgacgtctggctttgggagcccaatgagatgctgagctgcctggagcacatgtaccacgacctcgggctggtcagggacttcagcatcaaccctgtcaccctcaggaggtggctgttctgcgtccacgacaactacagaaacaaccccttccacaacttccggcactgcttctgcgtggcccagatgatgtacagcatggtctggctctgcagtctccaggagaagttctcacaaacggatatcctgatcctaatgacagcggccatctgccacgatctggaccatcccggctacaacaacacgtaccagatcaatgcccgcacagagctggcggtccgctacaatgacatctcaccgctggagaaccaccactgcgccgtggccttccagatcctcgccgagcctgagtgcaacatcttctccaacatcccacctgatgggttcaagcagatccgacagggaatgatcacattaatcttggccactgacatggcaagacatgcagaaattatggattctttcaaagagaaaatggagaattttgactacagcaacgaggagcacatgaccctgctgaagatgattttgataaaatgctgtgatatctctaacgaggtccgtccaatggaagtcgcagagccttgggtggactgtttattagaggaatattttatgcagagcgaccgtgagaagtcagaaggccttcctgtggcaccgttcatggaccgagacaaagtgaccaaggccacagcccagattgggttcatcaagtttgtcctgatcccaatgtttgaaacagtgaccaagctcttccccatggttgaggagatcatgctgcagccactttgggaatcccgagatcgctacgaggagctgaagcggatagatgacgccatgaaagagttacagaagaagactgacagcttgacgtctggggccaccgagaagtccagagagagaagcagagatgtgaaaaacagtgaaggagactgtgcctgaggaaagcggggggcgtggctgcagttctggacgggctggccgagctgcgcgggatccttgtgcagggaagagctgccctgggcacctggcaccacaagaccatgttttctaagaaccattttgttcactgatacaaaaaaaaaaaaaggaattcatgatgctgtacagaattttatttttaaactgtcttttaaataatatattcttatacggaaaaaaaaaaaaaaaaaaaaaaaaaaaaaaaaaaaaaaaaaaaaa

SEQ ID NO: 2089 - protein, 433 aa, Homo sapiens
MDAFRRAFKINELKAEVANHLAVLEKRVELEGLKVVEIEKCKSDIKKMREELAARSSRTNCPCKYSFLDNHKKLTPRRDVPTYPKYLLSPETIEALRKPTFDVWLWEPNEMLSCLEHMYHDLGLVRDFSINPVTLRRWLFCVHDNYRNNPFHNFRHCFCVAQMMYSMVWLCSLQEKFSQTDILILMTAAICHDLDHPGYNNTYQINARTELAVRYNDISPLENHHCAVAFQILAEPECNIFSNIPPDGFKQIRQGMITLILATDMARHAEIMDSFKEKMENFDYSNEEHMTLLKMILIKCCDISNEVRPMEVAEPWVDCLLEEYFMQSDREKSEGLPVAPFMDRDKVTKATAQIGFIKFVLIPMFETVTKLFPMVEEIMLQPLWESRDRYEELKRIDDAMKELQKKTDSLTSGATEKSRERSRDVKNSEGDCA

SEQ ID NO: 2090 - DNA, 1634 bp, Homo sapiens
tcccgcggcggctggcgtcgggaaagtacagtaaaaagtccgagtgcagccgccgggcgcaggatgggatccggctcctccagctaccggcccaaggccatctacctggacatcgatggacgcattcagaagcactccgtacaaagtgagacctgtggccatcaagcaactctccgagcattcaaaatcaatgaactgaaagctgaagttgcaaatcacttggctgtcctagagaaacgcgtggaatgaccaactgcccctgtaagtacagttttttggataaccacaagaagttgactcctcgacgcgatgttcccacttaccccaagtacctgctctctccagagaccatcgaggccctgcggaagccgacctttgacgtctggctttgggagcccaatgagatgctgagctgcctggagcacatgtaccacgacctcgggctggtcagggacttcagcatcaaccctgtcaccctcaggaggtggctgttctgcgtccacgacaactacagaaacaaccccttccacaacttccggcactgcttctgcgtggcccagatgatgtacagcatggtctggctctgcagtctccaggagaagttctcacaaacggatatcctgatcctaatgacagcggccatctgccacgatctggaccatcccggctacaacaacacgtaccagatcaatgcccgcacagagctggcggtccgctacaatgacatctcaccgctggagaaccaccactgcgccgtggccttccagatcctcgccgagcctgagtgcaacatcttctccaacatcccacctgatgggttcaagcagatccgacagggaatgatcacattaatcttggccactgacatggcaagacatgcagaaattatggattctttcaaagagaaaatggagaattttgactacagcaacgaggagcacatgaccctgctgaagatgattttgataaaatgctgtgatatctctaacgaggtccgtccaatggaagtcgcagagccttgggtggactgtttattagaggaatattttatgcagagcgaccgtgagaagtcagaaggccttcctgtggcaccgttcatggaccgagacaaagtgaccaaggccacagcccagattgggttcatcaagtttgtcctgatcccaatgtttgaaacagtgaccaagctcttccccatggttgaggagatcatgctgcagccactttgggaatcccgagatcgctacgaggagctgaagcggatagatgacgccatgaaagagttacagaagaagactgacagcttgacgtctggggccaccgagaagtccagagagagaagcagagatgtgaaaaacagtgaaggagactgtgcctgaggaaagcggggggcgtggctgcagttctggacgggctggccgagctgcgcgggatccttgtgcagggaagagctgccctgggcacctggcaccacaagaccatgttttctaagaaccattttgttcactgatacaaaaaaaaaaaaaggaattcatgatgctgtacagaattttatttttaaactgtcttttaaataatatattcttatacggaaaaaaaaaaaaaaaaaaaaaaaaaaaaaaaaaaaaaaaaaaaaa

SEQ ID NO: 2091 - protein, 376 aa, Homo sapiens
MTNCPCKYSFLDNHKKLTPRRDVPTYPKYLLSPETIEALRKPTFDVWLWEPNEMLSCLEHMYHDLGLVRDFSINPVTLRRWLFCVHDNYRNNPFHNFRHCFCVAQMMYSMVWLCSLQEKFSQTDILILMTAAICHDLDHPGYNNTYQINARTELAVRYNDISPLENHHCAVAFQILAEPECNIFSNIPPDGFKQIRQGMITLILATDMARHAEIMDSFKEKMENFDYSNEEHMTLLKMILIKCCDISNEVRPMEVAEPWVDCLLEEYFMQSDREKSEGLPVAPFMDRDKVTKATAQIGFIKFVLIPMFETVTKLFPMVEEIMLQPLWESRDRYEELKRIDDAMKELQKKTDSLTSGATEKSRERSRDVKNSEGDCA

SEQ ID NO: 2092 - DNA, 1753 bp, Homo sapiens
tcccgcggcggctggcgtcgggaaagtacagtaaaaagtccgagtgcagccgccgggcgcaggatgggatccggctcctccagctaccggcccaaggccatctacctggacatcgatggacgcattcagaaggaacacgaccatctccctgctgaccaccgacgacgccatggtctccatcgaccccaccatgcccgcgaattcagaacgagcattcaaaatcaatgaactgaaagctgaagttgcaaatcacttggctgtcctagagaaacgcgtggaattggaaggactaaaagtggtggagattgagaaatgcaagagtgacattaagaagatgagggaggagctggcggccagaagcagcaggaccaactgcccctgtaagtacagttttttggataaccacaagaagttgactcctcgacgcgatgttcccacttaccccaagtacctgctctctccagagaccatcgaggccctgcggaagccgacctttgacgtctggctttgggagcccaatgagatgctgagctgcctggagcacatgtaccacgacctcgggctggtcagggacttcagcatcaaccctgtcaccctcaggaggtggctgttctgcgtccacgacaactacagaaacaaccccttccacaacttccggcactgcttctgcgtggcccagatgatgtacagcatggtctggctctgcagtctccaggagaagttctcacaaacggatatcctgatcctaatgacagcggccatctgccacgatctggaccatcccggctacaacaacacgtaccagatcaatgcccgcacagagctggcggtccgctacaatgacatctcaccgctggagaaccaccactgcgccgtggccttccagatcctcgccgagcctgagtgcaacatcttctccaacatcccacctgatgggttcaagcagatccgacagggaatgatcacattaatcttggccactgacatggcaagacatgcagaaattatggattctttcaaagagaaaatggagaattttgactacagcaacgaggagcacatgaccctgctgaagatgattttgataaaatgctgtgatatctctaacgaggtccgtccaatggaagtcgcagagccttgggtggactgtttattagaggaatattttatgcagagcgaccgtgagaagtcagaaggccttcctgtggcaccgttcatggaccgagacaaagtgaccaaggccacagcccagattgggttcatcaagtttgtcctgatcccaatgtttgaaacagtgaccaagctcttccccatggttgaggagatcatgctgcagccactttgggaatcccgagatcgctacgaggagctgaagcggatagatgacgccatgaaagagttacagaagaagactgacagcttgacgtctggggccaccgagaagtccagagagagaagcagagatgtgaaaaacagtgaaggagactgtgcctgaggaaagcggggggcgtggctgcagttctggacgggctggccgagctgcgcgggatccttgtgcagggaagagctgccctgggcacctggcaccacaagaccatgttttctaagaaccattttgttcactgatacaaaaaaaaaaaaaggaattcatgatgctgtacagaattttatttttaaactgtcttttaaataatatattcttatacggaaaaaaaaaaaaaaaaaaaaaaaaaaaaaaaaaaaaaaaaaaaaa

SEQ ID NO: 2093 - protein, 459 aa, Homo sapiens
MDAFRRNTTISLLTTDDAMVSIDPTMPANSERAFKINELKAEVANHLAVLEKRVELEGLKVVEIEKCKSDIKKMREELAARSSRTNCPCKYSFLDNHKKLTPRRDVPTYPKYLLSPETIEALRKPTFDVWLWEPNEMLSCLEHMYHDLGLVRDFSINPVTLRRWLFCVHDNYRNNPFHNFRHCFCVAQMMYSMVWLCSLQEKFSQTDILILMTAAICHDLDHPGYNNTYQINARTELAVRYNDISPLENHHCAVAFQILAEPECNIFSNIPPDGFKQIRQGMITLILATDMARHAEIMDSFKEKMENFDYSNEEHMTLLKMILIKCCDISNEVRPMEVAEPWVDCLLEEYFMQSDREKSEGLPVAPFMDRDKVTKATAQIGFIKFVLIPMFETVTKLFPMVEEIMLQPLWESRDRYEELKRIDDAMKELQKKTDSLTSGATEKSRERSRDVKNSEGDCA

SEQ ID NO: 2094 - DNA, 1797 bp, Homo sapiens
tcccgcggcggctggcgtcgggaaagtacagtaaaaagtccgagtgcagccgccgggcgcaggatgggatccggctcctccagctaccggcccaaggccatctacctggacatcgatggacgcattcagaaggaacacgaccatctccctgctgaccaccgacgacgccatggtctccatcgaccccaccatgcccgcgaattcagaacgcactccgtacaaagtgagacctgtggccatcaagcaactctccgagcattcaaaatcaatgaactgaaagctgaagttgcaaatcacttggctgtcctagagaaacgcgtggaattggaaggactaaaagtggtggagattgagaaatgcaagagtgacattaagaagatgagggaggagctggcggccagaagcagcaggaccaactgcccctgtaagtacagttttttggataaccacaagaagttgactcctcgacgcgatgttcccacttaccccaagtacctgctctctccagagaccatcgaggccctgcggaagccgacctttgacgtctggctttgggagcccaatgagatgctgagctgcctggagcacatgtaccacgacctcgggctggtcagggacttcagcatcaaccctgtcaccctcaggaggtggctgttctgcgtccacgacaactacagaaacaaccccttccacaacttccggcactgcttctgcgtggcccagatgatgtacagcatggtctggctctgcagtctccaggagaagttctcacaaacggatatcctgatcctaatgacagcggccatctgccacgatctggaccatcccggctacaacaacacgtaccagatcaatgcccgcacagagctggcggtccgctacaatgacatctcaccgctggagaaccaccactgcgccgtggccttccagatcctcgccgagcctgagtgcaacatcttctccaacatcccacctgatgggttcaagcagatccgacagggaatgatcacattaatcttggccactgacatggcaagacatgcagaaattatggattctttcaaagagaaaatggagaattttgactacagcaacgaggagcacatgaccctgctgaagatgattttgataaaatgctgtgatatctctaacgaggtccgtccaatggaagtcgcagagccttgggtggactgtttattagaggaatattttatgcagagcgaccgtgagaagtcagaaggccttcctgtggcaccgttcatggaccgagacaaagtgaccaaggccacagcccagattgggttcatcaagtttgtcctgatcccaatgtttgaaacagtgaccaagctcttccccatggttgaggagatcatgctgcagccactttgggaatcccgagatcgctacgaggagctgaagcggatagatgacgccatgaaagagttacagaagaagactgacagcttgacgtctggggccaccgagaagtccagagagagaagcagagatgtgaaaaacagtgaaggagactgtgcctgaggaaagcggggggcgtggctgcagttctggacgggctggccgagctgcgcgggatccttgtgcagggaagagctgccctgggcacctggcaccacaagaccatgttttctaagaaccattttgttcactgatacaaaaaaaaaaaaaggaattcatgatgctgtacagaattttatttttaaactgtcttttaaataatatattcttatacggaaaaaaaaaaaaaaaaaaaaaaaaaaaaaaaaaaaaaaaaaaaaa

SEQ ID NO: 2095 - protein, 491 aa, Homo sapiens
MGSGSSSYRPKAIYLDIDGRIQKEHDHLPADHRRRHGLHRPHHAREFRTHSVQSETCGHQATLRAFKINELKAEVANHLAVLEKRVELEGLKVVEIEKCKSDIKKMREELAARSSRTNCPCKYSFLDNHKKLTPRRDVPTYPKYLLSPETIEALRKPTFDVWLWEPNEMLSCLEHMYHDLGLVRDFSINPVTLRRWLFCVHDNYRNNPFHNFRHCFCVAQMMYSMVWLCSLQEKFSQTDILILMTAAICHDLDHPGYNNTYQINARTELAVRYNDISPLENHHCAVAFQILAEPECNIFSNIPPDGFKQIRQGMITLILATDMARHAEIMDSFKEKMENFDYSNEEHMTLLKMILIKCCDISNEVRPMEVAEPWVDCLLEEYFMQSDREKSEGLPVAPFMDRDKVTKATAQIGFIKFVLIPMFETVTKLFPMVEEIMLQPLWESRDRYEELKRIDDAMKELQKKTDSLTSGATEKSRERSRDVKNSEGDCA

SEQ ID NO: 2096 - DNA, 1790 bp, Homo sapiens
tcccgcggcggctggcgtcgggaaagtacagtaaaaagtccgagtgcagccgccgggcgcaggatgggatccggctcctccagctaccggcccaaggccatctacctggacatcgatggacgcattcagaaggtaatcttcagcaagtactgcaactccagcgacatcatggacctgttctgcatcgccaccggcctgcctcgcactccgtacaaagtgagacctgtggccatcaagcaactctccgagcattcaaaatcaatgaactgaaagctgaagttgcaaatcacttggctgtcctagagaaacgcgtggaattggaaggactaaaagtggtggagattgagaaatgcaagagtgacattaagaagatgagggaggagctggcggccagaagcagcaggaccaactgcccctgtaagtacagttttttggataaccacaagaagttgactcctcgacgcgatgttcccacttaccccaagtacctgctctctccagagaccatcgaggccctgcggaagccgacctttgacgtctggctttgggagcccaatgagatgctgagctgcctggagcacatgtaccacgacctcgggctggtcagggacttcagcatcaaccctgtcaccctcaggaggtggctgttctgcgtccacgacaactacagaaacaaccccttccacaacttccggcactgcttctgcgtggcccagatgatgtacagcatggtctggctctgcagtctccaggagaagttctcacaaacggatatcctgatcctaatgacagcggccatctgccacgatctggaccatcccggctacaacaacacgtaccagatcaatgcccgcacagagctggcggtccgctacaatgacatctcaccgctggagaaccaccactgcgccgtggccttccagatcctcgccgagcctgagtgcaacatcttctccaacatcccacctgatgggttcaagcagatccgacagggaatgatcacattaatcttggccactgacatggcaagacatgcagaaattatggattctttcaaagagaaaatggagaattttgactacagcaacgaggagcacatgaccctgctgaagatgattttgataaaatgctgtgatatctctaacgaggtccgtccaatggaagtcgcagagccttgggtggactgtttattagaggaatattttatgcagagcgaccgtgagaagtcagaaggccttcctgtggcaccgttcatggaccgagacaaagtgaccaaggccacagcccagattgggttcatcaagtttgtcctgatcccaatgtttgaaacagtgaccaagctcttccccatggttgaggagatcatgctgcagccactttgggaatcccgagatcgctacgaggagctgaagcggatagatgacgccatgaaagagttacagaagaagactgacagcttgacgtctggggccaccgagaagtccagagagagaagcagagatgtgaaaaacagtgaaggagactgtgcctgaggaaagcggggggcgtggctgcagttctggacgggctggccgagctgcgcgggatccttgtgcagggaagagctgccctgggcacctggcaccacaagaccatgttttctaagaaccattttgttcactgatacaaaaaaaaaaaaaggaattcatgatgctgtacagaattttatttttaaactgtcttttaaataatatattcttatacggaaaaaaaaaaaaaaaaaaaaaaaaaaaaaaaaaaaaaaaaaaaaa

SEQ ID NO: 2097 - protein, 386 aa, Homo sapiens; identical to SEQ ID NO: 2083

SEQ ID NO: 2098 - DNA, 1590 bp, Homo sapiens
tcccgcggcggctggcgtcgggaaagtacagtaaaaagtccgagtgcagccgccgggcgcaggatgggatccggctcctccagctaccggcccaaggccatctacctggacatcgatggacgcattcagaagagcattcaaaatcaatgaactgaaagctgaagttgcaaatcacttggctgtcctagagaaacgcgtggaatgaccaactgcccctgtaagtacagttttttggataaccacaagaagttgactcctcgacgcgatgttcccacttaccccaagtacctgctctctccagagaccatcgaggccctgcggaagccgacctttgacgtctggctttgggagcccaatgagatgctgagctgcctggagcacatgtaccacgacctcgggctggtcagggacttcagcatcaaccctgtcaccctcaggaggtggctgttctgcgtccacgacaactacagaaacaaccccttccacaacttccggcactgcttctgcgtggcccagatgatgtacagcatggtctggctctgcagtctccaggagaagttctcacaaacggatatcctgatcctaatgacagcggccatctgccacgatctggaccatcccggctacaacaacacgtaccagatcaatgcccgcacagagctggcggtccgctacaatgacatctcaccgctggagaaccaccactgcgccgtggccttccagatcctcgccgagcctgagtgcaacatcttctccaacatcccacctgatgggttcaagcagatccgacagggaatgatcacattaatcttggccactgacatggcaagacatgcagaaattatggattctttcaaagagaaaatggagaattttgactacagcaacgaggagcacatgaccctgctgaagatgattttgataaaatgctgtgatatctctaacgaggtccgtccaatggaagtcgcagagccttgggtggactgtttattagaggaatattttatgcagagcgaccgtgagaagtcagaaggccttcctgtggcaccgttcatggaccgagacaaagtgaccaaggccacagcccagattgggttcatcaagtttgtcctgatcccaatgtttgaaacagtgaccaagctcttccccatggttgaggagatcatgctgcagccactttgggaatcccgagatcgctacgaggagctgaagcggatagatgacgccatgaaagagttacagaagaagactgacagcttgacgtctggggccaccgagaagtccagagagagaagcagagatgtgaaaaacagtgaaggagactgtgcctgaggaaagcggggggcgtggctgcagttctggacgggctggccgagctgcgcgggatccttgtgcagggaagagctgccctgggcacctggcaccacaagaccatgttttctaagaaccattttgttcactgatacaaaaaaaaaaaaaggaattcatgatgctgtacagaattttatttttaaactgtcttttaaataatatattcttatacggaaaaaaaaaaaaaaaaaaaaaaaaaaaaaaaaaaaaaaaaaaaaa

SEQ ID NO: 2099 - protein, 376 aa, Homo sapiens; identical to SEQ ID NO: 2091

SEQ ID NO: 2100 - DNA, 1954 bp, Homo sapiens
tcccgcggcggctggcgtcgggaaagtacagtaaaaagtccgagtgcagccgccgggcgcaggatgggatccggctcctccagctaccggcccaaggccatctacctggacatcgatggacgcattcagaagcactccgtacaaagtgagacctgtggccatcaagcaactctccgctggtgtcgaggacaagagaaccacaagccgtggccagtctgctgagagaccactgagggacagacgggttgtgggcctggagcagccccggagggaaggagcatttgaaagtggacaggtagagcccaggcccagagagccccagggctgctaccaggaaggccagcgcatccctccagagagagaagaattaatccagagcgtgctggcgcaggttgcagagcagttctcaagagcattcaaaatcaatgaactgaaagctgaagttgcaaatcacttggctgtcctagagaaacgcgtggaattggaaggactaaaagtggtggagattgagaaatgcaagagtgacattaagaagatgagggaggagctggcggccagaagcagcaggaccaactgcccctgtaagtacagttttttggataaccacaagaagttgactcctcgacgcgatgttcccacttaccccaagtacctgctctctccagagaccatcgaggccctgcggaagccgacctttgacgtctggctttgggagcccaatgagatgctgagctgcctggagcacatgtaccacgacctcgggctggtcagggacttcagcatcaaccctgtcaccctcaggaggtggctgttctgcgtccacgacaactacagaaacaaccccttccacaacttccggcactgcttctgcgtggcccagatgatgtacagcatggtctggctctgcagtctccaggagaagttctcacaaacggatatcctgatcctaatgacagcggccatctgccacgatctggaccatcccggctacaacaacacgtaccagatcaatgcccgcacagagctggcggtccgctacaatgacatctcaccgctggagaaccaccactgcgccgtggccttccagatcctcgccgagcctgagtgcaacatcttctccaacatcccacctgatgggttcaagcagatccgacagggaatgatcacattaatcttggccactgacatggcaagacatgcagaaattatggattctttcaaagagaaaatggagaattttgactacagcaacgaggagcacatgaccctgctgaagatgattttgataaaatgctgtgatatctctaacgaggtccgtccaatggaagtcgcagagccttgggtggactgtttattagaggaatattttatgcagagcgaccgtgagaagtcagaaggccttcctgtggcaccgttcatggaccgagacaaagtgaccaaggccacagcccagattgggttcatcaagtttgtcctgatcccaatgtttgaaacagtgaccaagctcttccccatggttgaggagatcatgctgcagccactttgggaatcccgagatcgctacgaggagctgaagcggatagatgacgccatgaaagagttacagaagaagactgacagcttgacgtctggggccaccgagaagtccagagagagaagcagagatgtgaaaaacagtgaaggagactgtgcctgaggaaagcggggggcgtggctgcagttctggacgggctggccgagctgcgcgggatccttgtgcagggaagagctgccctgggcacctggcaccacaagaccatgttttctaagaaccattttgttcactgatacaaaaaaaaaaaaaggaattcatgatgctgtacagaattttatttttaaactgtcttttaaataatatattcttatacggaaaaaaaaaaaaaaaaaaaaaaaaaaaaaaaaaaaaaaaaaaaaa

SEQ ID NO: 2101 - protein, 526 aa, Homo sapiens
MDAFRSTPYKVRPVAIKQLSAGVEDKRTTSRGQSAERPLRDRRVVGLEQPRREGAFESGQVEPRPREPQGCYQEGQRIPPEREELIQSVLAQVAEQFSRAFKINELKAEVANHLAVLEKRVELEGLKVVEIEKCKSDIKKMREELAARSSRTNCPCKYSFLDNHKKLTPRRDVPTYPKYLLSPETIEALRKPTFDVWLWEPNEMLSCLEHMYHDLGLVRDFSINPVTLRRWLFCVHDNYRNNPFHNFRHCFCVAQMMYSMVWLCSLQEKFSQTDILILMTAAICHDLDHPGYNNTYQINARTELAVRYNDISPLENHHCAVAFQILAEPECNIFSNIPPDGFKQIRQGMITLILATDMARHAEIMDSFKEKMENFDYSNEEHMTLLKMILIKCCDISNEVRPMEVAEPWVDCLLEEYFMQSDREKSEGLPVAPFMDRDKVTKATAQIGFIKFVLIPMFETVTKLFPMVEEIMLQPLWESRDRYEELKRIDDAMKELQKKTDSLTSGATEKSRERSRDVKNSEGDCA

SEQ ID NO: 2102 - DNA, 2032 bp, Homo sapiens
tcccgcggcggctggcgtcgggaaagtacagtaaaaagtccgagtgcagccgccgggcgcaggatgggatccggctcctccagctaccggcccaaggccatctacctggacatcgatggacgcattcagaaggaacacgaccatctccctgctgaccaccgacgacgccatggtctccatcgaccccaccatgcccgcgaattcagaacgcactccgtacaaagtgagacctgtggccatcaagcaactctccgctggtgtcgaggacaagagaaccacaagccgtggccagtctgctgagagaccactgagggacagacgggttgtgggcctggagcagccccggagggaaggagcatttgaaagtggacaggtagagcccaggcccagagagccccagggctgctaccaggaaggccagcgcatccctccagagagagaagaattaatccagagcgtgctggcgcaggttgcagagcagttctcaagagcattcaaaatcaatgaactgaaagctgaagttgcaaatcacttggctgtcctagagaaacgcgtggaattggaaggactaaaagtggtggagattgagaaatgcaagagtgacattaagaagatgagggaggagctggcggccagaagcagcaggaccaactgcccctgtaagtacagttttttggataaccacaagaagttgactcctcgacgcgatgttcccacttaccccaagtacctgctctctccagagaccatcgaggccctgcggaagccgacctttgacgtctggctttgggagcccaatgagatgctgagctgcctggagcacatgtaccacgacctcgggctggtcagggacttcagcatcaaccctgtcaccctcaggaggtggctgttctgcgtccacgacaactacagaaacaaccccttccacaacttccggcactgcttctgcgtggcccagatgatgtacagcatggtctggctctgcagtctccaggagaagttctcacaaacggatatcctgatcctaatgacagcggccatctgccacgatctggaccatcccggctacaacaacacgtaccagatcaatgcccgcacagagctggcggtccgctacaatgacatctcaccgctggagaaccaccactgcgccgtggccttccagatcctcgccgagcctgagtgcaacatcttctccaacatcccacctgatgggttcaagcagatccgacagggaatgatcacattaatcttggccactgacatggcaagacatgcagaaattatggattctttcaaagagaaaatggagaattttgactacagcaacgaggagcacatgaccctgctgaagatgattttgataaaatgctgtgatatctctaacgaggtccgtccaatggaagtcgcagagccttgggtggactgtttattagaggaatattttatgcagagcgaccgtgagaagtcagaaggccttcctgtggcaccgttcatggaccgagacaaagtgaccaaggccacagcccagattgggttcatcaagtttgtcctgatcccaatgtttgaaacagtgaccaagctcttccccatggttgaggagatcatgctgcagccactttgggaatcccgagatcgctacgaggagctgaagcggatagatgacgccatgaaagagttacagaagaagactgacagcttgacgtctggggccaccgagaagtccagagagagaagcagagatgtgaaaaacagtgaaggagactgtgcctgaggaaagcggggggcgtggctgcagttctggacgggctggccgagctgcgcgggatccttgtgcagggaagagctgccctgggcacctggcaccacaagaccatgttttctaagaaccattttgttcactgatacaaaaaaaaaaaaaggaattcatgatgctgtacagaattttatttttaaactgtcttttaaataatatattcttatacggaaaaaaaaaaaaaaaaaaaaaaaaaaaaaaaaaaaaaaaaaaaaa

SEQ ID NO: 2103 - protein, 552 aa, Homo sapiens
MDAFRRNTTISLLTTDDAMVSIDPTMPANSERTPYKVRPVAIKQLSAGVEDKRTTSRGQSAERPLRDRRVVGLEQPRREGAFESGQVEPRPREPQGCYQEGQRIPPEREELIQSVLAQVAEQFSRAFKINELKAEVANHLAVLEKRVELEGLKVVEIEKCKSDIKKMREELAARSSRTNCPCKYSFLDNHKKLTPRRDVPTYPKYLLSPETIEALRKPTFDVWLWEPNEMLSCLEHMYHDLGLVRDFSINPVTLRRWLFCVHDNYRNNPFHNFRHCFCVAQMMYSMVWLCSLQEKFSQTDILILMTAAICHDLDHPGYNNTYQINARTELAVRYNDISPLENHHCAVAFQILAEPECNIFSNIPPDGFKQIRQGMITLILATDMARHAEIMDSFKEKMENFDYSNEEHMTLLKMILIKCCDISNEVRPMEVAEPWVDCLLEEYFMQSDREKSEGLPVAPFMDRDKVTKATAQIGFIKFVLIPMFETVTKLFPMVEEIMLQPLWESRDRYEELKRIDDAMKELQKKTDSLTSGATEKSRERSRDVKNSEGDCA

SEQ ID NO: 2104 - DNA, 2025 bp, Homo sapiens
tcccgcggcggctggcgtcgggaaagtacagtaaaaagtccgagtgcagccgccgggcgcaggatgggatccggctcctccagctaccggcccaaggccatctacctggacatcgatggacgcattcagaaggtaatcttcagcaagtactgcaactccagcgacatcatggacctgttctgcatcgccaccggcctgcctcgcactccgtacaaagtgagacctgtggccatcaagcaactctccgctggtgtcgaggacaagagaaccacaagccgtggccagtctgctgagagaccactgagggacagacgggttgtgggcctggagcagccccggagggaaggagcatttgaaagtggacaggtagagcccaggcccagagagccccagggctgctaccaggaaggccagcgcatccctccagagagagaagaattaatccagagcgtgctggcgcaggttgcagagcagttctcaagagcattcaaaatcaatgaactgaaagctgaagttgcaaatcacttggctgtcctagagaaacgcgtggaattggaaggactaaaagtggtggagattgagaaatgcaagagtgacattaagaagatgagggaggagctggcggccagaagcagcaggaccaactgcccctgtaagtacagttttttggataaccacaagaagttgactcctcgacgcgatgttcccacttaccccaagtacctgctctctccagagaccatcgaggccctgcggaagccgacctttgacgtctggctttgggagcccaatgagatgctgagctgcctggagcacatgtaccacgacctcgggctggtcagggacttcagcatcaaccctgtcaccctcaggaggtggctgttctgcgtccacgacaactacagaaacaaccccttccacaacttccggcactgcttctgcgtggcccagatgatgtacagcatggtctggctctgcagtctccaggagaagttctcacaaacggatatcctgatcctaatgacagcggccatctgccacgatctggaccatcccggctacaacaacacgtaccagatcaatgcccgcacagagctggcggtccgctacaatgacatctcaccgctggagaaccaccactgcgccgtggccttccagatcctcgccgagcctgagtgcaacatcttctccaacatcccacctgatgggttcaagcagatccgacagggaatgatcacattaatcttggccactgacatggcaagacatgcagaaattatggattctttcaaagagaaaatggagaattttgactacagcaacgaggagcacatgaccctgctgaagatgattttgataaaatgctgtgatatctctaacgaggtccgtccaatggaagtcgcagagccttgggtggactgtttattagaggaatattttatgcagagcgaccgtgagaagtcagaaggccttcctgtggcaccgttcatggaccgagacaaagtgaccaaggccacagcccagattgggttcatcaagtttgtcctgatcccaatgtttgaaacagtgaccaagctcttccccatggttgaggagatcatgctgcagccactttgggaatcccgagatcgctacgaggagctgaagcggatagatgacgccatgaaagagttacagaagaagactgacagcttgacgtctggggccaccgagaagtccagagagagaagcagagatgtgaaaaacagtgaaggagactgtgcctgaggaaagcggggggcgtggctgcagttctggacgggctggccgagctgcgcgggatccttgtgcagggaagagctgccctgggcacctggcaccacaagaccatgttttctaagaaccattttgttcactgatacaaaaaaaaaaaaaggaattcatgatgctgtacagaattttatttttaaactgtcttttaaataatatattcttatacggaaaaaaaaaaaaaaaaaaaaaaaaaaaaaaaaaaaaaaaaaaaaa

SEQ ID NO: 2105 - protein, 567 aa, Homo sapiens
MGSGSSSYRPKAIYLDIDGRIQKVIFSKYCNSSDIMDLFCIATGLPRTPYKVRPVAIKQLSAGVEDKRTTSRGQSAERPLRDRRVVGLEQPRREGAFESGQVEPRPREPQGCYQEGQRIPPEREELIQSVLAQVAEQFSRAFKINELKAEVANHLAVLEKRVELEGLKVVEIEKCKSDIKKMREELAARSSRTNCPCKYSFLDNHKKLTPRRDVPTYPKYLLSPETIEALRKPTFDVWLWEPNEMLSCLEHMYHDLGLVRDFSINPVTLRRWLFCVHDNYRNNPFHNFRHCFCVAQMMYSMVWLCSLQEKFSQTDILILMTAAICHDLDHPGYNNTYQINARTELAVRYNDISPLENHHCAVAFQILAEPECNIFSNIPPDGFKQIRQGMITLILATDMARHAEIMDSFKEKMENFDYSNEEHMTLLKMILIKCCDISNEVRPMEVAEPWVDCLLEEYFMQSDREKSEGLPVAPFMDRDKVTKATAQIGFIKFVLIPMFETVTKLFPMVEEIMLQPLWESRDRYEELKRIDDAMKELQKKTDSLTSGATEKSRERSRDVKNSEGDCA

SEQ ID NO: 2106 - DNA, 1852 bp, Homo sapiens
tcccgcggcggctggcgtcgggaaagtacagtaaaaagtccgagtgcagccgccgggcgcaggatgggatccggctcctccagctaccggcccaaggccatctacctggacatcgatggacgcattcagaagcactccgtacaaagtgagacctgtggccatcaagcaactctccgcaaaagaatgcagattttgcattatctaaagagcggttccgtgagcccactgtgctgagtcacatatattccatcggtagagagaagaattaatccagagcgtgctggcgcaggttgcagagcagttctcaagagcattcaaaatcaatgaactgaaagctgaagttgcaaatcacttggctgtcctagagaaacgcgtggaattggaaggactaaaagtggtggagattgagaaatgcaagagtgacattaagaagatgagggaggagctggcggccagaagcagcaggaccaactgcccctgtaagtacagttttttggataaccacaagaagttgactcctcgacgcgatgttcccacttaccccaagtacctgctctctccagagaccatcgaggccctgcggaagccgacctttgacgtctggctttgggagcccaatgagatgctgagctgcctggagcacatgtaccacgacctcgggctggtcagggacttcagcatcaaccctgtcaccctcaggaggtggctgttctgcgtccacgacaactacagaaacaaccccttccacaacttccggcactgcttctgcgtggcccagatgatgtacagcatggtctggctctgcagtctccaggagaagttctcacaaacggatatcctgatcctaatgacagcggccatctgccacgatctggaccatcccggctacaacaacacgtaccagatcaatgcccgcacagagctggcggtccgctacaatgacatctcaccgctggagaaccaccactgcgccgtggccttccagatcctcgccgagcctgagtgcaacatcttctccaacatcccacctgatgggttcaagcagatccgacagggaatgatcacattaatcttggccactgacatggcaagacatgcagaaattatggattctttcaaagagaaaatggagaattttgactacagcaacgaggagcacatgaccctgctgaagatgattttgataaaatgctgtgatatctctaacgaggtccgtccaatggaagtcgcagagccttgggtggactgtttattagaggaatattttatgcagagcgaccgtgagaagtcagaaggccttcctgtggcaccgttcatggaccgagacaaagtgaccaaggccacagcccagattgggttcatcaagtttgtcctgatcccaatgtttgaaacagtgaccaagctcttccccatggttgaggagatcatgctgcagccactttgggaatcccgagatcgctacgaggagctgaagcggatagatgacgccatgaaagagttacagaagaagactgacagcttgacgtctggggccaccgagaagtccagagagagaagcagagatgtgaaaaacagtgaaggagactgtgcctgaggaaagcggggggcgtggctgcagttctggacgggctggccgagctgcgcgggatccttgtgcagggaagagctgccctgggcacctggcaccacaagaccatgttttctaagaaccattttgttcactgatacaaaaaaaaaaaaaggaattcatgatgctgtacagaattttatttttaaactgtcttttaaataatatattcttatacggaaaaaaaaaaaaaaaaaaaaaaaaaaaaaaaaaaaaaaaaaaaaa

SEQ ID NO: 2107 - protein, 386 aa, Homo sapiens; identical to SEQ ID NO: 2083

SEQ ID NO: 2108 - DNA, 1977 bp, Homo sapiens
tcccgcggcggctggcgtcgggaaagtacagtaaaaagtccgagtgcagccgccgggcgcaggatgggatccggctcctccagctaccggcccaaggccatctacctggacatcgatggacgcattcagaaggaacacgaccatctccctgctgaccaccgacgacgccatggtctccatcgaccccaccatgcccgcgaattcagaacgcactccgtacaaagtgagacctgtggccatcaagcaactctccgctggtgtcgaggacaagagaaccacaagccgtggccagtctgctgagagaccactgagggacagacgggttgtgggcctggagcagccccggagggaaggagcatttgaaagtggacaggtagagcccaggcccagagagccccagggctgctaccaggaaggccagcgcatccctccagagcattcaaaatcaatgaactgaaagctgaagttgcaaatcacttggctgtcctagagaaacgcgtggaattggaaggactaaaagtggtggagattgagaaatgcaagagtgacattaagaagatgagggaggagctggcggccagaagcagcaggaccaactgcccctgtaagtacagttttttggataaccacaagaagttgactcctcgacgcgatgttcccacttaccccaagtacctgctctctccagagaccatcgaggccctgcggaagccgacctttgacgtctggctttgggagcccaatgagatgctgagctgcctggagcacatgtaccacgacctcgggctggtcagggacttcagcatcaaccctgtcaccctcaggaggtggctgttctgcgtccacgacaactacagaaacaaccccttccacaacttccggcactgcttctgcgtggcccagatgatgtacagcatggtctggctctgcagtctccaggagaagttctcacaaacggatatcctgatcctaatgacagcggccatctgccacgatctggaccatcccggctacaacaacacgtaccagatcaatgcccgcacagagctggcggtccgctacaatgacatctcaccgctggagaaccaccactgcgccgtggccttccagatcctcgccgagcctgagtgcaacatcttctccaacatcccacctgatgggttcaagcagatccgacagggaatgatcacattaatcttggccactgacatggcaagacatgcagaaattatggattctttcaaagagaaaatggagaattttgactacagcaacgaggagcacatgaccctgctgaagatgattttgataaaatgctgtgatatctctaacgaggtccgtccaatggaagtcgcagagccttgggtggactgtttattagaggaatattttatgcagagcgaccgtgagaagtcagaaggccttcctgtggcaccgttcatggaccgagacaaagtgaccaaggccacagcccagattgggttcatcaagtttgtcctgatcccaatgtttgaaacagtgaccaagctcttccccatggttgaggagatcatgctgcagccactttgggaatcccgagatcgctacgaggagctgaagcggatagatgacgccatgaaagagttacagaagaagactgacagcttgacgtctggggccaccgagaagtccagagagagaagcagagatgtgaaaaacagtgaaggagactgtgcctgaggaaagcggggggcgtggctgcagttctggacgggctggccgagctgcgcgggatccttgtgcagggaagagctgccctgggcacctggcaccacaagaccatgttttctaagaaccattttgttcactgatacaaaaaaaaaaaaaggaattcatgatgctgtacagaattttatttttaaactgtcttttaaataatatattcttatacggaaaaaaaaaaaaaaaaaaaaaaaaaaaaaaaaaaaaaaaaaaaaa

SEQ ID NO: 2109 - protein, 386 aa, Homo sapiens; identical to SEQ ID NO: 2083

SEQ ID NO: 2110 - DNA, 2103 bp, Homo sapiens
tcccgcggcggctggcgtcgggaaagtacagtaaaaagtccgagtgcagccgccgggcgcaggatgggatccggctcctccagctaccggcccaaggccatctacctggacatcgatggacgcattcagaaggtaatcttcagcaagtactgcaactccagcgacatcatggacctgttctgcatcgccaccggcctgcctcggaacacgaccatctccctgctgaccaccgacgacgccatggtctccatcgaccccaccatgcccgcgaattcagaacgcactccgtacaaagtgagacctgtggccatcaagcaactctccgctggtgtcgaggacaagagaaccacaagccgtggccagtctgctgagagaccactgagggacagacgggttgtgggcctggagcagccccggagggaaggagcatttgaaagtggacaggtagagcccaggcccagagagccccagggctgctaccaggaaggccagcgcatccctccagagagagaagaattaatccagagcgtgctggcgcaggttgcagagcagttctcaagagcattcaaaatcaatgaactgaaagctgaagttgcaaatcacttggctgtcctagagaaacgcgtggaattggaaggactaaaagtggtggagattgagaaatgcaagagtgacattaagaagatgagggaggagctggcggccagaagcagcaggaccaactgcccctgtaagtacagttttttggataaccacaagaagttgactcctcgacgcgatgttcccacttaccccaagtacctgctctctccagagaccatcgaggccctgcggaagccgacctttgacgtctggctttgggagcccaatgagatgctgagctgcctggagcacatgtaccacgacctcgggctggtcagggacttcagcatcaaccctgtcaccctcaggaggtggctgttctgcgtccacgacaactacagaaacaaccccttccacaacttccggcactgcttctgcgtggcccagatgatgtacagcatggtctggctctgcagtctccaggagaagttctcacaaacggatatcctgatcctaatgacagcggccatctgccacgatctggaccatcccggctacaacaacacgtaccagatcaatgcccgcacagagctggcggtccgctacaatgacatctcaccgctggagaaccaccactgcgccgtggccttccagatcctcgccgagcctgagtgcaacatcttctccaacatcccacctgatgggttcaagcagatccgacagggaatgatcacattaatcttggccactgacatggcaagacatgcagaaattatggattctttcaaagagaaaatggagaattttgactacagcaacgaggagcacatgaccctgctgaagatgattttgataaaatgctgtgatatctctaacgaggtccgtccaatggaagtcgcagagccttgggtggactgtttattagaggaatattttatgcagagcgaccgtgagaagtcagaaggccttcctgtggcaccgttcatggaccgagacaaagtgaccaaggccacagcccagattgggttcatcaagtttgtcctgatcccaatgtttgaaacagtgaccaagctcttccccatggttgaggagatcatgctgcagccactttgggaatcccgagatcgctacgaggagctgaagcggatagatgacgccatgaaagagttacagaagaagactgacagcttgacgtctggggccaccgagaagtccagagagagaagcagagatgtgaaaaacagtgaaggagactgtgcctgaggaaagcggggggcgtggctgcagttctggacgggctggccgagctgcgcgggatccttgtgcagggaagagctgccctgggcacctggcaccacaagaccatgttttctaagaaccattttgttcactgatacaaaaaaaaaaaaaggaattcatgatgctgtacagaattttatttttaaactgtcttttaaataatatattcttatacggaaaaaaaaaaaaaaaaaaaaaaaaaaaaaaaaaaaaaaaaaaaaa

SEQ ID NO: 2111 - protein, 593 aa, Homo sapiens
MGSGSSSYRPKAIYLDIDGRIQKVIFSKYCNSSDIMDLFCIATGLPRNTTISLLTTDDAMVSIDPTMPANSERTPYKVRPVAIKQLSAGVEDKRTTSRGQSAERPLRDRRVVGLEQPRREGAFESGQVEPRPREPQGCYQEGQRIPPEREELIQSVLAQVAEQFSRAFKINELKAEVANHLAVLEKRVELEGLKVVEIEKCKSDIKKMREELAARSSRTNCPCKYSFLDNHKKLTPRRDVPTYPKYLLSPETIEALRKPTFDVWLWEPNEMLSCLEHMYHDLGLVRDFSINPVTLRRWLFCVHDNYRNNPFHNFRHCFCVAQMMYSMVWLCSLQEKFSQTDILILMTAAICHDLDHPGYNNTYQINARTELAVRYNDISPLENHHCAVAFQILAEPECNIFSNIPPDGFKQIRQGMITLILATDMARHAEIMDSFKEKMENFDYSNEEHMTLLKMILIKCCDISNEVRPMEVAEPWVDCLLEEYFMQSDREKSEGLPVAPFMDRDKVTKATAQIGFIKFVLIPMFETVTKLFPMVEEIMLQPLWESRDRYEELKRIDDAMKELQKKTDSLTSGATEKSRERSRDVKNSEGDCA

SEQ ID NO: 2112 - DNA, 3402 bp, Homo sapiens
gacggcgacgcggcgcaggcggcgggagtgcgagctgggcccgtgtttcggccgccgccatggccgcggtggacctggagaagctgcgggcgtcgggcgcgggcaaggccatcggcgtcctgaccagcggcggcgacgcgcaaggtcccctgacaagcccaccaggccccctgctgagatggctgtgaccctgggctgacccgcccagtggcacattgactccgcctggagctggggagaccagagaggccctgtggttggacggtggcctgggtgcgctgctcctgccctctccttgccctgcctcagctgctgcctgccagaggcgtggcacctcacctcacacctgctccctgctgctgagccccacgccaagctggagagcggatgagaagcatgtgtaaccagggtagaggtcgagagtcctctcgtgggggtctccatgttcaagggagctgccgaggcttgagcaggagcccccagcaggaaactggctttgccaaggcccccgctgggacagactgtttctttcactgcagtcctgggagccgagggcaaggggacaggaaagaggaagtgacctcagagcctggtggcaccagcatcatgtccaggctggggggcatgaacgctgctgtccgggctgtgacgcgcatgggcatttatgtgggtgccaaagtcttcctcatctacgagggctatgagggcctcgtggagggaggtgagaacatcaagcaggccaactggctgagcgtctccaacatcatccagctgggcggcactatcattggcagcgctcgctgcaaggcctttaccaccagggaggggcgccgggcagcggcctacaacctggtccagcacggcatcaccaacctgtgcgtcatcggcggggatggcagcctcacaggtgccaacatcttccgcagcgagtggggcagcctgctggaggagctggtggcggaaggtaagatctcagagactacagcccggacctactcgcacctgaacatcgcgggcctagtgggctccatcgataacgacttctgcggcaccgacatgaccatcggcacggactcggccctccaccgcatcatggaggtcatcgatgccatcaccaccactgcccagagccaccagaggaccttcgtgctggaagtgatgggccggcactgcgggtacctggcgctggtatctgcactggcctcaggggccgactggctgttcatccccgaggctccacccgaggacggctgggagaacttcatgtgtgagaggctgggtgagactcggagccgtgggtcccgactgaacatcatcatcatcgctgagggtgccattgaccgcaacgggaagcccatctcgtccagctacgtgaaggacctggtggttcagaggctgggcttcgacacccgtgtaactgtgctgggccacgtgcagcggggagggacgccctctgccttcgaccggatcctgagcagcaagatgggcatggaggcggtgatggcgctgctggaagccacgcctgacacgccggcctgcgtggtcaccctctcggggaaccagtcagtgcggctgcccctcatggagtgcgtgcagatgaccaaggaagtgcagaaagccatggatgacaagaggtttgacgaggccacccagctccgtggtgggagcttcgagaacaactggaacatttacaagctcctcgcccaccagaagccccccaaggagaagtctaacttctccctggccatcctgaatgtgggggccccggcggctggcatgaatgcggccgtgcgctcggcggtgcggaccggcatctcccatggacacacagtatacgtggtgcacgatggcttcgaaggcctagccaagggtcaggtgcaagaagtaggctggcacgacgtggccggctggttggggcgtggtggctccatgctggggaccaagaggaccctgcccaagggccagctggagtccattgtggagaacatccgcatctatggtattcacgccctgctggtggtcggtgggtttgaggcctatgaaggggtgctgcagctggtggaggctcgcgggcgctacgaggagctctgcatcgtcatgtgtgtcatcccagccaccatcagcaacaacgtccctggcaccgacttcagcctgggctccgacactgctgtaaatgccgccatggagagctgtgaccgcatcaaacagtctgcctcggggaccaagcgccgtgtgttcatcgtggagaccatggggggttactgtggctacctggccaccgtgactggcattgctgtgggggccgacgccgcctacgtcttcgaggaccctttcaacatccacgacttaaaggtcaacgtggagcacatgacggagaagatgaagacagacattcagaggggcctggtgctgcggaacgagaagtgccatgactactacaccacggagttcctgtacaacctgtactcatcagagggcaagggcgtcttcgactgcaggaccaatgtcctgggccacctgcagcagggtggcgctccaaccccctttgaccggaactatgggaccaagctgggggtgaaggccatgctgtggttgtcggagaagctgcgcgaggtttaccgcaagggacgggtgttcgccaatgccccagactcggcctgcgtgatcggcctgaagaagaaggcggtggccttcagccccgtcactgagctcaagaaagacactgatttcgagcaccgcatgccacgggagcagtggtggctgagcctgcggctcatgctgaagatgctggcacaataccgcatcagtatggccgcctacgtgtcaggggagctggagcacgtgacccgccgcaccctgagcatggacaagggcttctgaggccagccatgcccacgcccctccccagcccccacccatgccagcgcagcgccagggctcagatggggcctgggctgttgtgtctggagcctgcaggcaggtgggggctgcgtccctgctcagcccatcccctgcctctatccctggccacctgccaggcctccctcgggctggtgtcttgagaccagcctgccaggccctccagcaggaggacagagtgccctggggcatccaccttcctgcccaggggacgtggcgctgtcggtgtttggaggctgctgccccctggctttggcgccccatgggccctcagcgtctccccatgctgggctcactacatgggccagcccttgctctacctggccggtaggctgctggcgcctaggttgtgttgagagggggatgcccctggccctgcctcactgtgacctgctcctgcccacgtgcagcacctgtcaccttttctagaaataaaatcaccctgactgtggggtgcatcggtctccggagaaaacaaaaaaa

SEQ ID NO: 2113 - protein, 827 aa, Homo sapiens
MCNQGRGRESSRGGLHVQGSCRGLSRSPQQETGFAKAPAGTDCFFHCSPGSRGQGDRKEEVTSEPGGTSIMSRLGGMNAAVRAVTRMGIYVGAKVFLIYEGYEGLVEGGENIKQANWLSVSNIIQLGGTIIGSARCKAFTTREGRRAAAYNLVQHGITNLCVIGGDGSLTGANIFRSEWGSLLEELVAEGKISETTARTYSHLNIAGLVGSIDNDFCGTDMTIGTDSALHRIMEVIDAITTTAQSHQRTFVLEVMGRHCGYLALVSALASGADWLFIPEAPPEDGWENFMCERLGETRSRGSRLNIIIIAEGAIDRNGKPISSSYVKDLVVQRLGFDTRVTVLGHVQRGGTPSAFDRILSSKMGMEAVMALLEATPDTPACVVTLSGNQSVRLPLMECVQMTKEVQKAMDDKRFDEATQLRGGSFENNWNIYKLLAHQKPPKEKSNFSLAILNVGAPAAGMNAAVRSAVRTGISHGHTVYVVHDGFEGLAKGQVQEVGWHDVAGWLGRGGSMLGTKRTLPKGQLESIVENIRIYGIHALLVVGGFEAYEGVLQLVEARGRYEELCIVMCVIPATISNNVPGTDFSLGSDTAVNAAMESCDRIKQSASGTKRRVFIVETMGGYCGYLATVTGIAVGADAAYVFEDPFNIHDLKVNVEHMTEKMKTDIQRGLVLRNEKCHDYYTTEFLYNLYSSEGKGVFDCRTNVLGHLQQGGAPTPFDRNYGTKLGVKAMLWLSEKLREVYRKGRVFANAPDSACVIGLKKKAVAFSPVTELKKDTDFEHRMPREQWWLSLRLMLKMLAQYRISMAAYVSGELEHVTRRTLSMDKGF

SEQ ID NO: 2114 - DNA, 2924 bp, Homo sapiens
gacggcgacgcggcgcaggcggcgggagtgcgagctgggcccgtgtttcggccgccgccatggccgcggtggacctggagaagctgcgggcgtcgggcgcgggcaaggccatcggcgtcctgaccagcggcggcgacgcgcaaggcatgaacgctgctgtccgggctgtgacgcgcatgggcatttatgtgggtgccaaagtcttcctcatctacgagggctatgagggcctcgtggagggaggtgagaacatcaagcaggccaactggctgagcgtctccaacatcatccagctgggcggcactatcattggcagcgctcgctgcaaggcctttaccaccagggaggggcgccgggcagcggcctacaacctggtccagcacggcatcaccaacctgtgcgtcatcggcggggatggcagcctcacaggtgccaacatcttccgcagcgagtggggcagcctgctggaggagctggtggcggaaggtaagatctcagagactacagcccggacctactcgcacctgaacatcgcgggcctagtgggctccatcgataacgacttctgcggcaccgacatgaccatcggcacggactcggccctccaccgcatcatggaggtcatcgatgccatcaccaccactgcccagagccaccagaggaccttcgtgctggaagtgatgggccggcactgcgggtacctggcgctggtatctgcactggcctcaggggccgactggctgttcatccccgaggctccacccgaggacggctgggagaacttcatgtgtgagaggctgggtgagactcggagccgtgggtcccgactgaacatcatcatcatcgctgagggtgccattgaccgcaacgggaagcccatctcgtccagctacgtgaaggacctggtggttcagaggctgggcttcgacacccgtgtaactgtgctgggccacgtgcagcggggagggacgccctctgccttcgaccggatcctgagcagcaagatgggcatggaggcggtgatggcgctgctggaagccacgcctgacacgccggcctgcgtggtcaccctctcggggaaccagtcagtgcggctgcccctcatggagtgcgtgcagatgaccaaggaagtgcagaaagccatggatgacaagaggtttgacgaggccacccagctccgtggtgggagcttcgagaacaactggaacatttacaagctcctcgcccaccagaagccccccaaggagaagtctaacttctccctggccatcctgaatgtgggggccccggcggctggcatgaatgcggccgtgcgctcggcggtgcggaccggcatctcccatggacacacagtatacgtggtgcacgatggcttcgaaggcctagccaagggtcaggtgcaagaagtaggctggcacgacgtggccggctggttggggcgtggtggctccatgctggggaccaagaggaccctgcccaagggccagctggagtccattgtggagaacatccgcatctatggtattcacgccctgctggtggtcggtgggtttgaggcctatgaaggggtgctgcagctggtggaggctcgcgggcgctacgaggagctctgcatcgtcatgtgtgtcatcccagccaccatcagcaacaacgtccctggcaccgacttcagcctgggctccgacactgctgtaaatgccgccatggagagctgtgaccgcatcaaacagtctgcctcggggaccaagcgccgtgtgttcatcgtggagaccatggggggttactgtggctacctggccaccgtgactggcattgctgtgggggccgacgccgcctacgtcttcgaggaccctttcaacatccacgacttaaaggtcaacgtggagcacatgacggagaagatgaagacagacattcagaggggcctggtgctgcggaacgagaagtgccatgactactacaccacggagttcctgtacaacctgtactcatcagagggcaagggcgtcttcgactgcaggaccaatgtcctgggccacctgcagcagggtggcgctccaaccccctttgaccggaactatgggaccaagctgggggtgaaggccatgctgtggttgtcggagaagctgcgcgaggtttaccgcaagggacgggtgttcgccaatgccccagactcggcctgcgtgatcggcctgaagaagaaggcggtggccttcagccccgtcactgagctcaagaaagacactgatttcgagcaccgcatgccacgggagcagtggtggctgagcctgcggctcatgctgaagatgctggcacaataccgcatcagtatggccgcctacgtgtcaggggagctggagcacgtgacccgccgcaccctgagcatggacaagggcttctgaggccagccatgcccacgcccctccccagcccccacccatgccagcgcagcgccagggctcagatggggcctgggctgttgtgtctggagcctgcaggcaggtgggggctgcgtccctgctcagcccatcccctgcctctatccctggccacctgccaggcctccctcgggctggtgtcttgagaccagcctgccaggccctccagcaggaggacagagtgccctggggcatccaccttcctgcccaggggacgtggcgctgtcggtgtttggaggctgctgccccctggctttggcgccccatgggccctcagcgtctccccatgctgggctcactacatgggccagcccttgctctacctggccggtaggctgctggcgcctaggttgtgttgagagggggatgcccctggccctgcctcactgtgacctgctcctgcccacgtgcagcacctgtcaccttttctagaaataaaatcaccctgactgtggggtgcatcggtctccggagaaaacaaaaaaa

SEQ ID NO: 2115 - protein, 780 aa, Homo sapiens
MAAVDLEKLRASGAGKAIGVLTSGGDAQGMNAAVRAVTRMGIYVGAKVFLIYEGYEGLVEGGENIKQANWLSVSNIIQLGGTIIGSARCKAFTTREGRRAAAYNLVQHGITNLCVIGGDGSLTGANIFRSEWGSLLEELVAEGKISETTARTYSHLNIAGLVGSIDNDFCGTDMTIGTDSALHRIMEVIDAITTTAQSHQRTFVLEVMGRHCGYLALVSALASGADWLFIPEAPPEDGWENFMCERLGETRSRGSRLNIIIIAEGAIDRNGKPISSSYVKDLVVQRLGFDTRVTVLGHVQRGGTPSAFDRILSSKMGMEAVMALLEATPDTPACVVTLSGNQSVRLPLMECVQMTKEVQKAMDDKRFDEATQLRGGSFENNWNIYKLLAHQKPPKEKSNFSLAILNVGAPAAGMNAAVRSAVRTGISHGHTVYVVHDGFEGLAKGQVQEVGWHDVAGWLGRGGSMLGTKRTLPKGQLESIVENIRIYGIHALLVVGGFEAYEGVLQLVEARGRYEELCIVMCVIPATISNNVPGTDFSLGSDTAVNAAMESCDRIKQSASGTKRRVFIVETMGGYCGYLATVTGIAVGADAAYVFEDPFNIHDLKVNVEHMTEKMKTDIQRGLVLRNEKCHDYYTTEFLYNLYSSEGKGVFDCRTNVLGHLQQGGAPTPFDRNYGTKLGVKAMLWLSEKLREVYRKGRVFANAPDSACVIGLKKKAVAFSPVTELKKDTDFEHRMPREQWWLSLRLMLKMLAQYRISMAAYVSGELEHVTRRTLSMDKGF

SEQ ID NO: 2116 - DNA, 2114 bp, Homo sapiens
ccgcgcagtcgtcacccgcccgggatcaggaggccgggggcgcccgccggtcgggcctgggcggccgcatgaagctgacgcggaagatggttctgacccgagccaaggcctcggagctgcacagcgtgcgcaagctcaactgctggggcagccgcctcacagatatctccatttgccaggagatgcccagcctggaggtgatcacgctcagtgtcaacagcatctccaccctggagcctgtgagccggtgccagcgcctgagtgagctgtacctgcggaggaaccgcatccccagcctggctgagctcttctacctgaaggggctgccgcgtctgcgggtgctgtggctggccgagaacccgtgctgcggcaccagcccccaccgctaccgcatgaccgtgctgcgcaccctgccgcgcctacagaagctggacaaccaggctgtgacggaggaggagctgtcccgtgcactgagtgagggagaggagatcactgcggccccagagagagagggcacaggccacggcggccccaagctatgctgcacactgagctccctcagctccgctgctgagactggccgggacccgctggacagcgaggaggaggcaaccagcggcgcccaggatgaacgtggcctgaagccgccttcccggggccagtttccttccctctcagccagggatgcctcgagcagccacaggggcaggaacgtcctgactgccatcctgctgctgctgcgggagctggatgcagaggggctggaggccgtgcagcagactgtgggcagccggctgcaggccctgcgtggggaagaggtgcaggagcacgccgagtgaccgcaggacctgaacgccgctccagcctccacggggaccccagcgtcttccccagcccccgggagctggagggtggctgccatggccgcagccccggccccacacaaaagcctccccggtttgccacatcggccgagggcaggagtgggtgttaggtactggctaaccggggcggtggagatgcctgtctacaccagtcctgtccccaggactccccttctgtggtctggaggttctaggctggcctgggctcttaaagggaggattttgcaggctgtcctccctaataaaagattttcccaaggttgatctggaggtgacgtttcccaaggcatggttgtgacagtcttcctgaaagcaagggccgtttctccacagaatgaggaggtcttcacggatggctttgccgattccagcccttggtccttggatagatttctgttgggcaagggagacttcgagaatgctggcacccatagcgacatctgccctgagctgctcagcaggcaggcagcagcctcccgcacccatgggagagagttttgttttcttggccgggctgggcaggtgcgccttcctttctctctcctgtgaagaactgcaggagggccctcagctgtgaggttgtggatgaacaggcctgttcgccctggggtccgggcctggcacaggaagcagctagactaggggagtccttggagcatctgagaggggttttctttcctctgggaagagtcgcaagtcttatgaggatgccacaatctgggcagtgacccgtggccctggggaccttcctagtgccccccaaaaccaaggaagcattcacgtgagatggggagtcagccttccagctggtgtgtaggaaagccaggtccctgggcccttgtcccatgtggggttgagatccagatctccatgagatattcccatcctccgccgagcggtgatgcgtgaccgtgtgtgcaggccgctgttctcccaagctcggggccatgccgtgccaccgtcaccagagccagctgcagcactggggcagccactgtcgccggacttggggaagcccagggtgaagacagtcactcatccgtgcaagctctccagaagggatgcaagctctccagaaggggtgtgatctctgagcagtggggagtggagtcaccactcgggacatagagggtggacagttcaggcctgtgtctgcctccttgggactgtggagtgggtgccctcagtaaagcgctttgttggaatggtaaaaaaaaaaaaaaaaaaaaa

SEQ ID NO: 2117 - protein, 256 aa, Homo sapiens
MKLTRKMVLTRAKASELHSVRKLNCWGSRLTDISICQEMPSLEVITLSVNSISTLEPVSRCQRLSELYLRRNRIPSLAELFYLKGLPRLRVLWLAENPCCGTSPHRYRMTVLRTLPRLQKLDNQAVTEEELSRALSEGEEITAAPEREGTGHGGPKLCCTLSSLSSAAETGRDPLDSEEEATSGAQDERGLKPPSRGQFPSLSARDASSSHRGRNVLTAILLLLRELDAEGLEAVQQTVGSRLQALRGEEVQEHAE

SEQ ID NO: 2118 - DNA, 5879 bp, Homo sapiens
caaccaccccatgtgtctctagaaccccagtgtagcgagctggagagaggactgtcctgagggcagcaggcctggttgcagctggcgtgggggtctcagaatggagccctcagccctgaggaaagctggctcggagcaggaggagggctttgaggggctgcccagaagggtcactgacctggggatggtctccaatctccggcgcagcaacagcagcctcttcaagagctggaggctacagtgccccttcggcaacaatgacaagcaagaaagcctcagttcgtggattcctgaaaacatcaagaagaaagaatgcgtgtattttgtggaaagttccaaactgtctgatgctgggaaggtggtgtgtcagtgtggctacacgcatgagcagcacttggaggaggctaccaagccccacaccttccagggcacacagtgggacccaaagaaacatgtccaggagatgccaaccgatgcctttggcgacatcgtcttcacgggcctgagccagaaggtgaaaaagtacgtccgagtctcccaggacacgccctccagcgtgatctaccacctcatgacccagcactgggggctggacgtccccaatctcttgatctcggtgaccgggggggccaagaacttcaacatgaagccgcggctgaagagcattttccgcagaggcctggtcaaggtggctcagaccacaggggcctggatcatcacaggggggtcccacaccggcgtcatgaagcaggtaggcgaggcggtgcgggacttcagcctgagcagcagctacaaggaaggcgagctcatcaccatcggagtcgccacctggggcactgtccaccgccgcgagggcctgatccatcccacgggcagcttccccgccgagtacatactggatgaggatggccaagggaacctgacctgcctagacagcaaccactctcacttcatcctcgtggacgacgggacccacggccagtacggggtggagattcctctgaggaccaggctggagaagttcatatcggagcagaccaaggaaagaggaggtgtggccatcaagatccccatcgtgtgcgtggtgctggagggcggcccgggcacgttgcacaccatcgacaacgccaccaccaacggcaccccctgtgtggttgtggagggctcgggccgcgtggccgacgtcattgcccaggtggccaacctgcctgtctcggacatcactatctccctgatccagcagaaactgagcgtgttcttccaggagatgtttgagaccttcacggaaagcaggattgtcgagtggaccaaaaagatccaagatatcgtccggaggcggcagctgctgactgtcttccgggaaggcaaggatggtcagcaggacgtggatgtggccatcttgcaggccttgctgaaagcctcacggagccaagaccactttggccacgagaactgggaccaccagctgaaactggcagtggcatggaatcgcgtggacattgcccgcagtgagatcttcatggatgagtggcagtggaagccttcagatctgcaccccacgatgacagctgcactcatctccaacaagcctgagtttgtgaagctcttcctggagaacggggtgcagctgaaggagtttgtcacctgggacaccttgctctacctgtacgagaacctggacccctcctgcctgttccacagcaagctgcagaaggtgctggtggaggatcccgagcgcccggcttgcgcgcccgcggcgccccgcctgcagatgcaccacgtggcccaggtgctgcgggagctgctgggggacttcacgcagccgctttatccccggccccggcacaacgaccggctgcggctcctgctgcccgttccccacgtcaagctcaacgtgcagggagtgagcctccggtccctctacaagcgttcctcaggccatgtgaccttcaccatggaccccatccgtgaccttctcatttgggccattgtccagaaccgtcgggagctggcaggaatcatctgggctcagagccaggactgcatcgcagcggccttggcctgcagcaagatcctgaaggaactgtccaaggaggaggaggacacggacagctcggaggagatgctggcgctggcggaggagtatgagcacagagccatcggggtcttcaccgagtgctaccggaaggacgaagagagagcccagaaactgctcacccgcgtgtccgaggcctgggggaagaccacctgcctgcagctcgccctggaggccaaggacatgaagtttgtgtctcacgggggcatccaggccttcctgaccaaggtgtggtggggccagctctccgtggacaatgggctgtggcgtgtgaccctgtgcatgctggccttcccgctgctcctcaccggcctcatctccttcagggagaagaggctgcaggatgtgggcacccccgcggcccgcgcccgtgccttcttcaccgcacccgtggtggtcttccacctgaacatcctctcctacttcgccttcctctgcctgttcgcctacgtgctcatggtggacttccagcctgtgccctcctggtgcgagtgtgccatctacctctggctcttctccttggtgtgcgaggagatgcggcagtagctcttctatgaccctgacgagtgcgggctgatgaagaaggcagccttgtacttcagtgacttctggaataagctggacgtcggcgcaatcttgctcttcgtggcagggctgacctgcaggctcatcccggcgacgctgtaccccgggcgcgtcatcctctctctggacttcatcctgttctgcctccggctcatgcacatttttaccatcagtaagacgctggggcccaagatcatcattgtgaagcggatgatgaaggacgtcttcttcttcctcttcctgctggctgtgtgggtggtgtccttcggggtggccaagcaggccatcctcatccacaacgagcgccgggtggactggctgttccgaggggccgtctaccactcctacctcaccatcttcgggcagatcccgggctacatcgacggtgtgaacttcaacccggagcactgcagccccaatggcaccgacccctacaagcctaagtgccccgagagcgacgcgacgcagcagaggccggccttccctgagtggctgacggtcctcctactctgcctctacctgctcttcaccaacatcctgctgctcaacctcctcatcgccatgttcaactacaccttccagcaggtgcaggagcacacggaccagatttggaagttccagcgccatgacctgatcgaggagtaccacggccgccccgccgcgccgccccccttcatcctcctcagccacctgcagctcttcatcaagagggtggtcctgaagactccggccaagaggcacaagcagctcaagaacaagctggagaagaacgaggaggcggccctgctatcctgggagatctacctgaaggagaactacctccagaaccgacagttccagcaaaagcagcggcccgagcagaagatcgaggacatcagcaataaggttgacgccatggtggacctgctggacctggacccactgaagaggtcgggctccatggagcagaggttggcctccctggaggagcaggtggcccagacagcccgagccctgcactggatcgtgaggacgctgcgggccagcggcttcagctcggaggcggacgtccccactctggcctcccagaaggccgcggaggagccggatgctgagccgggaggcaggaagaagacggaggagccgggcgacagctaccacgtgaatgcccggcacctcctctaccccaactgccctgtcacgcgcttccccgtgcccaacgagaaggtgccctgggagacggagttcctgatctatgacccacccttttacacggcagagaggaaggacgcggccgccatggaccccatgggagacaccctggagccactgtccacgatccagtacaacgtggtggatggcctgagggaccgccggagcttccacgggccgtacacagtgcaggccgggttgcccctgaaccccatgggccgcacaggactgcgtgggcgcgggagcctcagctgcttcggacccaaccacacgctgtaccccatggtcacgcggtggaggcggaacgaggatggagccatctgcaggaagagcataaagaagatgctggaagtgctggtggtgaagctccctctctccgagcactgggccctgcctgggggctcccgggagccaggggagatgctacctcggaagctgaagcggatcctccggcaggagcactggccgtcttttgaaaacttgctgaagtgcggcatggaggtgtacaaaggctacatggatgacccgaggaacacggacaatgcctggatcgagacggtggccgtcagcgtccacttccaggaccagaatgacgtggagctgaacaggctgaactctaacctgcacgcctgcgactcgggggcctccatccgatggcaggtggtggacaggcgcatcccactctatgcgaaccacaagaccctcctccagaaggcagccgctgagttcggggctcactactgactgtgccctcaggctgggcggctccagtccatagacgttccccccagaaaccagggcttctctctcctgagcctggccaggactcaggctgttcctgggccctgcacatgatggggtttggtggacccagtgcccctcacggctgccgcaagtctgctgcagatgacctcatgaactggaaggggtcaaggtgacccgggaggagagctcaagacagggcacaggctactcagagctgaggggcccctgggacccttggccatcaggcgaggggctgggcctgtgcagctgggcccttggccagagtccactcccttcctggctgtgtcaccccgagcagctcatccaccatggaggtcattggcctgaggcaagttccccggagagtcggggtcccctgtggccccctcaggcctatgtctgtgaggaaggggccctgccactctccccaagagggcctccatgtttcgaggtgcctcaacatggagccttgcctggcctgggctaggggcactgtctgaactcctgactgtcaggataaactccgtgggggtacaggagcccagacaaagcccaggcctgtcaagagacgcagagggcccctgccagggttggccccagggaccctgggacgaggctgcagaagctctccctccctactccctgggagccacgtgctggccatgtggccagggacggcatgagcaggaggcggggacgtgggggccttctggtttggtgtcaacagctcacaggagcgtgaaccatgagggccctcaggaggggaacgtggtaaaacccaagacattaaatctgccatctcaggcctggctggctcttctgtgctttccacaaataaagttcctgacacgtccagggccaggggctgtgtgacggctgcctgaagttctcctcgatcccccggtgagcttcctgcagcctgtggatgtcctgcagcccctcagccctacccccaagtttctcctctgacccatcagctccctgtcttcattttcctaaacctgggctccagcatcgtccccaagcccaccaggccaggatgcaggcatccacatgccctcctccttggcttcccctgcgtggtggtgccaatgtgccctggcacccctgcagaggctccggatggagcctggggctgcctggccactgagcactggccgaggtgatgcccacccttccctggacaggcctctgtcttccacctgacccaaagctctctagccacccccttgtccccaggtat

SEQ ID NO: 2119 - protein, 846 aa, Homo sapiens
MEPSALRKAGSEQEEGFEGLPRRVTDLGMVSNLRRSNSSLFKSWRLQCPFGNNDKQESLSSWIPENIKKKECVYFVESSKLSDAGKVVCQCGYTHEQHLEEATKPHTFQGTQWDPKKHVQEMPTDAFGDIVFTGLSQKVKKYVRVSQDTPSSVIYHLMTQHWGLDVPNLLISVTGGAKNFNMKPRLKSIFRRGLVKVAQTTGAWIITGGSHTGVMKQVGEAVRDFSLSSSYKEGELITIGVATWGTVHRREGLIHPTGSFPAEYILDEDGQGNLTCLDSNHSHFILVDDGTHGQYGVEIPLRTRLEKFISEQTKERGGVAIKIPIVCVVLEGGPGTLHTIDNATTNGTPCVVVEGSGRVADVIAQVANLPVSDITISLIQQKLSVFFQEMFETFTESRIVEWTKKIQDIVRRRQLLTVFREGKDGQQDVDVAILQALLKASRSQDHFGHENWDHQLKLAVAWNRVDIARSEIFMDEWQWKPSDLHPTMTAALISNKPEFVKLFLENGVQLKEFVTWDTLLYLYENLDPSCLFHSKLQKVLVEDPERPACAPAAPRLQMHHVAQVLRELLGDFTQPLYPRPRHNDRLRLLLPVPHVKLNVQGVSLRSLYKRSSGHVTFTMDPIRDLLIWAIVQNRRELAGIIWAQSQDCIAAALACSKILKELSKEEEDTDSSEEMLALAEEYEHRAIGVFTECYRKDEERAQKLLTRVSEAWGKTTCLQLALEAKDMKFVSHGGIQAFLTKVWWGQLSVDNGLWRVTLCMLAFPLLLTGLISFREKRLQDVGTPAARARAFFTAPVVVFHLNILSYFAFLCLFAYVLMVDFQPVPSWCECAIYLWLFSLVCEEMRQ

SEQ ID NO: 2120 - DNA, 5876 bp, Homo sapiens
caaccaccccatgtgtctctagaaccccagtgtagcgagctggagagaggactgtcctgagggcagcaggcctggttgcagctggcgtgggggtctcagaatggagccctcagccctgaggaaagctggctcggagcaggaggagggctttgaggggctgcccagaagggtcactgacctggggatggtctccaatctccggcgcagcaacagcagcctcttcaagagctggaggctacagtgccccttcggcaacaatgacaagcaagaaagcctcagttcgtggattcctgaaaacatcaagaagaaagaatgcgtgtattttgtggaaagttccaaactgtctgatgctgggaaggtggtgtgtcagtgtggctacacgcatgagcagcacttggaggaggctaccaagccccacaccttccagggcacacagtgggacccaaagaaacatgtccaggagatgccaaccgatgcctttggcgacatcgtcttcacgggcctgagccagaaggtgaaaaagtacgtccgagtctcccaggacacgccctccagcgtgatctaccacctcatgacccagcactgggggctggacgtccccaatctcttgatctcggtgaccgggggggccaagaacttcaacatgaagccgcggctgaagagcattttccgcagaggcctggtcaaggtggctcagaccacaggggcctggatcatcacaggggggtcccacaccggcgtcatgaagcaggtaggcgaggcggtgcgggacttcagcctgagcagcagctacaaggaaggcgagctcatcaccatcggagtcgccacctggggcactgtccaccgccgcgagggcctgatccatcccacgggcagcttccccgccgagtacatactggatgaggatggccaagggaacctgacctgcctagacagcaaccactctcacttcatcctcgtggacgacgggacccacggccagtacggggtggagattcctctgaggaccaggctggagaagttcatatcggagcagaccaaggaaagaggaggtgtggccatcaagatccccatcgtgtgcgtggtgctggagggcggcccgggcacgttgcacaccatcgacaacgccaccaccaacggcaccccctgtgtggttgtggagggctcgggccgcgtggccgacgtcattgcccaggtggccaacctgcctgtctcggacatcactatctccctgatccagcagaaactgagcgtgttcttccaggagatgtttgagaccttcacggaaagcaggattgtcgagtggaccaaaaagatccaagatatcgtccggaggcggcagctgctgactgtcttccgggaaggcaaggatggtcagcaggacgtggatgtggccatcttgcaggccttgctgaaagcctcacggagccaagaccactttggccacgagaactgggaccaccagctgaaactggcagtggcatggaatcgcgtggacattgcccgcagtgagatcttcatggatgagtggcagtggaagccttcagatctgcaccccacgatgacagctgcactcatctccaacaagcctgagtttgtgaagctcttcctggagaacggggtgcagctgaaggagtttgtcacctgggacaccttgctctacctgtacgagaacctggacccctcctgcctgttccacagcaagctgcagaaggtgctggtggaggatcccgagcgcccggcttgcgcgcccgcggcgccccgcctgcagatgcaccacgtggcccaggtgctgcgggagctgctgggggacttcacgcagccgctttatccccggccccggcacaacgaccggctgcggctcctgctgcccgttccccacgtcaagctcaacgtgcagggagtgagcctccggtccctctacaagcgttcctcaggccatgtgaccttcaccatggaccccatccgtgaccttctcatttgggccattgtccagaaccgtcgggagctggcaggaatcatctgggctcagagccaggactgcatcgcagcggccttggcctgcagcaagatcctgaaggaactgtccaaggaggaggaggacacggacagctcggaggagatgctggcgctggcggaggagtatgagcacagagccatcggggtcttcaccgagtgctaccggaaggacgaagagagagcccagaaactgctcacccgcgtgtccgaggcctgggggaagaccacctgcctgcagctcgccctggaggccaaggacatgaagtttgtgtctcacgggggcatccaggccttcctgaccaaggtgtggtggggccagctctccgtggacaatgggctgtggcgtgtgaccctgtgcatgctggccttcccgctgctcctcaccggcctcatctccttcagggagaagaggctgcaggatgtgggcacccccgcggcccgcgcccgtgccttcttcaccgcacccgtggtggtcttccacctgaacatcctctcctacttcgccttcctctgcctgttcgcctacgtgctcatggtggacttccagcctgtgccctcctggtgcgagtgtgccatctacctctggctcttctccttggtgtgcgaggagatgcggcagctcttctatgaccctgacgagtgcgggctgatgaagaaggcagccttgtacttcagtgacttctggaataagctggacgtcggcgcaatcttgctcttcgtggcagggctgacctgcaggctcatcccggcgacgctgtaccccgggcgcgtcatcctctctctggacttcatcctgttctgcctccggctcatgcacatttttaccatcagtaagacgctggggcccaagatcatcattgtgaagcggatgatgaaggacgtcttcttcttcctcttcctgctggctgtgtgggtggtgtccttcggggtggccaagcaggccatcctcatccacaacgagcgccgggtggactggctgttccgaggggccgtctaccactcctacctcaccatcttcgggcagatcccgggctacatcgacggtgtgaacttcaacccggagcactgcagccccaatggcaccgacccctacaagcctaagtgccccgagagcgacgcgacgcagcagaggccggccttccctgagtggctgacggtcctcctactctgcctctacctgctcttcaccaacatcctgctgctcaacctcctcatcgccatgttcaactacaccttccagcaggtgcaggagcacacggaccagatttggaagttccagcgccatgacctgatcgaggagtaccacggccgccccgccgcgccgccccccttcatcctcctcagccacctgcagctcttcatcaagagggtggtcctgaagactccggccaagaggcacaagcagctcaagaacaagctggagaagaacgaggaggcggccctgctatcctgggagatctacctgaaggagaactacctccagaaccgacagttccagcaaaagcagcggcccgagcagaagatcgaggacatcagcaataaggttgacgccatggtggacctgctggacctggacccactgaagaggtcgggctccatggagcagaggttggcctccctggaggagcaggtggcccagacagcccgagccctgcactggatcgtgaggacgctgcgggccagcggcttcagctcggaggcggacgtccccactctggcctcccagaaggccgcggaggagccggatgctgagccgggaggcaggaagaagacggaggagccgggcgacagctaccacgtgaatgcccggcacctcctctaccccaactgccctgtcacgcgcttccccgtgcccaacgagaaggtgccctgggagacggagttcctgatctatgacccacccttttacacggcagagaggaaggacgcggccgccatggaccccatgggagacaccctggagccactgtccacgatccagtacaacgtggtggatggcctgagggaccgccggagcttccacgggccgtacacagtgcaggccgggttgcccctgaaccccatgggccgcacaggactgcgtgggcgcgggagcctcagctgcttcggacccaaccacacgctgtaccccatggtcacgcggtggaggcggaacgaggatggagccatctgcaggaagagcataaagaagatgctggaagtgctggtggtgaagctccctctctccgagcactgggccctgcctgggggctcccgggagccaggggagatgctacctcggaagctgaagcggatcctccggcaggagcactggccgtcttttgaaaacttgctgaagtgcggcatggaggtgtacaaaggctacatggatgacccgaggaacacggacaatgcctggatcgagacggtggccgtcagcgtccacttccaggaccagaatgacgtggagctgaacaggctgaactctaacctgcacgcctgcgactcgggggcctccatccgatggcaggtggtggacaggcgcatcccactctatgcgaaccacaagaccctcctccagaaggcagccgctgagttcggggctcactactgactgtgccctcaggctgggcggctccagtccatagacgttccccccagaaaccagggcttctctctcctgagcctggccaggactcaggctgttcctgggccctgcacatgatggggtttggtggacccagtgcccctcacggctgccgcaagtctgctgcagatgacctcatgaactggaaggggtcaaggtgacccgggaggagagctcaagacagggcacaggctactcagagctgaggggcccctgggacccttggccatcaggcgaggggctgggcctgtgcagctgggcccttggccagagtccactcccttcctggctgtgtcaccccgagcagctcatccaccatggaggtcattggcctgaggcaagttccccggagagtcggggtcccctgtggccccctcaggcctatgtctgtgaggaaggggccctgccactctccccaagagggcctccatgtttcgaggtgcctcaacatggagccttgcctggcctgggctaggggcactgtctgaactcctgactgtcaggataaactccgtgggggtacaggagcccagacaaagcccaggcctgtcaagagacgcagagggcccctgccagggttggccccagggaccctgggacgaggctgcagaagctctccctccctactccctgggagccacgtgctggccatgtggccagggacggcatgagcaggaggcggggacgtgggggccttctggtttggtgtcaacagctcacaggagcgtgaaccatgagggccctcaggaggggaacgtggtaaaacccaagacattaaatctgccatctcaggcctggctggctcttctgtgctttccacaaataaagttcctgacacgtccagggccaggggctgtgtgacggctgcctgaagttctcctcgatcccccggtgagcttcctgcagcctgtggatgtcctgcagcccctcagccctacccccaagtttctcctctgacccatcagctccctgtcttcattttcctaaacctgggctccagcatcgtccccaagcccaccaggccaggatgcaggcatccacatgccctcctccttggcttcccctgcgtggtggtgccaatgtgccctggcacccctgcagaggctccggatggagcctggggctgcctggccactgagcactggccgaggtgatgcccacccttccctggacaggcctctgtcttccacctgacccaaagctctctagccacccccttgtccccaggtat

SEQ ID NO: 2121 - protein, 1503 aa, Homo sapiens
MEPSALRKAGSEQEEGFEGLPRRVTDLGMVSNLRRSNSSLFKSWRLQCPFGNNDKQESLSSWIPENIKKKECVYFVESSKLSDAGKVVCQCGYTHEQHLEEATKPHTFQGTQWDPKKHVQEMPTDAFGDIVFTGLSQKVKKYVRVSQDTPSSVIYHLMTQHWGLDVPNLLISVTGGAKNFNMKPRLKSIFRRGLVKVAQTTGAWIITGGSHTGVMKQVGEAVRDFSLSSSYKEGELITIGVATWGTVHRREGLIHPTGSFPAEYILDEDGQGNLTCLDSNHSHFILVDDGTHGQYGVEIPLRTRLEKFISEQTKERGGVAIKIPIVCVVLEGGPGTLHTIDNATTNGTPCVVVEGSGRVADVIAQVANLPVSDITISLIQQKLSVFFQEMFETFTESRIVEWTKKIQDIVRRRQLLTVFREGKDGQQDVDVAILQALLKASRSQDHFGHENWDHQLKLAVAWNRVDIARSEIFMDEWQWKPSDLHPTMTAALISNKPEFVKLFLENGVQLKEFVTWDTLLYLYENLDPSCLFHSKLQKVLVEDPERPACAPAAPRLQMHHVAQVLRELLGDFTQPLYPRPRHNDRLRLLLPVPHVKLNVQGVSLRSLYKRSSGHVTFTMDPIRDLLIWAIVQNRRELAGIIWAQSQDCIAAALACSKILKELSKEEEDTDSSEEMLALAEEYEHRAIGVFTECYRKDEERAQKLLTRVSEAWGKTTCLQLALEAKDMKFVSHGGIQAFLTKVWWGQLSVDNGLWRVTLCMLAFPLLLTGLISFREKRLQDVGTPAARARAFFTAPVVVFHLNILSYFAFLCLFAYVLMVDFQPVPSWCECAIYLWLFSLVCEEMRQLFYDPDECGLMKKAALYFSDFWNKLDVGAILLFVAGLTCRLIPATLYPGRVILSLDFILFCLRLMHIFTISKTLGPKIIIVKRMMKDVFFFLFLLAVWVVSFGVAKQAILIHNERRVDWLFRGAVYHSYLTIFGQIPGYIDGVNFNPEHCSPNGTDPYKPKCPESDATQQRPAFPEWLTVLLLCLYLLFTNILLLNLLIAMFNYTFQQVQEHTDQIWKFQRHDLIEEYHGRPAAPPPFILLSHLQLFIKRVVLKTPAKRHKQLKNKLEKNEEAALLSWEIYLKENYLQNRQFQQKQRPEQKIEDISNKVDAMVDLLDLDPLKRSGSMEQRLASLEEQVAQTARALHWIVRTLRASGFSSEADVPTLASQKAAEEPDAEPGGRKKTEEPGDSYHVNARHLLYPNCPVTRFPVPNEKVPWETEFLIYDPPFYTAERKDAAAMDPMGDTLEPLSTIQYNVVDGLRDRRSFHGPYTVQAGLPLNPMGRTGLRGRGSLSCFGPNHTLYPMVTRWRRNEDGAICRKSIKKMLEVLVVKLPLSEHWALPGGSREPGEMLPRKLKRILRQEHWPSFENLLKCGMEVYKGYMDDPRNTDNAWIETVAVSVHFQDQNDVELNRLNSNLHACDSGASIRWQVVDRRIPLYANHKTLLQKAAAEFGAHY

SEQ ID NO: 2122 - DNA, 2520 bp, Homo sapiens
ggagtcgcggcctccccagctagtggtcgcgggcgcggtcgcaggggcagcggggtggccgccgcgccaggcgtggagctgggtctggcgggctccgagaggcccgggagcggcgcgcagagcagcctccggccgccgccgcgcagagctgccagagtggactgcactgcttctcccagcggggcaggatggcggtttcatgtctggttggataaggccttgcctgcggaaaccagctccatccccaggccctagcagaggctcgcgtgtccccgtccccaggtcaggtcaggatgggcaccgtgcgcccacctcgcccctcgctcctgctggtctccacccgggagtcttgtctcttcctcctcttctgcctgcacctgggcgccgcctgcccacagccctgccggtgccctgaccacgcaggggctgtggctgtcttctgcagcttgcggggccttcaggaggtccccgaggacatcccggccaacaccgtgctcctgaagctcgatgccaacaagatctcccacctcccggacggggccttccagcacctgcaccggctcagggagctggatctgtctcacaacgccatcgaggccatcggctccgccaccttcgcgggcctggccgggggcctgcggctgctggacctgtcttacaaccgcatccagaggatccccaaggacgccctgggcaaactcagcgccaagatacgcctgtcccacaaccccctgcactgcgagtgcgccctgcaggaggccctgtgggagctgaagctggaccccgactctgtggacgagatcgcctgccacacctcagtgcaggaggagtttgtggggaagcctctggttcaggctctggatgcgggtgccagcctctgcagcgtcccccacaggaccacagacgtggccatgctggtcaccatgttcggctggttcgccatggtgatcgcctacgtcgtgtactatgtgcgccacaaccaggaggatgcccggaggcacctggagtacctgaagtctctgcccagcgcccccgcctccaaggaccccatcggcccggggccctagcgcctgttccggcagacccccgccggtggctgctgtcacttttgtagtaggtggtgactgatgctgcttttgctcttccctgaggcaggtgtcacagccatgtgtgctccccactgttgcactcaggcacagcagcacctccaggctgggtggttttgccacacatccgtgtgacggatgaggaacctgaagcttagaggaacggaatgactgcccgtgacgataccatcaggaaattatcccagtggaacttcaacccgggctgtccatcgtgacattccgcctccttccaccatgccagcctctcccacacggggccctgcaggctgtggatatgcactcagaggactaagggggtgctctgcaagcgagagggttcaccagagggagcttgggtgcaggttcacccgctgaaggcgctgataagtcctgtgctgaggagctgacttgcccttgtttacttacaaagtgcattgtaggtaaacatgagccttgttccagtgttcgaagtacattggaacgtaagccctgtttccagagcaaagtaacagagaccaggtttttctagagagctaagtgggatgtgtagctcaaacaaactgtcctacccttttttattctcaaatgtttgttttgagtaaccgtagtgccaaaatttcagttcagtaatggggtgaacaatatggagagagacctgggaaaagtccagggtagcttgcccaggggaagacagcagccacatacctgggggcccgcctgcttcctgcccctctgggtgtgcctgatgcgggaggccctgccccagggcgatctcagctcactgcaacctttgcctcccaggctcaatcacttctgctgcctcagcctccctagtagctggaattacaggcatgagccaccacgcctggctaatttttgtatttttagtagagaccgggtttcaccatgttggccaggctggtctcgaactgttggcctcaagtgatccgcccgcctcagcctcccaaagtgctgggattacaggcgtcagccaccgcgcccggccctgtgccttgctttttctactcactaagatataaaacagctctttttccaaggcccggagtactggggattgatgtttcaaggccaatcaatgggatgcttcgttttctccagcaacaggaactctctcttttcacctttgctgccaggaatctcagagataatttagtgctcaatttactaaccttacttcacattcaggttagatgttacctccacctatatgatagtaattcctaattttattttttattgtcctttttatgagtgtttatattttaaagtactttgggtatttttggggggggtgtaaatgagtgatcagtgtacattgtgtgtggactgaagtgtaggtatgtagagatgcttcgccaaacagatgcttaaaaatgaaaaaaaaaaaaaaaaa

SEQ ID NO: 2123 - protein, 257 aa, Homo sapiens
MGTVRPPRPSLLLVSTRESCLFLLFCLHLGAACPQPCRCPDHAGAVAVFCSLRGLQEVPEDIPANTVLLKLDANKISHLPDGAFQHLHRLRELDLSHNAIEAIGSATFAGLAGGLRLLDLSYNRIQRIPKDALGKLSAKIRLSHNPLHCECALQEALWELKLDPDSVDEIACHTSVQEEFVGKPLVQALDAGASLCSVPHRTTDVAMLVTMFGWFAMVIAYVVYYVRHNQEDARRHLEYLKSLPSAPASKDPIGPGP

SEQ ID NO: 2124 - DNA, 3980 bp, Homo sapiens
tgaggagcagccacttccctgcaggctgagcggagccctggatggagcttggcacccaagcccctcatgtctgccctgctgagtctgtgttttgtgctgcccctggcggcccccggccacggcacgcagggttgggagccctgcacagacctgcgccccctggacatcctggcggaagtggtcccttctgatggcgccacaagcgggatcaggatagttcaggttcacggtgcacggggactccagctctcagtagccgccccccgcaccatgagcttcccagcatccaggattttctcccagtgtgacctcttccctgaagaattttccatcgtcgtaactttgagagttcccaatcttccacccaagaggaacgagtacctgctgacggtggtggcagaggagagcgacctgctgctgctcggcctgcggttgtcacctgcccagctgcacttcctgttccttcgcgaggacacggccggcgcctggcagacccgagtgtccttccgcagcccggccctggtggatggccgctggcacacactggtcctggctgtgtccgcaggcgtcttctccctcaccacggactgcggcctcccggtggacataatggccgatgtgcccttcccagccaccctgtcagtgaaaggagctcgattcttcgtcggcagccggaggagagccaaaggcctgttcatgggactggtgaggcaactggtcctgctgccgggctcagacgccaccccaaggctgtgtcccagcaggaacgccccgctggcggtgctgtccatcccacgggtcctgcaggctctcacggggaagccagaagataacgaggtgctaaaatatccctatgaaaccaacattcgagtgacgctgggaccccagccaccgtgtaccgaggtggaagacgcccagttctggtttgatgccagccggaagggcctgtatctgtgtgttggcaacgagtgggtctccgtgttagcagccaaagaaagactggactacgtggaggagcatcagaacttgtccaccaactcagagaccctgggcattgaggtgttccgcatccctcaggtggggctctttgtggccacagccaatcgcaaagccacatccgccgtctacaagtggaccgaagagaagttcgtctcatatcagaacatccccacgcaccaagcacaggcctggaggcatttcaccatcgggaaaaagatcttcctggcagtggctaattttgaaccagatgagaagggtcaggagttctctgtcatttacaaatggagccacagaaagctgaagtttaccccatatcagagcattgccacacacagcgcccgagactgggaggccttcgaggtggatggggagcacttcctggcggtggccaaccaccgggaaggcgacaaccacaacatcgacagtgtcatctacaagtggaacccggcaacccggctcttcgaggccaaccagaccatcgccacctccggcgcctacgactgggagttcttcagtgtggggccctactcgttcctggtggtggccaacaccttcaacggcacctccaccaaggtgcactcgcacctctacatccgactcctgggctccttccagctcttccagtccttcccgacgttcggtgctgcagactgggaggtcttccagatcggggagaggatcttcctcgctgtggcaaacagtcacagctacgatgtggagatgcaagtccagaatgattcctatgtcatcaactccgtcatctacgagctgaacgtgaccgcgcaggcctttgtcaagttccaggacattctcacctgcagtgctctggactgggagtttttctcggtgggagaagattatttcctggtggtggccaactccttcgatgggcgtaccttctcggtgaacagtattatttacaggtggcagggctacgagggcttcgtggcggtgcacagcctccccaccgtcggctgcagggactgggaggccttcagcaccacggctggtgcctacctcatctactccagcgccaaggagcccctctccagggtcctgcggctgaggacacgctgaggccgcggctgcccggcagcaactggggtggccaggtggggcgggaccccagcacctcccccaactgaccctggacgtccaggtgggcccagcctagggcatcccgggcctgggcatcaggcagggtgcaggtggggccatctgcggccctggttcgggcagggacatccatccacctctgagtccttctgagccacagccccagtgacggtctggtcttgcaggcagaggcccagagcccctgccagtgctcgcccatctgagtgtcaagcggggatttcgctgtcaaggaaccgtttctatacatttttacctcaaacaacaggacctcggttcatgtccctgcggctggcctctcgccagccactcctgcagtgtgcgtccggccgcctgagcaggtgtggtgccgtcccgccattgccgccacctatttattgtgttttatctgaacggaagtgtatttatactgctctttacaaaagcaccggtgctcctctctaggcagcgggtgggcacagcccctcaccacggacacggacagaggaccacctccccatacagagagaggcttccctcccagcctcagtttacccgtaaatgcactagcgcgaggtcagaaatcacaagcctgggcatggcctgggtcgcaccccctccccacggccccacccacagggacctcaacttctgggcccgggattttttccctattcagcagcattttaatcacatgtcctccagctgactgggactcaggctgcgtgcctccgtctgcctgtgtgctggctgtcctagctccctggtaacagcatcctctgctggctctcctgtggtcatcttgtctctgcagctgggagagctgcttgtctgtccgtcacaggcagtgaggatgagagggggtgatgggcgcaaggccccaggggtcctccctcttaacccatgtaggtgccagagaaaccacccccactccatgagaagaggctcagacagcaggctccggggccacgcagcccagaccacacctgccacggtcttccaggaacggtgctcctgcttctgcaacacaaatcggaacaggagcgatcctcagagagtttacaatgtgctttttccgccaatcagaactgtggacaaaacttcctatttcctacaccgcagctgtctgttcaccttcagctcagagagcactcctgacctttcgtaatgaaatggaagcctccccttgtctggcaaataataaactcagtgtctacttttgccggctttgggaccttcgtgtttttccggggctcaggtctcactccagccatcgctgtggccagtggagagccactcccctctgggggcagtcgccgagagcctccttcccctccgtccagccagcaaggctttcccaagcgtcctgggcaggagggttgggccctgctttccaccaagtcactcagaaggtcccaatcacacatgattggcctcattgggtcagcacctgtgaaaggaagattaaaaactcgacaccccaattcactcaaccaagaagaaaaaagctgaaagctgagtcctgcaggaagctgcctttccctttgccctaagcagacagctgcagatgagagggtcagcatctccactagtggctgctctgtgtgccccttatctcatggaaagtgccaatttactgagcacgagataaacaggtaactgactgttcccacctgctccttttctcctgcagcatggagcaatcagtcatgtgaccacaccctcctccctctgccccctccagccggcttttccccttgactgaagccttcaacatcatcttgggagagaggcacagacctgtctcctgggtgcatccttagccttggcaaaataaacttctccattgatcgagaaaaaaaaaaaaa

SEQ ID NO: 2125 - protein, 669 aa, Homo sapiens
MSALLSLCFVLPLAAPGHGTQGWEPCTDLRPLDILAEVVPSDGATSGIRIVQVHGARGLQLSVAAPRTMSFPASRIFSQCDLFPEEFSIVVTLRVPNLPPKRNEYLLTVVAEESDLLLLGLRLSPAQLHFLFLREDTAGAWQTRVSFRSPALVDGRWHTLVLAVSAGVFSLTTDCGLPVDIMADVPFPATLSVKGARFFVGSRRRAKGLFMGLVRQLVLLPGSDATPRLCPSRNAPLAVLSIPRVLQALTGKPEDNEVLKYPYETNIRVTLGPQPPCTEVEDAQFWFDASRKGLYLCVGNEWVSVLAAKERLDYVEEHQNLSTNSETLGIEVFRIPQVGLFVATANRKATSAVYKWTEEKFVSYQNIPTHQAQAWRHFTIGKKIFLAVANFEPDEKGQEFSVIYKWSHRKLKFTPYQSIATHSARDWEAFEVDGEHFLAVANHREGDNHNIDSVIYKWNPATRLFEANQTIATSGAYDWEFFSVGPYSFLVVANTFNGTSTKVHSHLYIRLLGSFQLFQSFPTFGAADWEVFQIGERIFLAVANSHSYDVEMQVQNDSYVINSVIYELNVTAQAFVKFQDILTCSALDWEFFSVGEDYFLVVANSFDGRTFSVNSIIYRWQGYEGFVAVHSLPTVGCRDWEAFSTTAGAYLIYSSAKEPLSRVLRLRTR

SEQ ID NO: 2126 - DNA, 374 bp, Homo sapiens
cgagcccggagagcctgggctgcaggggagggcgccacaggtgaggacacagctccgtgggcaccaggcaaggtcccaaagcagatccgcagccggtcagaggagcgcacatggctccacgagatgtgactattcctatctgctggagaacagccgtccagggccaccccacgtccttcaaggggactctgagacactctgggccggtgggaccttcagcagcatctggactttggctgcctcacaggcggatgtcacccaccccttgggacttcgccatgggtcgctagcccagaccctccccttggttccggtggttccatttctgcccctttgctgctggcccccttctgaggatgcccgtgcatctccag

SEQ ID NO: 2127 - protein, 59 aa, Homo sapiens
MAPRDVTIPICWRTAVQGHPTSFKGTLRHSGPVGPSAASGLWLPHRRMSPTPWDFAMGR

SEQ ID NO: 2128 - DNA, 824 bp, Homo sapiens
gaactttccttatggtcatctttgggtggagccaccacttccagttctgatcttctcattctggttgagtacctgggcttgccagtgcaccccccaggaacaccgcctagtccagggctcccacaggtctcagactgacaggagactgggtcatatgaccagcactagccaatgagctgtgagtacacgtgacacagggacaagctgggtcatgtgactggcactagccaatgagctgtgaggacgtgagcacaggtccagctaggctgggtcatatgacaagcattagccaatgagctgtgaggacacgtgagtacaggtccagctaggctgggacatgtgactggcactggcccatgggctgtgagcacaggtcaggtcagccccttcctgctgcttcccaccgtgtgtgctccttgtctgacttgatatgagaactaacccaatatggcaggaagccactgacatgtgggagccgtgcatggcagtggccagcgtccttgtcctgcgggggctctgtggacatcactcgccttcagaacactgagccctcctacctcctgatatccagggctgccgatgggaaatcccaggctgccgcggctcctgtgtgctttgaagttttcaggatttttgtcaaacatccggggacccttagctggagaggatggcatgggtgacacgcagctggccagggtgcgcgactctgctctcaagaccccctggaggcccgccccctgccccccaccagctcattcgttagatgattggaagtgactgcctacgtcttctttcaggataaagcctcaagtcctgcaactatt

SEQ ID NO: 2129 - DNA, 6057 bp, Homo sapiens
caccgcctcctgggactcggaacgcagcgctcggagccatggcctcggcccccgcggaggcggagacccgacagaggctgctacgcaccgtcaagaaggaggtgaagcagatcatggaggaggctgtgacacgcaagtttgtccacgaagacagcagccacatcatctccttctgtgcggctgtggaggcctgcgttctgcacgggcttcggcggcgggcggctggcttcctacgcagcaataagattgcagccctctttatgaaagtgggcaagaacttcccgccggctgaggatctgagccgcaaggtgcaagacctggagcagctgatcgagagcgcgagaaaccagattcaaggcctccaggagaatgtgcggaagctgccgaagctgcccaacttgtccccacttgccatcaagcatctgtggattcgcacagccttgtttgagaaggtcctggacaaaattgtgcattaccttgtggaaaacagcagtaaatactatgagaaggaagctctcctgatggaccctgtggacggccccatccttgcatctttgttggtggggccctgtgccctagagtacaccaagatgaagactgcagatcacttctggaccgatccctcggctgacgaacttgtccagaggcaccgcatccacagctcccacgtgcggcaggactcgcccaccaagcgtcctgccctctgtatccagaagaggcattccagtggcagcatggatgaccggccatccctctctgcccgcgactacgtggagtccctgcatcagaactcccgtgccacccttctctatggcaaaaacaacgttcttgttcagccgagggacgacatggaggctgtgccagggtacctgtccctgcaccagacggctgacgtcatgaccttgaagtggacacccaaccagctgatgaacgggtctgtgggggacctggactatgagaagagcgtctactgggactatgccatgaccatccgcttggaggagattgtctacctgcactgccaccagcaagttgacagcggcgggacagtggtattggtcagccaggacgggatccagaggccgcccttccgcttccccaagggcgggcacctcctgcagttcctctcgtgcctggagaatgggctgctcccacatgggcagttggacccgccactgtggtcccagaggggtaagggcaaagtgtttcctaaactgcgcaagcgaagccctcagggttctgccgagtccacatcttcagacaaagatgatgatgaggccacggattatgtgttcaggatcatctaccctggcatgcagtcggaattcgttgcccccgacttcttgggcagcacttcctccgtctctgtgggccctgcctggatgatggttcctgcaggccggtccatgctggtggtggccagagggagtcagtgggagccagccagatgggacactactctccccacgccaagcccgaaggagcagccccccatgccccaggatctgatggacgtctctgtaagcaacctcccatccctgtggcagcccagtccccggaagtcctcctgttcatcctgttcacagagtggctcggctgatggtagctcgaccaatggctgcaaccatgagagggctcccctgaaacttctctgtgacaatatgaagtaccagatcctctccagagccttctatggatggctggcctactgcagacacctgtccaccgtgagaacccacctatcagccctggtcaatcacatgatcgtgtctccagacttgccctgcgatgctggacagggactgacagccaggatctgggagcagtaccttcacgacagcacaagttacgaggagcaggagctgctgcgcctcatctactacgggggcatccagcctgagatccgcaaggccgtgtggcccttcctcctgggccactaccagttcgggatgacggaaacagaaaggaaagaggtggacgagcagattcatgcctgctatgcacagaccatggctgagtggctgggctgcgaggcgatcgtgcggcagagggagcgggagtcccatgcggccgccctggccaaatgctcatccggggccagcttggacagccacctgcaccggatgttgcacagggactcaaccatcagcaatgagtcctcccagagctgcagttcgggccgccagaacatccgcctgcacagcgactccagcagcagcacacaggtgtttgagtctgtggatgaggtggagcaggtggaggctgaaggcagattggaggagaaacagcccaagatccccaatgggaacctagtgaacggcacttgttccccagactcgggtcatccttcctcccataacttctcctcgggcctctcagagcactcagagcccagtctgagcacagaagacagtgtcttggacgcccagcggaacacccccacggtgctgcgacctagggatggcagcgtggatgacaggcagagcagcgaggccaccacatctcaggatgaggctccccgggaggagctggccgtgcaggacagcctggagagtgacctcctggccaacgagagcatggacgagttcatgtccatcacgggcagcctggacatggccctgcctgaaaaggacgatgttgtgatggagggctggaggagcagcgagacagagaaacatggccaggcggacagtgaggacaacctctcggaggagcctgagatggaaagtctcttccctgccctggcttctctggctgtgactacttctgccaacgaggtgtcccctgtgtcttccagcggcgtcacctactctccagagctgctggatctgtacacggtgaacctgcaccgcatcgagaaggatgtgcagaggtgcgaccgcaactactggtacttcacgcccgccaacttggagaagctgcgtaacatcatgtgcagctacatctggcagcacattgagatcggctatgtccagggcatgtgtgatcttctggctccactgctggtcattctggatgatgaggcccttgccttcagctgcttcacggagctcatgaagaggatgaaccagaacttcccccacggaggcgccatggacacgcactttgcaaacatgagatcgttgatccagatcctggactcagagctgtttgagctgatgcatcagaacggggactatactcacttctacttctgctaccgctggttcctgctggatttcaagcgagaactcgtctatgatgacgtcttcttggtctgggagaccatctgggcagccaaacacgtctcctctgcgcactacgtcctgttcattgcgctggctctggtggaagtctaccgtgacatcattttggagaacaacatggatttcacagacatcatcaaattctttaatgaaatggctgagcgacacaacaccaagcaagtcctgaagctggcgcgggacctcgtgtacaaggtgcagactctgattgagaacaagtgaggggcacctcaccccggcagcctcagccaagctgcccctgccccgctcctctgcttacttttcctcctggctggatgggcaccccgggagcggggtcctggtgtctgttcacaagcgtggagttcagtgcgcaaagaaactaccctgacttttacttctgggcagatggggtggagggagtaccccttcaattcagccttacattttcctgtttgaccaaagattgcccaagtctggcgttcctcccttgcaggaggtggaggttgttggtggaggaggagccatctttgtttgctggtgcccggaatggtctcctcttcttctttccctatccctccaaactgtcttgtaagatgagacctggggaggaaacttctttttggaaattggtgtagaagaggtgtgtggggctacctctatgctcctctgcaaggggcctttggcgatgttctggacatggctgaagattgacttagagattgaccctccacctcgacattactgacatttggggccaggtgattctttttgaggggactgtcccctgcattgtaggatgctgagcagcatcccgggcctcaccagatgccagtagtgccatcccccaaccatacccctggttgtgacagcccccaaaaatgtctctagacattgcgaaatgttccctgcagggcaaaattgcccccatttgagaaccactggcttggagaagggactacaaatgtacttcctcccccattcttttgacgctaagccaccctggtcctgacgcctcccctcacttagaaaaggcatacaggaggccgggcatggtggctcacacctgtaatcccagcactttgggaggctaaggtgggcggatcacaaggtcaggagttttgagaccagcctggccaacatggtgaaaccccatctctactaaaaatacaaaaattagctgggtgtggtggcgggtgcctgtaatcccagctacttgggaggctgaggcaggagaatcacttgaacctgggaggtggaggttgcagtgagttgagatcacgccactgcactccagcccgggcgacagttcaagactccatctcaaaaaaaaaaagaaaaggcacacaagagtccctcacacatctctcttggagtctgggattccatctgttgtattttctccttttttctcctctgtctgatgccagaagatacttgttttcttcttttcaagaaaagtatctccccacataggcggtggacccaaaaagtgtaggcatgagacggtcagagctctttggggtcctgctcagagtcccccaggcagggcagagtctgtatcctgctgccatcttgcaagggaaaaccgcctctccttccaagtattgggtcttggaaaggtgtgtgtttggtgaaagccacttaatggtggtggggtgcagcttttctctaagtgcagttactcactcaggacaaaggaggaaaaggaaggcagaggtcagccagggtagagggtgatgtctgttttccttgggaaacatctgctgatgaactgggtccagggccgtgctaggtctgggaacaatcctctccaggtcttcacacagagtatcaccaatccacaaacagacccgaagtgaactagtttactctgcctacctgtcctttcaatagagcagtctttcccgctcttctgttctgagaatgcacccggaatgggggaaacccagcaagcagcagagagaaaggctcttcccgggagacctgccgcctctagggtggtcagagaatagcagctgggattttggagagggagaggataggtaaagcagcgtattgaagcatttgcggaggggtgtattagtcctcccaccctgagcacaccaggacggggatgcatccttgccttgtgtgcttgtaaaggcttctttcccttggtatagcaacttcaactgcacctgaacctccaacctctgcccagcctctggtgcagggtggatagaggtctagccagcccttacttcctgaagagagctctgtgggaaactcgaggctacagtagcttcccggctcccagctcctaccctacccccaccaaagcagaaacgggagacggcaacgttctggctgccattagacttacgtctccctcccctacgtcccctagcttcccaagacaggaagaaatgtgcaaaaggcccctccggagaaaactattttgccgttcagctgttctttacagaggatgttattttagtgagacccaggtcctagaccttctgattcctatttatttttttaacagactagtctcaaagtacagcacaaaatctcttctctgccttctcttgtgatgttccagagagcatctgtggttgtgatttggaataagtcatatttatttggtttactgtgcctattcagatctctgtatgttgtgtgtgtttctgtgtcctggaattggatgcgtgggactcgttctgtccgcggagtgcactctttttttcagtgtggcccacatatcttgtaaatgtttgctgaagagttgtgtctatatatagagaaaatatatataaacagagaaatatgtgaa

SEQ ID NO: 2130 - protein, 1148 aa, Homo sapiens
MASAPAEAETRQRLLRTVKKEVKQIMEEAVTRKFVHEDSSHIISFCAAVEACVLHGLRRRAAGFLRSNKIAALFMKVGKNFPPAEDLSRKVQDLEQLIESARNQIQGLQENVRKLPKLPNLSPLAIKHLWIRTALFEKVLDKIVHYLVENSSKYYEKEALLMDPVDGPILASLLVGPCALEYTKMKTADHFWTDPSADELVQRHRIHSSHVRQDSPTKRPALCIQKRHSSGSMDDRPSLSARDYVESLHQNSRATLLYGKNNVLVQPRDDMEAVPGYLSLHQTADVMTLKWTPNQLMNGSVGDLDYEKSVYWDYAMTIRLEEIVYLHCHQQVDSGGTVVLVSQDGIQRPPFRFPKGGHLLQFLSCLENGLLPHGQLDPPLWSQRGKGKVFPKLRKRSPQGSAESTSSDKDDDEATDYVFRIIYPGMQSEFVAPDFLGSTSSVSVGPAWMMVPAGRSMLVVARGSQWEPARWDTTLPTPSPKEQPPMPQDLMDVSVSNLPSLWQPSPRKSSCSSCSQSGSADGSSTNGCNHERAPLKLLCDNMKYQILSRAFYGWLAYCRHLSTVRTHLSALVNHMIVSPDLPCDAGQGLTARIWEQYLHDSTSYEEQELLRLIYYGGIQPEIRKAVWPFLLGHYQFGMTETERKEVDEQIHACYAQTMAEWLGCEAIVRQRERESHAAALAKCSSGASLDSHLHRMLHRDSTISNESSQSCSSGRQNIRLHSDSSSSTQVFESVDEVEQVEAEGRLEEKQPKIPNGNLVNGTCSPDSGHPSSHNFSSGLSEHSEPSLSTEDSVLDAQRNTPTVLRPRDGSVDDRQSSEATTSQDEAPREELAVQDSLESDLLANESMDEFMSITGSLDMALPEKDDVVMEGWRSSETEKHGQADSEDNLSEEPEMESLFPALASLAVTTSANEVSPVSSSGVTYSPELLDLYTVNLHRIEKDVQRCDRNYWYFTPANLEKLRNIMCSYIWQHIEIGYVQGMCDLLAPLLVILDDEALAFSCFTELMKRMNQNFPHGGAMDTHFANMRSLIQILDSELFELMHQNGDYTHFYFCYRWFLLDFKRELVYDDVFLVWETIWAAKHVSSAHYVLFIALALVEVYRDIILENNMDFTDIIKFFNEMAERHNTKQVLKLARDLVYKVQTLIENK

SEQ ID NO: 2131 - DNA, 5874 bp, Homo sapiens
caccgcctcctgggactcggaacgcagcgctcggagccatggcctcggcccccgcggaggcggagacccgacagaggctgctacgcaccgtcaagaaggaggtgaagcagatcatggaggaggctgtgacacgcaagtttgtccacgaagacagcagccacatcatctccttctgtgcggctgtggaggcctgcgttctgcacgggcttcggcggcgggcggctggcttcctacgcagcaataagattgcagccctctttatgaaagtgggcaagaacttcccgccggctgaggatctgagccgcaaggtgcaagacctggagcagctgatcgagagcgcgagaaaccagattcaaggcctccaggagaatgtgcggaagctgccgaagctgcccaacttgtccccacttgccatcaagcatctgtggattcgcacagccttgtttgagaaggtcctggacaaaattgtgcattaccttgtggaaaacagcagtaaatactatgagaaggaagctctcctgatggaccctgtggacggccccatccttgcatctttgttggtggggccctgtgccctagagtacaccaagatgaagactgcagatcacttctggaccgatccctcggctgacgaacttgtccagaggcaccgcatccacagctcccacgtgcggcaggactcgcccaccaagcgtcctgccctctgtatccagaagaggcattccagtggcagcatggatgaccggccatccctctctgcccgcgactacgtggagtccctgcatcagaactcccgtgccacccttctctatggcaaaaacaacgttcttgttcagccgagggacgacatggaggctgtgccagggtacctgtccctgcaccagacggctgacgtcatgaccttgaagtggacacccaaccagctgatgaacgggtctgtgggggacctggactatgagaagagcgtctactgggactatgccatgaccatccgcttggaggagattgtctacctgcactgccaccagcaagttgacagcggcgggacagtggtattggtcagccaggacgggatccagaggccgcccttccgcttccccaagggcgggcacctcctgcagttcctctcgtgcctggagaatgggctgctcccacatgggcagttggacccgccactgtggtcccagaggggtaagggcaaagtgtttcctaaactgcgcaagcgaagccctcagggttctgccgagtccacatcttcagacaaagatgatgatgaggccacggattatgtgttcaggatcatctaccctggcatgcagtcggaattcgttgcccccgacttcttgggcagcacttcctccgtctctgtgggccctgcctggatgatggttcctgcaggccggtccatgctggtggtggccagagggagtcagtgggagccagccagatgggacactactctccccacgccaagcccgaaggagcagccccccatgccccaggatctgatggacgtctctgtaagcaacctcccatccctgtggcagcccagtccccggaagtcctcctgttcatcctgttcacagagtggctcggctgatggtagctcgaccaatggctgcaaccatgagagggctcccctgaaacttctctgtgacaatatgaagtaccagatcctctccagagccttctatggatggctggcctactgcagacacctgtccaccgtgagaacccacctatcagccctggtcaatcacatgatcgtgtctccagacttgccctgcgatgctggacagggactgacagccaggatctgggagcagtaccttcacgacagcacaagttacgaggagcaggagctgctgcgcctcatctactacgggggcatccagcctgagatccgcaaggccgtgtggcccttcctcctgggccactaccagttcgggatgacggaaacagaaaggaaagagtcctcccagagctgcagttcgggccgccagaacatccgcctgcacagcgactccagcagcagcacacaggtgtttgagtctgtggatgaggtggagcaggtggaggctgaaggcagattggaggagaaacagcccaagatccccaatgggaacctagtgaacggcacttgttccccagactcgggtcatccttcctcccataacttctcctcgggcctctcagagcactcagagcccagtctgagcacagaagacagtgtcttggacgcccagcggaacacccccacggtgctgcgacctagggatggcagcgtggatgacaggcagagcagcgaggccaccacatctcaggatgaggctccccgggaggagctggccgtgcaggacagcctggagagtgacctcctggccaacgagagcatggacgagttcatgtccatcacgggcagcctggacatggccctgcctgaaaaggacgatgttgtgatggagggctggaggagcagcgagacagagaaacatggccaggcggacagtgaggacaacctctcggaggagcctgagatggaaagtctcttccctgccctggcttctctggctgtgactacttctgccaacgaggtgtcccctgtgtcttccagcggcgtcacctactctccagagctgctggatctgtacacggtgaacctgcaccgcatcgagaaggatgtgcagaggtgcgaccgcaactactggtacttcacgcccgccaacttggagaagctgcgtaacatcatgtgcagctacatctggcagcacattgagatcggctatgtccagggcatgtgtgatcttctggctccactgctggtcattctggatgatgaggcccttgccttcagctgcttcacggagctcatgaagaggatgaaccagaacttcccccacggaggcgccatggacacgcactttgcaaacatgagatcgttgatccagatcctggactcagagctgtttgagctgatgcatcagaacggggactatactcacttctacttctgctaccgctggttcctgctggatttcaagcgagaactcgtctatgatgacgtcttcttggtctgggagaccatctgggcagccaaacacgtctcctctgcgcactacgtcctgttcattgcgctggctctggtggaagtctaccgtgacatcattttggagaacaacatggatttcacagacatcatcaaattctttaatgaaatggctgagcgacacaacaccaagcaagtcctgaagctggcgcgggacctcgtgtacaaggtgcagactctgattgagaacaagtgaggggcacctcaccccggcagcctcagccaagctgcccctgccccgctcctctgcttacttttcctcctggctggatgggcaccccgggagcggggtcctggtgtctgttcacaagcgtggagttcagtgcgcaaagaaactaccctgacttttacttctgggcagatggggtggagggagtaccccttcaattcagccttacattttcctgtttgaccaaagattgcccaagtctggcgttcctcccttgcaggaggtggaggttgttggtggaggaggagccatctttgtttgctggtgcccggaatggtctcctcttcttctttccctatccctccaaactgtcttgtaagatgagacctggggaggaaacttctttttggaaattggtgtagaagaggtgtgtggggctacctctatgctcctctgcaaggggcctttggcgatgttctggacatggctgaagattgacttagagattgaccctccacctcgacattactgacatttggggccaggtgattctttttgaggggactgtcccctgcattgtaggatgctgagcagcatcccgggcctcaccagatgccagtagtgccatcccccaaccatacccctggttgtgacagcccccaaaaatgtctctagacattgcgaaatgttccctgcagggcaaaattgcccccatttgagaaccactggcttggagaagggactacaaatgtacttcctcccccattcttttgacgctaagccaccctggtcctgacgcctcccctcacttagaaaaggcatacaggaggccgggcatggtggctcacacctgtaatcccagcactttgggaggctaaggtgggcggatcacaaggtcaggagttttgagaccagcctggccaacatggtgaaaccccatctctactaaaaatacaaaaattagctgggtgtggtggcgggtgcctgtaatcccagctacttgggaggctgaggcaggagaatcacttgaacctgggaggtggaggttgcagtgagttgagatcacgccactgcactccagcccgggcgacagttcaagactccatctcaaaaaaaaaaagaaaaggcacacaagagtccctcacacatctctcttggagtctgggattccatctgttgtattttctccttttttctcctctgtctgatgccagaagatacttgttttcttcttttcaagaaaagtatctccccacataggcggtggacccaaaaagtgtaggcatgagacggtcagagctctttggggtcctgctcagagtcccccaggcagggcagagtctgtatcctgctgccatcttgcaagggaaaaccgcctctccttccaagtattgggtcttggaaaggtgtgtgtttggtgaaagccacttaatggtggtggggtgcagcttttctctaagtgcagttactcactcaggacaaaggaggaaaaggaaggcagaggtcagccagggtagagggtgatgtctgttttccttgggaaacatctgctgatgaactgggtccagggccgtgctaggtctgggaacaatcctctccaggtcttcacacagagtatcaccaatccacaaacagacccgaagtgaactagtttactctgcctacctgtcctttcaatagagcagtctttcccgctcttctgttctgagaatgcacccggaatgggggaaacccagcaagcagcagagagaaaggctcttcccgggagacctgccgcctctagggtggtcagagaatagcagctgggattttggagagggagaggataggtaaagcagcgtattgaagcatttgcggaggggtgtattagtcctcccaccctgagcacaccaggacggggatgcatccttgccttgtgtgcttgtaaaggcttctttcccttggtatagcaacttcaactgcacctgaacctccaacctctgcccagcctctggtgcagggtggatagaggtctagccagcccttacttcctgaagagagctctgtgggaaactcgaggctacagtagcttcccggctcccagctcctaccctacccccaccaaagcagaaacgggagacggcaacgttctggctgccattagacttacgtctccctcccctacgtcccctagcttcccaagacaggaagaaatgtgcaaaaggcccctccggagaaaactattttgccgttcagctgttctttacagaggatgttattttagtgagacccaggtcctagaccttctgattcctatttatttttttaacagactagtctcaaagtacagcacaaaatctcttctctgccttctcttgtgatgttccagagagcatctgtggttgtgatttggaataagtcatatttatttggtttactgtgcctattcagatctctgtatgttgtgtgtgtttctgtgtcctggaattggatgcgtgggactcgttctgtccgcggagtgcactctttttttcagtgtggcccacatatcttgtaaatgtttgctgaagagttgtgtctatatatagagaaaatatatataaacagagaaatatgtgaa

SEQ ID NO: 2132 - protein, 1087 aa, Homo sapiens
MASAPAEAETRQRLLRTVKKEVKQIMEEAVTRKFVHEDSSHIISFCAAVEACVLHGLRRRAAGFLRSNKIAALFMKVGKNFPPAEDLSRKVQDLEQLIESARNQIQGLQENVRKLPKLPNLSPLAIKHLWIRTALFEKVLDKIVHYLVENSSKYYEKEALLMDPVDGPILASLLVGPCALEYTKMKTADHFWTDPSADELVQRHRIHSSHVRQDSPTKRPALCIQKRHSSGSMDDRPSLSARDYVESLHQNSRATLLYGKNNVLVQPRDDMEAVPGYLSLHQTADVMTLKWTPNQLMNGSVGDLDYEKSVYWDYAMTIRLEEIVYLHCHQQVDSGGTVVLVSQDGIQRPPFRFPKGGHLLQFLSCLENGLLPHGQLDPPLWSQRGKGKVFPKLRKRSPQGSAESTSSDKDDDEATDYVFRIIYPGMQSEFVAPDFLGSTSSVSVGPAWMMVPAGRSMLVVARGSQWEPARWDTTLPTPSPKEQPPMPQDLMDVSVSNLPSLWQPSPRKSSCSSCSQSGSADGSSTNGCNHERAPLKLLCDNMKYQILSRAFYGWLAYCRHLSTVRTHLSALVNHMIVSPDLPCDAGQGLTARIWEQYLHDSTSYEEQELLRLIYYGGIQPEIRKAVWPFLLGHYQFGMTETERKESSQSCSSGRQNIRLHSDSSSSTQVFESVDEVEQVEAEGRLEEKQPKIPNGNLVNGTCSPDSGHPSSHNFSSGLSEHSEPSLSTEDSVLDAQRNTPTVLRPRDGSVDDRQSSEATTSQDEAPREELAVQDSLESDLLANESMDEFMSITGSLDMALPEKDDVVMEGWRSSETEKHGQADSEDNLSEEPEMESLFPALASLAVTTSANEVSPVSSSGVTYSPELLDLYTVNLHRIEKDVQRCDRNYWYFTPANLEKLRNIMCSYIWQHIEIGYVQGMCDLLAPLLVILDDEALAFSCFTELMKRMNQNFPHGGAMDTHFANMRSLIQILDSELFELMHQNGDYTHFYFCYRWFLLDFKRELVYDDVFLVWETIWAAKHVSSAHYVLFIALALVEVYRDIILENNMDFTDIIKFFNEMAERHNTKQVLKLARDLVYKVQTLIENK

SEQ ID NO: 2133 - DNA, 507 bp, Homo sapiens
ctttgcctggaaggtctcagctgtgatgctcctcggaggctggctcctgttggccttcaatgcaattttcctcctgtcttgggctgtggcccccaaagggctgtgcccaaggagaagcagtgttccaatgccaggggtgcaggcagtggcagctactgccatgattgtgggtctgctgattttcccaatcggccttgcctccccattcatcaaggaagtgtgcgaagcctcctccatgtattatggtgggaagtgccggctgggttggggttacatgactgctatcctcaatgcagtcctggccagcctcctgcccatcatcagctggccccacacaaccaaggtccaagggaggaccatcatcttctccagtgccaccgagagaatcatctttgtgccagaaatgaacaaataaaaatctcctgggagtagcacaaagggcacactccagagttttatgaaatcatcatgtagccaacttcaaatcccatctctgctccttcttgc

SEQ ID NO: 2134 - protein, 129 aa, Homo sapiens
MLLGGWLLLAFNAIFLLSWAVAPKGLCPRRSSVPMPGVQAVAATAMIVGLLIFPIGLASPFIKEVCEASSMYYGGKCRLGWGYMTAILNAVLASLLPIISWPHTTKVQGRTIIFSSATERIIFVPEMNK

SEQ ID NO: 2135 - DNA, 1737 bp, Homo sapiens
acagggtcttactctgtcacccaggctggcgtgccatggtgcagtcatagctcactgcagcctcaaattcatgggctcaagcaattcacctcagcctcccaaagtgctggaactacaagcatacaccaccatacccacaattgcttctccattcttgaagttcctaacccccatgaatccacaaccataaccatggccacgcgggtcgaggtgggctccataacgcccttgacggccgtgccaggcctgggtgagatgggcaaggaggagaccctgacgaggacctacttcctccaggccggcgaagcctctggggctcccccagcccggatcttggaagcgaagagccccctgcggagcccggcccggttactccctctgccaaggctcgcccccaaacccttctcgaaggagcaggacgtgaaatctcctgtcccgtctctgcggcccagttcgactggaccttccccctctggggggctctctgaggagccagcagcaaaggatctggacaacaggatgcccggcttggtggggcaggaggtgggcagtggggagggcccgaggacgagctcgcccctcttcaacaaggctgtgttcctgcggcccagctccagcaccatgattctcttcgaaaccaccaaaagcggccccgctctggggaaggcggttagtgagggggcggaggaggccaagctaggtgtgtccggctcccggcctgaggtggctgccaagcccgccctgcccacccagaagcctgcggggacccttccccggtcagctcccctgtctcaggacacaaaaccacctgtaccccaagaggaggcaggccaagaccatcctccctcaaaggccagcagtgtggaggacacggcacgcccccttgtggagcccaggcctcgcctgaagagaaggcccgtgtctgccattttcacggagtccattcagcctcagaagccaggccccggcgcagcggccacagtgggcaaagtgccacccacccctcccgagaagacgtgggtgaggaagcccaggcccttgtccatggacctcacggcccggtttgagaacaaagaggccttgctgaggaaggtggccgatgaaggaagtggacccacagcaggggatatggctgggctagagaggcccagagcagcgtccaagctggacagggactgtttggtcaaggcggaggctcctcttcatgatcctgatttggacttcctggaggtggccaagaaaatccgtgaacggaaggagaagatgctttcgaagccggagatgggcagccccagagccctggtggggggctcatctggggtcacccccagcaatgaccagagtccctgggaagaaaaggccaagctggacccagagccagagaaggctgctgagtccccctcacccaggctgggaaggggcctagaacttgctgaggttaagagcagagtggcggatggggaggccgcggcagggggagagtgggcctccaggaggagtgtcaggaagtgcatcagcctgtttcgggaggacagcaccttggccttggcagtggggtctgaatctcccctggccacccctgcgtccccatcggcggcaccagagccggagaaaggggttgtgagcgttcaggaacggatcagaggctggactgccgagagctcagaggctaagcccgaggtcaggaggaggacgttccaggctcggccgctgtcggcggatttgaccaaattgtaa

SEQ ID NO: 2136 - protein, 514 aa, Homo sapiens [sequence omitted]

SEQ ID NO: 2137 - DNA, 1496 bp, Homo sapiens
gccgtgtcactggctcaggctcagttgctgggtcaccagtagaatggacccttcctccacctcagttcagagcacagtgatgattcgtgactttctttcccaatagaacttcaaatctctgaagacggggggtggggggatgtgcttgagtgtttgtactcatggtcttgttctagaagtgacaaagctgggacgcaatacctttatgcatgaaaaggttgtcacttgtcacaactaacaggctttcacctcacggaaattttcttcccttgtgcacttttcccctggcagtggacatggctgcactcttccaagaagcaagcagctgtcccgtctgctcagactatctagagaaaccaatgtccctggagtgtggatgcgctgtctgcttcaagtgcatcaattcactgcagaaggagccccatggggaggatctactttgctgttgctgttccatggtctctcagaagaacaaaatcaggcccagttggcagctagagaggctggcttcccacatcaaggaactggagcccaagctgaagaagattctgcagatgaacccaaggatgcggaagttccaagtggatatgaccttggatgccgacacagccaacaacttcctcctcatttctgacgacctcaggagcgtccgaagtgggtgcatcacacagaatcggcaagaccttgccgagagatttgacgtgtccatttgcatcctgggctcccctcgctttacctgtggccgccactactgggaggtggacgtgggaacaagcacagaatgggacctgggagtctgcagagaatctgttcaccgcaaagggaggatccatctgaccacagagcgtggattctggactgtgagtttgagggatggaagccgcctctctgccagcacggtgccgctgactttcctcttcgtagaccgcaagttacagcgagtggggatttttctggatatgggcatgcagaacgtttccttttttgatgctgaaggtggttcccatgtctatacattcaggagtgtctctgctgaggagccactgcacttgttttttgctcctccaagtccacctaatggtgataagagtgtcttgagtatctgtcctgtgataaacccgggcactactgatgctccagtccatcctggggaggccaaataagcccccactgcaaaaaaacaaaaaacaggttaagaaaattacttgggtgggcagacttaggaacgctctactcggtaaaagcgttatacaaagtcataggagaaaaatatgggacaattcatgattatacttaatctaatttgattagtttataaattgagtcctaagtattaattattgccaccatccaactcattgagtcttatggttcacatcttgtttcctatagaaatattctgtattctgggatcaatttccaaatgcttttttatttctgtaagttcaaattaatgtattatagaagttatgagttaaataaacattggaatatca

SEQ ID NO: 2138 - protein, 288 aa, Homo sapiens
MAALFQEASSCPVCSDYLEKPMSLECGCAVCFKCINSLQKEPHGEDLLCCCCSMVSQKNKIRPSWQLERLASHIKELEPKLKKILQMNPRMRKFQVDMTLDADTANNFLLISDDLRSVRSGCITQNRQDLAERFDVSICILGSPRFTCGRHYWEVDVGTSTEWDLGVCRESVHRKGRIHLTTERGFWTVSLRDGSRLSASTVPLTFLFVDRKLQRVGIFLDMGMQNVSFFDAEGGSHVYTFRSVSAEEPLHLFFAPPSPPNGDKSVLSICPVINPGTTDAPVHPGEAK

SEQ ID NO: 2139 - DNA, 3695 bp, Homo sapiens
gccccgtcccggcctcgcgcacctgctcaggccatgatgagcttcggcggcgcggacgcgctgctgggcgccccgttcgcgccgctgcatggcggcggcagcctccactacgcgctagcccgaaagggtggcgcaggcgggacgcgctccgccgctggctcctccagcggcttccactcgtggacacggacgtccgtgagctccgtgtccgcctcgcccagccgcttccgtggcgcaggcgccgcctcaagcaccgactcgctggacacgctgagcaacgggccggagggctgcatggtggcggtggccacctcacgcagtgagaaggagcagctgcaggcgctgaacgaccgcttcgccgggtacatcgacaaggtgcggcagctggaggcgcacaaccgcagcctggagggcgaggctgcggcgctgcggcagcagcaggcgggccgctccgctatgggcgagctgtacgagcgcgaggtccgcgagatgcgcggcgcggtgctgcgcctgggcgcggcgcgcggtcagctacgcctggagcaggagcacctgctcgaggacatcgcgcacgtgcgccagcgcctagacgacgaggcccggcagcgagaggaggccgaggcggcggcccgcgcgctggcgcgcttcgcgcaggaggccgaggcggcgcgcgtggacctgcagaagaaggcgcaggcgctgcaggaggagtgcggctacctgcggcgccaccaccaggaagaggtgggcgagctgctcggccagatccagggctccggcgccgcgcaggcgcagatgcaggccgagacgcgcgacgccctgaagtgcgacgtgacgtcggcgctgcgcgagattcgcgcgcagcttgaaggccacgcggtgcagagcacgctgcagtccgaggagtggttccgagtgaggctggaccgactgtcggaggcagccaaggtgaacacagacgctatgcgctcagcgcaggaggagataactgagtaccggcgtcagctgcaggccaggaccacagagctggaggcactgaaaagcaccaaggactcactggagaggcagcgctctgagctggaggaccgtcatcaggccgacattgcctcctaccaggaagccattcagcagctggacgctgagctgaggaacaccaagtgggagatggccgcccagctgcgagaataccaggacctgctcaatgtcaagatggctctggatatagagatagccgcttacagaaaactcctggaaggtgaagagtgtcggattggctttggcccaattcctttctcgcttccagaaggactccccaaaattccctctgtgtccactcacataaaggtgaaaagcgaagagaagatcaaagtggtggagaagtctgagaaagaaactgtgattgtggaggaacagacagaggagacccaagtgactgaagaagtgactgaagaagaggagaaagaggccaaagaggaggagggcaaggaggaagaagggggtgaagaagaggaggcagaagggggagaagaagaaacaaagtctcccccagcagaagaggctgcatccccagagaaggaagccaagtcaccagtaaaggaagaggcaaagtcaccggctgaggccaagtccccagagaaggaggaagcaaaatccccagccgaagtcaagtcccctgagaaggccaagtctccagcaaaggaagaggcaaagtcaccgcctgaggccaagtccccagagaaggaggaagcaaaatctccagctgaggtcaagtcccccgagaaggccaagtccccagcaaaggaagaggcaaagtcaccggctgaggccaagtctccagagaaggccaagtccccagtgaaggaagaagcaaagtcaccggctgaggccaagtccccagtgaaggaagaagcaaaatctccagctgaggtcaagtccccggaaaaggccaagtctccaacgaaggaggaagcaaagtcccctgagaaggccaagtccccagagaaggaagaggccaagtcccctgagaaggccaagtccccagtgaaggcagaagcaaagtcccctgagaaggccaagtccccagtgaaggcagaagcaaagtcccctgagaaggccaagtccccagtgaaggaagaagcaaagtcccctgagaaggccaagtccccagtgaaggaagaagcaaagtcccctgagaaggccaagtccccagtgaaggaagaagcaaagacccccgagaaggccaagtccccagtgaaggaagaagccaagtccccagagaaggccaagtccccagagaaggccaagactcttgatgtgaagtctccagaagccaagactccagcgaaggaggaagcaaggtcccctgcagacaaattccctgaaaaggccaaaagccctgtcaaggaggaggtcaagtccccagagaaggcgaaatctcccctgaaggaggatgccaaggcccctgagaaggagatcccaaaaaaggaagaggtgaagtccccagtgaaggaggaggagaagccccaggaggtgaaagtcaaagagcccccaaagaaggcagaggaagagaaagcccctgccacaccaaaaacagaggagaagaaggacagcaagaaagaggaggcacccaagaaggaggctccaaagcccaaggtggaggagaagaaggaacctgctgtcgaaaagcccaaagaatccaaagttgaagccaagaaggaagaggctgaagataagaaaaaagtccccaccccagagaaggaggctcctgccaaggtggaggtgaaggaagacgctaaacccaaagaaaagacagaggtagccaagaaggaaccagatgatgccaaggccaaggaacccagcaaaccagcagagaagaaggaggcagcaccggagaaaaaagacaccaaggaggagaaggccaagaagcctgaggagaaacccaagacagaggccaaagccaaggaagatgacaagaccctctcaaaagagcctagcaagcctaaggcagaaaaggctgaaaaatcctccagcacagaccaaaaagacagcaagcctccagagaaggccacagaagacaaggccgccaaggggaagtaaggcagggagaaaggaacatccggaacagccaaagaaactcagaagagtcccggagctcaaggatcagagtaacacaattttcactttttctgtctttatgtaagaagaaactgcttagatgacggggcctccttcttcaaacaggaatttctgttagcaatatgttagcaagagagggcactcccaggcccctgcccccaggccctccccaggcgatggacaattatgatagcttatgtagctgaatgtgatacatgccgaatgccacacgtaaacacttgactataaaaactgcccccctcctttccaaataagtgcatttattgcctctatgtgcaactgacagatgaccgcaataatgaatgagcagttagaaatacattatgcttgagatgtcttaacctattcccaaatgccttctgttttccaaaggagtggtcaagcccttgcccagagctctctattctggaagagcggtccaggtggggccggggactggccactgaattatgccagggcgcactttccactggagttcactttcaattgcttctgtgcaataaaaccaagtgcttataaaatgaaaaaaaaaaaaaaaa

SEQ ID NO: 2140 - protein, 1020 aa, Homo sapiens
MMSFGGADALLGAPFAPLHGGGSLHYALARKGGAGGTRSAAGSSSGFHSWTRTSVSSVSASPSRFRGAGAASSTDSLDTLSNGPEGCMVAVATSRSEKEQLQALNDRFAGYIDKVRQLEAHNRSLEGEAAALRQQQAGRSAMGELYEREVREMRGAVLRLGAARGQLRLEQEHLLEDIAHVRQRLDDEARQREEAEAAARALARFAQEAEAARVDLQKKAQALQEECGYLRRHHQEEVGELLGQIQGSGAAQAQMQAETRDALKCDVTSALREIRAQLEGHAVQSTLQSEEWFRVRLDRLSEAAKVNTDAMRSAQEEITEYRRQLQARTTELEALKSTKDSLERQRSELEDRHQADIASYQEAIQQLDAELRNTKWEMAAQLREYQDLLNVKMALDIEIAAYRKLLEGEECRIGFGPIPFSLPEGLPKIPSVSTHIKVKSEEKIKVVEKSEKETVIVEEQTEETQVTEEVTEEEEKEAKEEEGKEEEGGEEEEAEGGEEETKSPPAEEAASPEKEAKSPVKEEAKSPAEAKSPEKEEAKSPAEVKSPEKAKSPAKEEAKSPPEAKSPEKEEAKSPAEVKSPEKAKSPAKEEAKSPAEAKSPEKAKSPVKEEAKSPAEAKSPVKEEAKSPAEVKSPEKAKSPTKEEAKSPEKAKSPEKEEAKSPEKAKSPVKAEAKSPEKAKSPVKAEAKSPEKAKSPVKEEAKSPEKAKSPVKEEAKSPEKAKSPVKEEAKTPEKAKSPVKEEAKSPEKAKSPEKAKTLDVKSPEAKTPAKEEARSPADKFPEKAKSPVKEEVKSPEKAKSPLKEDAKAPEKEIPKKEEVKSPVKEEEKPQEVKVKEPPKKAEEEKAPATPKTEEKKDSKKEEAPKKEAPKPKVEEKKEPAVEKPKESKVEAKKEEAEDKKKVPTPEKEAPAKVEVKEDAKPKEKTEVAKKEPDDAKAKEPSKPAEKKEAAPEKKDTKEEKAKKPEEKPKTEAKAKEDDKTLSKEPSKPKAEKAEKSSSTDQKDSKPPEKATEDKAAKGK

SEQ ID NO: 2141 - DNA, 2563 bp, Homo sapiens
ctctatggtgcgcgggcaagctttgctccgcctccggcagtggcttactcccggtgccaggttcttggagctgtgaggtgttcagcattatttaagatcacctatgcatcatctgaagccacagtcccaggtcatcttcatcaccttccccagtggaatgcctcctgtgttaaagcccacaacaacccctgtggaggaacaaccatgtcatcagaatcgagcaaaaaacggaagcccaaagtgatccgaagcgatggagccccagctgaaggaaagcggaatcgatctgacaccgagcaggaaggtaaatactacagtgaggaggccgaggtggatctgcgggaccctggcagagactatgagttatacaagtacacctgccaggagctacagaggctgatggctgagatccaagacctgaagagcaggggtggcaaggatgtggcaatagaaatagaagaacggaggatccagagctgtgtgcatttcatgactctaaagaagcttaaccgattagcccacatcaggttgaagaaaggaagagatcagacccacgaggctaagcagaaagtagatgcctatcatctgcagctccagaacctgttgtatgaggtgatgcacctacagaaggagatcaccaaatgtttggagtttaagtcaaagcatgaagaaattgatctggtcagtttagaggagttttataaggaggctccaccagatatcagcaaggccgaagtcaccatgggagaccctcaccagcaaacactggcacgtctggactgggagctggagcagcggaaaaggctggcagagaagtaccgagagtgcctatctaacaaggagaagattctcaaggagattgaggtgaagaaggagtacctgagcagcctccagccccgcctcaacagcatcatgcaggcttcccttccggtgcaggagtacctgtttatgccattcgaccaggctcacaagcagtatgagacagccagacacctgccgcctcccctctatgtcctctttgttcaggccactgcgtatgggcaggcctgtgataagacgttatctgtggcaatcgaaggcagtgtggatgaagccaaggctctgttcaaacctccagaggactcccaagatgacgagagtgactcagatgccgaggaggagcagactacgaagcgccggagacccacactgggggttcagttggacgacaaacgcaaggagatgctgaagaggcacccactgtctgtcatgctcgacctgaagtgcaaagatgacagtgtgcttcacctgactttctactacctcatgaacctcaacatcatgacagtaaaagccaaagtgacaactgccatggagctgatcacccccatcagtgcaggtgacttgctgtctcctgactcagtcctgagttgcttgtatcctggggatcatggaaagaaaactccgaatccagccaatcagtatcagtttgataaagttggcatcctgactttgagcgactatgtacttgagctaggtcacccctatttgtgggtgcagaagctgggtggcctccacttccccaaagagcagccccagcaaacagtgattgctgaccactcgctgagcgccagccacatggagaccaccatgaaacttctgaagaccagggtgcagtcccgcctggccctccacaaacagtttgcatccctagaacatggcattgtgccagttaccagtgattgccagtacctcttccctgccaaggttgtctctcgcctggtgaaatgggtgacagttgcccatgaggattacatggagctgcacttcaccaaagacattgtggatgcgggactggctggggacaccaatctctactacatggcgctcatcgaaaggggcacagccaaactgcaggccgctgtggtgttgaaccctggctactcctccatcccacctgttttccagctctgtttgaactggaaaggggagaaaaccaacagcaacgatgacaacattcgggccatggagggcgaagtcaatgtgtgctacaaggagctgtgtggcccttggcccagccaccagctgttgaccaaccagctgcagcggctgtgtgtgctgctggatgtttacctggagaccgagagccatgacgacagtgtggaggggcccaaggaatttccccaggagaagatgtgtctgcggctcttcaggggtcctagcaggatgaagccatttaaatacaaccatcctcagggattcttcagccatcgctgatctcccgcgcagaccgttgtttcccccaaggcctcaccctgagcactgggcttctgctttctgctctggcccacatgtgactcttgatattctccaaagacaccagccaattaaaaagcgtcacctgaccagtggcctttgtctgtggttcctggcaaggtggctttgcagtctggaagggcaggtgggagctgtgacacagtgtgaaaaagcatttgtagagagactttttctcagcagccaataaaagcagagtggaaaaagattccaattctgcagagagatgctcaaaaaaaaaaaaaaaaaa

SEQ ID NO: 2142 - protein, 683 aa, Homo sapiens
MSSESSKKRKPKVIRSDGAPAEGKRNRSDTEQEGKYYSEEAEVDLRDPGRDYELYKYTCQELQRLMAEIQDLKSRGGKDVAIEIEERRIQSCVHFMTLKKLNRLAHIRLKKGRDQTHEAKQKVDAYHLQLQNLLYEVMHLQKEITKCLEFKSKHEEIDLVSLEEFYKEAPPDISKAEVTMGDPHQQTLARLDWELEQRKRLAEKYRECLSNKEKILKEIEVKKEYLSSLQPRLNSIMQASLPVQEYLFMPFDQAHKQYETARHLPPPLYVLFVQATAYGQACDKTLSVAIEGSVDEAKALFKPPEDSQDDESDSDAEEEQTTKRRRPTLGVQLDDKRKEMLKRHPLSVMLDLKCKDDSVLHLTFYYLMNLNIMTVKAKVTTAMELITPISAGDLLSPDSVLSCLYPGDHGKKTPNPANQYQFDKVGILTLSDYVLELGHPYLWVQKLGGLHFPKEQPQQTVIADHSLSASHMETTMKLLKTRVQSRLALHKQFASLEHGIVPVTSDCQYLFPAKVVSRLVKWVTVAHEDYMELHFTKDIVDAGLAGDTNLYYMALIERGTAKLQAAVVLNPGYSSIPPVFQLCLNWKGEKTNSNDDNIRAMEGEVNVCYKELCGPWPSHQLLTNQLQRLCVLLDVYLETESHDDSVEGPKEFPQEKMCLRLFRGPSRMKPFKYNHPQGFFSHR

SEQ ID NO: 2143 - DNA, 2694 bp, Homo sapiens
gggcagtggggctgggagatggggcggggctgggcgctccgggactgaggtgctgatcgcccaaagggcgcccctgggctggggtctgacccggcttctcctccctcactacccgcggtccccggcctctcggcgctgcgctgttacctcatccgaaaagtgttcgctgcagcatcctcaggcttcacgttggagcctcttgattgtggtgttcagcattatttaagatcacctatgcatcatctgaagccacagtcccaggtcatcttcatcaccttccccagtggaatgcctcctgtgttaaagcccacaacaacccctgtggaggaacaaccatgtcatcagaatcgagcaaaaaacggaagcccaaagtgatccgaagcgatggagccccagctgaaggaaagcggaatcgatctgacaccgagcaggaaggtaaatactacagtgaggaggccgaggtggatctgcgggaccctggcagagactatgagttatacaagtacacctgccaggagctacagaggctgatggctgagatccaagacctgaagagcaggggtggcaaggatgtggcaatagaaatagaagaacggaggatccagagctgtgtgcatttcatgactctaaagaagcttaaccgattagcccacatcaggttgaagaaaggaagagatcagacccacgaggctaagcagaaagtagatgcctatcatctgcagctccagaacctgttgtatgaggtgatgcacctacagaaggagatcaccaaatgtttggagtttaagtcaaagcatgaagaaattgatctggtcagtttagaggagttttataaggaggctccaccagatatcagcaaggccgaagtcaccatgggagaccctcaccagcaaacactggcacgtctggactgggagctggagcagcggaaaaggctggcagagaagtaccgagagtgcctatctaacaaggagaagattctcaaggagattgaggtgaagaaggagtacctgagcagcctccagccccgcctcaacagcatcatgcaggcttcccttccggtgcaggagtacctgtttatgccattcgaccaggctcacaagcagtatgagacagccagacacctgccgcctcccctctatgtcctctttgttcaggccactgcgtatgggcaggcctgtgataagacgttatctgtggcaatcgaaggcagtgtggatgaagccaaggctctgttcaaacctccagaggactcccaagatgacgagagtgactcagatgccgaggaggagcagactacgaagcgccggagacccacactgggggttcagttggacgacaaacgcaaggagatgctgaagaggcacccactgtctgtcatgctcgacctgaagtgcaaagatgacagtgtgcttcacctgactttctactacctcatgaacctcaacatcatgacagtaaaagccaaagtgacaactgccatggagctgatcacccccatcagtgcaggtgacttgctgtctcctgactcagtcctgagttgcttgtatcctggggatcatggaaagaaaactccgaatccagccaatcagtatcagtttgataaagttggcatcctgactttgagcgactatgtacttgagctaggtcacccctatttgtgggtgcagaagctgggtggcctccacttccccaaagagcagccccagcaaacagtgattgctgaccactcgctgagcgccagccacatggagaccaccatgaaacttctgaagaccagggtgcagtcccgcctggccctccacaaacagtttgcatccctagaacatggcattgtgccagttaccagtgattgccagtacctcttccctgccaaggttgtctctcgcctggtgaaatgggtgacagttgcccatgaggattacatggagctgcacttcaccaaagacattgtggatgcgggactggctggggacaccaatctctactacatggcgctcatcgaaaggggcacagccaaactgcaggccgctgtggtgttgaaccctggctactcctccatcccacctgttttccagctctgtttgaactggaaaggggagaaaaccaacagcaacgatgacaacattcgggccatggagggcgaagtcaatgtgtgctacaaggagctgtgtggcccttggcccagccaccagctgttgaccaaccagctgcagcggctgtgtgtgctgctggatgtttacctggagaccgagagccatgacgacagtgtggaggggcccaaggaatttccccaggagaagatgtgtctgcggctcttcaggggtcctagcaggatgaagccatttaaatacaaccatcctcagggattcttcagccatcgctgatctcccgcgcagaccgttgtttcccccaaggcctcaccctgagcactgggcttctgctttctgctctggcccacatgtgactcttgatattctccaaagacaccagccaattaaaaagcgtcacctgaccagtggcctttgtctgtggttcctggcaaggtggctttgcagtctggaagggcaggtgggagctgtgacacagtgtgaaaaagcatttgtagagagactttttctcagcagccaataaaagcagagtggaaaaagattccaattctgcagagagatgctcaaaaaaaaaaaaaaaaaa

SEQ ID NO: 2144 - protein, 683 aa, Homo sapiens; identical to SEQ ID NO: 2142

SEQ ID NO: 2145 - DNA, 2578 bp, Homo sapiens
gggcagtggggctgggagatggggcggggctgggcgctccgggactgaggtgctgatcgcccaaagggcgcccctgggctggggtctgacccggcttctcctccctcactacccgcggtccccggcctctcggcgctgcgctgttacctcatccgaaaagtgttcgctgcagcatcctcaggcttcacgttggagcctcttgattgtggaggaacaaccatgtcatcagaatcgagcaaaaaacggaagcccaaagtgatccgaagcgatggagccccagctgaaggaaagcggaatcgatctgacaccgagcaggaaggtaaatactacagtgaggaggccgaggtggatctgcgggaccctggcagagactatgagttatacaagtacacctgccaggagctacagaggctgatggctgagatccaagacctgaagagcaggggtggcaaggatgtggcaatagaaatagaagaacggaggatccagagctgtgtgcatttcatgactctaaagaagcttaaccgattagcccacatcaggttgaagaaaggaagagatcagacccacgaggctaagcagaaagtagatgcctatcatctgcagctccagaacctgttgtatgaggtgatgcacctacagaaggagatcaccaaatgtttggagtttaagtcaaagcatgaagaaattgatctggtcagtttagaggagttttataaggaggctccaccagatatcagcaaggccgaagtcaccatgggagaccctcaccagcaaacactggcacgtctggactgggagctggagcagcggaaaaggctggcagagaagtaccgagagtgcctatctaacaaggagaagattctcaaggagattgaggtgaagaaggagtacctgagcagcctccagccccgcctcaacagcatcatgcaggcttcccttccggtgcaggagtacctgtttatgccattcgaccaggctcacaagcagtatgagacagccagacacctgccgcctcccctctatgtcctctttgttcaggccactgcgtatgggcaggcctgtgataagacgttatctgtggcaatcgaaggcagtgtggatgaagccaaggctctgttcaaacctccagaggactcccaagatgacgagagtgactcagatgccgaggaggagcagactacgaagcgccggagacccacactgggggttcagttggacgacaaacgcaaggagatgctgaagaggcacccactgtctgtcatgctcgacctgaagtgcaaagatgacagtgtgcttcacctgactttctactacctcatgaacctcaacatcatgacagtaaaagccaaagtgacaactgccatggagctgatcacccccatcagtgcaggtgacttgctgtctcctgactcagtcctgagttgcttgtatcctggggatcatggaaagaaaactccgaatccagccaatcagtatcagtttgataaagttggcatcctgactttgagcgactatgtacttgagctaggtcacccctatttgtgggtgcagaagctgggtggcctccacttccccaaagagcagccccagcaaacagtgattgctgaccactcgctgagcgccagccacatggagaccaccatgaaacttctgaagaccagggtgcagtcccgcctggccctccacaaacagtttgcatccctagaacatggcattgtgccagttaccagtgattgccagtacctcttccctgccaaggttgtctctcgcctggtgaaatgggtgacagttgcccatgaggattacatggagctgcacttcaccaaagacattgtggatgcgggactggctggggacaccaatctctactacatggcgctcatcgaaaggggcacagccaaactgcaggccgctgtggtgttgaaccctggctactcctccatcccacctgttttccagctctgtttgaactggaaaggggagaaaaccaacagcaacgatgacaacattcgggccatggagggcgaagtcaatgtgtgctacaaggagctgtgtggcccttggcccagccaccagctgttgaccaaccagctgcagcggctgtgtgtgctgctggatgtttacctggagaccgagagccatgacgacagtgtggaggggcccaaggaatttccccaggagaagatgtgtctgcggctcttcaggggtcctagcaggatgaagccatttaaatacaaccatcctcagggattcttcagccatcgctgatctcccgcgcagaccgttgtttcccccaaggcctcaccctgagcactgggcttctgctttctgctctggcccacatgtgactcttgatattctccaaagacaccagccaattaaaaagcgtcacctgaccagtggcctttgtctgtggttcctggcaaggtggctttgcagtctggaagggcaggtgggagctgtgacacagtgtgaaaaagcatttgtagagagactttttctcagcagccaataaaagcagagtggaaaaagattccaattctgcagagagatgctcaaaaaaaaaaaaaaaaaa

SEQ ID NO: 2146 - protein, 683 aa, Homo sapiens; identical to SEQ ID NO: 2142

SEQ ID NO: 2147 - DNA, 2447 bp, Homo sapiens
ctctatggtgcgcgggcaagctttgctccgcctccggcagtggcttactcccggtgccaggttcttggagctgtgaggaggaacaaccatgtcatcagaatcgagcaaaaaacggaagcccaaagtgatccgaagcgatggagccccagctgaaggaaagcggaatcgatctgacaccgagcaggaaggtaaatactacagtgaggaggccgaggtggatctgcgggaccctggcagagactatgagttatacaagtacacctgccaggagctacagaggctgatggctgagatccaagacctgaagagcaggggtggcaaggatgtggcaatagaaatagaagaacggaggatccagagctgtgtgcatttcatgactctaaagaagcttaaccgattagcccacatcaggttgaagaaaggaagagatcagacccacgaggctaagcagaaagtagatgcctatcatctgcagctccagaacctgttgtatgaggtgatgcacctacagaaggagatcaccaaatgtttggagtttaagtcaaagcatgaagaaattgatctggtcagtttagaggagttttataaggaggctccaccagatatcagcaaggccgaagtcaccatgggagaccctcaccagcaaacactggcacgtctggactgggagctggagcagcggaaaaggctggcagagaagtaccgagagtgcctatctaacaaggagaagattctcaaggagattgaggtgaagaaggagtacctgagcagcctccagccccgcctcaacagcatcatgcaggcttcccttccggtgcaggagtacctgtttatgccattcgaccaggctcacaagcagtatgagacagccagacacctgccgcctcccctctatgtcctctttgttcaggccactgcgtatgggcaggcctgtgataagacgttatctgtggcaatcgaaggcagtgtggatgaagccaaggctctgttcaaacctccagaggactcccaagatgacgagagtgactcagatgccgaggaggagcagactacgaagcgccggagacccacactgggggttcagttggacgacaaacgcaaggagatgctgaagaggcacccactgtctgtcatgctcgacctgaagtgcaaagatgacagtgtgcttcacctgactttctactacctcatgaacctcaacatcatgacagtaaaagccaaagtgacaactgccatggagctgatcacccccatcagtgcaggtgacttgctgtctcctgactcagtcctgagttgcttgtatcctggggatcatggaaagaaaactccgaatccagccaatcagtatcagtttgataaagttggcatcctgactttgagcgactatgtacttgagctaggtcacccctatttgtgggtgcagaagctgggtggcctccacttccccaaagagcagccccagcaaacagtgattgctgaccactcgctgagcgccagccacatggagaccaccatgaaacttctgaagaccagggtgcagtcccgcctggccctccacaaacagtttgcatccctagaacatggcattgtgccagttaccagtgattgccagtacctcttccctgccaaggttgtctctcgcctggtgaaatgggtgacagttgcccatgaggattacatggagctgcacttcaccaaagacattgtggatgcgggactggctggggacaccaatctctactacatggcgctcatcgaaaggggcacagccaaactgcaggccgctgtggtgttgaaccctggctactcctccatcccacctgttttccagctctgtttgaactggaaaggggagaaaaccaacagcaacgatgacaacattcgggccatggagggcgaagtcaatgtgtgctacaaggagctgtgtggcccttggcccagccaccagctgttgaccaaccagctgcagcggctgtgtgtgctgctggatgtttacctggagaccgagagccatgacgacagtgtggaggggcccaaggaatttccccaggagaagatgtgtctgcggctcttcaggggtcctagcaggatgaagccatttaaatacaaccatcctcagggattcttcagccatcgctgatctcccgcgcagaccgttgtttcccccaaggcctcaccctgagcactgggcttctgctttctgctctggcccacatgtgactcttgatattctccaaagacaccagccaattaaaaagcgtcacctgaccagtggcctttgtctgtggttcctggcaaggtggctttgcagtctggaagggcaggtgggagctgtgacacagtgtgaaaaagcatttgtagagagactttttctcagcagccaataaaagcagagtggaaaaagattccaattctgcagagagatgctcaaaaaaaaaaaaaaaaaa

SEQ ID NO: 2148 - protein, 683 aa, Homo sapiens; identical to SEQ ID NO: 2142

SEQ ID NO: 2149 - DNA, 2233 bp, Homo sapiens
tcccacgctcccattttaccgaggtggatctgaggcccagagtgggcaaagggcttgccaaggtcgcagagcgcgcagaggattagaaccctgattccgtccagcacctgcggagttggagacgcccacaggaaacgcccacctgaccgggtgagtgagggggcgggcgagccggaggggtggagtttattcgcgccccgctccgccaccagggcttgggggcggggccttcctgcaacctttgcggctccaacatggctccgcggctgtgcagcatctctgtgacggcgcggcggctgctggggggcccggggcctcgcgctggggacgttgcgtctgcagctgcggcgcgtttctattccaaggacaatgaaggcagctggttccgctccctctttgttcacaaagtggatccccggaaggatgcccactccaccctgctgtccaagaaggaaaccagcaacctctataagatccagtttcacaatgtaaagcctgaatacctggatgcctacaacagcctcacggaggctgtgctgcccaagcttcacctggatgaggactacccatgctcactcgtgggcaactggaacacgtggtatggggagcaggaccaggcagtgcacctgtggcgattctcaggtggctacccagccctcatggactgcatgaacaagctcaaaaacaataaggagtacctggagttccgaagggagcggacgcagatgctgctgtccaggagaaaccagctgctccttgagttcagcttctggaatgagccacagcccagaatgggtcccaacatctatgagctgaggacatacaagctcaagccaggaaccatgatcgagtgggggaacaactgggctcgggccatcaagtaccggcaggagaaccaggaggcagtgggcggcttcttctcacagataggagagctctacgtggtgcaccatctctgggcctataaagacctgcagtctcgggaggagactcgaaacgctgcctggaggaagagaggctgggatgaaaatgtctactatacagtccccctggtgcgacacatggagtctaggatcatgatccccttgaagatctcgcctctgcagtgatgctgcctacacctccacctccttccccttctccctcaggcaaccccgacagacagtggcactcctggtcctgctgtcttggttttgtcttggctctgggaggactctgaggggcagtgctcagttcagacaagggggaactgaaggctgacaagttctgaggattacagctctgcccaggccctttctactttccctgcctgcctccctccccctgctagaagtagtttctgatttccctgaatgaaagatagtgatcttttaggccttcatatatcttctaaaattcctcatctcaaggccaccagtccccagttatcacccttggaaatcctctgtttagcttagttgcacaaaaggtagtatgtccagtggctagaggtggggtgggaagagaggaggccaggccaggccctcaggaattccctggtttccactgggccacccacttgctggacagtctgagccaagtccctcctgctggagaaaagcctggaactgccaaaacaaaaaaacaaatacaaacaaacctcgtcaccacggtcaggaggaggttcagacattctgcccagaggggctggggaaagggatgggagccaggaaagatttaggggcaggagacagacacgtaacaggaactcggaaggtagaacttagaattcagaacttgggtttcaattgtagaatttggaatctggaatacagaattgggaagaagaacagagatgacaaaagaccacttgaagagaggttcctaatactagacagatggagagtggcttggctgtttccccctgcatattggggttgaaaacttaaatgtgtagttccagtccttctatgcagagtctctcctgccctccctccttcctgcaggcaaatatacaagctagaccctgttccctcaccctgtatcctgtctcccctaattgacattctatcagcccaaccctcattctgcagggccacctggtgtgtggaggtggcgggaggggtcagtgactctgggggtctcctcagtgacccccatacctcatcatgaacccttgggtagcttgattctgcctaccatccaggaaaacttgtgctggaattgctgatggaaacaattaaatatttactat

SEQ ID NO: 2150 - protein, 284 aa, Homo sapiens
MAPRLCSISVTARRLLGGPGPRAGDVASAAAARFYSKDNEGSWFRSLFVHKVDPRKDAHSTLLSKKETSNLYKIQFHNVKPEYLDAYNSLTEAVLPKLHLDEDYPCSLVGNWNTWYGEQDQAVHLWRFSGGYPALMDCMNKLKNNKEYLEFRRERTQMLLSRRNQLLLEFSFWNEPQPRMGPNIYELRTYKLKPGTMIEWGNNWARAIKYRQENQEAVGGFFSQIGELYVVHHLWAYKDLQSREETRNAAWRKRGWDENVYYTVPLVRHMESRIMIPLKISPLQ

SEQ ID NO: 2151 - DNA, 6021 bp, Homo sapiens
ggagtgaggacggtgacagccacgcgcgcgcgtacgcgcccgatgcagcgcggccccgtgaccctagtcggccgctgagaggcgcgcggagtctgggccgctgccgtctaggggtcccgtcccgaggcgtccccggcatctccggcccgaatcccggagtgccgggtcgcgcctgcaccgaaggtcccggctcctgtgccctccctgcagccgtcagggcccgtcccccaactcccctttccgctcaggcagggtcctcgcggcccatgctggccgctggggacccgcgcagcccagaccgttcccgggccggccagccggccaccatggtggccctgaggcctgtgcagcaactccaggggggctaaagggctcagagtgcaggccgtggggcgcgagggtcccgggcctgagccccgcgccatggccggggccatcgcttcccgcatgagcttcagctctctcaagaggaagcaacccaagacgttcaccgtgaggatcgtcaccatggacgccgagatggagttcaattgcgagatgaagtggaaagggaaggacctctttgatttggtgtgccggactctggggctccgagaaacctggttctttggactgcagtacacaatcaaggacacagtggcctggctcaaaatggacaagaaggtactggatcatgatgtttcaaaggaagaaccagtcacctttcacttcttggccaaattttatcctgagaatgctgaagaggagctggttcaggagatcacacaacatttattcttcttacaggtaaagaagcagattttagatgaaaagatctactgccctcctgaggcttctgtgctcctggcttcttacgccgtccaggccaagtatggtgactacgaccccagtgttcacaagcggggatttttggcccaagaggaattgcttccaaaaagggtaataaatctgtatcagatgactccggaaatgtgggaggagagaattactgcttggtacgcagagcaccgaggccgagccagggatgaagctgaaatggaatatctgaagatagctcaggacctggagatgtacggtgtgaactactttgcaatccggaataaaaagggcacagagctgctgcttggagtggatgccctggggcttcacatttatgaccctgagaacagactgacccccaagatctccttcccgtggaatgaaatccgaaacatctcgtacagtgacaaggagtttactattaaaccactggataagaaaattgatgtcttcaagtttaactcctcaaagcttcgtgttaataagctgattctccagctatgtatcgggaaccatgatctatttatgaggagaaggaaagccgattctttggaagttcagcagatgaaagcccaggccagggaggagaaggctagaaagcagatggagcggcagcgcctcgctcgagagaagcagatgagggaggaggctgaacgcacgagggatgagttggagaggaggctgctgcagatgaaagaagaagcaacaatggccaacgaagcactgatgcggtctgaggagacagctgacctgttggctgaaaaggcccagatcaccgaggaggaggcaaaacttctggcccagaaggccgcagaggctgagcaggaaatgcagcgcatcaaggccacagcgattcgcacggaggaggagaagcgcctgatggagcagaaggtgctggaagccgaggtgctggcactgaagatggctgaggagtcagagaggagggccaaagaggcagatcagctgaagcaggacctgcaggaagcacgcgaggcggagcgaagagccaagcagaagctcctggagattgccaccaagcccacgtacccgcccatgaacccaattccagcaccgttgcctcctgacataccaagcttcaacctcattggtgacagcctgtctttcgacttcaaagatactgacatgaagcggctttccatggagatagagaaagaaaaagtggaatacatggaaaagagcaagcatctgcaggagcagctcaatgaactcaagacagaaatcgaggccttgaaactgaaagagagggagacagctctggatattctgcacaatgagaactccgacaggggtggcagcagcaagcacaataccattaaaaagctcaccttgcagagcgccaagtcccgagtggccttctttgaagagctctagcaggtgacccagccaccccaggacctgccacttctcctgctaccgggaccgcgggatggaccagatatcaagagagccatccatagggagctggctgggggtttccgtgggagctccagaactttccccagctgagtgaagagcccagcccctcttatgtgcaattgccttgaactacgaccctgtagagatttctctcatggcgttctagttctctgacctgagtctttgttttaagaagtatttgtcttcctttgtctaatgtgggattcctgactcccttcgtccaaggcaccggtgtgtgtgtgtcttgcactccagagctgacctccaccgcccagcctgggaagtcattgtagggagtgagacactgaagccctgagaagccagtgccatcatccccaccccgcccagggttccggaacattcattcccccaccggtgaggacctggcatgcagcgaagcagcccagcccggcggatcccaggccagcacgcctgccggcttctcatcgtcagggagcccgcccagagctcgtgacgagcaagtgctgggtccccgccaggcaccccgaggcggcgctctggctggcagctggtggggaataggcagggcagctgtggctggggagagactttaggcagaagctgtgatgcaggctgactgccagccgaggggctgggtagtgccgtgcgggagctgatggtacagggcactcgctgtccccctccggccaccctagaccagggtccgagaggcaggcaggagccactcatgtcttccccattgcccgacgcccatagacgctccttcctgtgtggggctggggtactccctggtcgtactgcagtcagcacccgtaacccggctatgaccagggatctgtaagccctgtggctccacaggtgctgcttctcactggcccagactctgagctccaccggcccagtctgcacggcccatctgcttcaccttccctcccagccacgtgccagtggccacagcccacttcccaacccactgttgtacccaggcctcactttgctgttgcccttgtccctcttcgggccctgaattttctgttccctgggggccagccagggccctttgtgcccctcccagcacaggcctgatgcaggtgtccactcacaggtggcgctcacctaggctgtcacaggacccacctccatgccaggcaacagagggccacagaaccacccccacggctcactccttggtctggggccaccttcttgccctttctttttttttttttttttttttttccgagatggagtctctctctgtcacccaggtgggagtgtggtggcacaatctcggctcactgcaacctccacctcctgagttcaagcaattctcctgcctcagcctcccaagtagctgggactacaggcatgcaccaccacacttggccaatgttctgtatttttaatagggacggggttttgccatgttagctaggctggtctcaaactcacacctgggattacaggcatgagccactgcacccagccccttcttgccctttcttttctccatggctgatgctgctgtggccagccagggcccttgagatccttccagtttggctgttatgcaaagcaggtgatttgtcttaatcagataaaagatagaggctatgggggcctcaagatttttggagagcagaggtggtctctggcaattccatctggttttgagaaacttagcagctcacagagcacagagatcctgccttcttcctactatcaggctgacctaatggggttgggctgctcggcaactgcttgggtcaccttgccccaaggaaaccagccctgggtgccacccagccacttagggtctacagggtgggactccagacctagagcgtaagtatggatgttgtggccctgtgtcttcctagtgtgacccagccaggagcggaagcttcaggcgtttgtaaagtgaggtctggctctgcctcctccgttttttttttttttctgtttctgtttctgttttttttttgagatggagtctcgctctgtcgcccaggctggagtgcagtgtcacgatctcagctcactgcaacctccgcctcccaggtacaagagattctcctgcctcagcctcccgagtagctgggactacaggcgtgtgccaccatgcctggctaatttttgtatttttagtagagatggggtttcgccatgttagccagactggtctcgaactcctgacctcaggtgatcctcccaccccggcttcccaaagttctgggattataggcgtgagccaccatgcccggtctcttctcagtcttgaagcccatccctggatttccaccaggagttactttcctcctgacctgtaaatttgttctttaacaatggctgcaggtgggagcatatggtggtttataaaaacgctgtcgggctttgtttccttctttagctgccgtgtctacttctgaagtctgggaagtgccaagccacgcggcctcaagggagctggctggtgtttgagctgtggcagaagcacctggggctccagggagcaggctgggaactgcaggaccttgctcagccaggagcacttccccctccttgaggcaggaatactgaggtgcctccccacagatggagaaggtggagaggaggatgggcctcaggagcatctcaagccccagtagcaggagaaagaaagaaagagatgcctggttttcacagactggttcctgtggctgggatgactgcatccttttttttttttttttgagacggagtttttgcctttgtcgcccaggctggagtgcaatggcgtgatctcggctcaccgcaacctccgcctcccggattcaagcaattctcctgcctcagcctcccgagtagctgggattacaggcacgcacctccacgtccggctaattttgtatttttagtggagacggggtttctccatgtcggtcaggctggtctcgaactcccgacctcaggtgatctgcccacctcggcctcccaaagtgctgggattacaggcatgagccaccgcgcttggccagactgcgtcctttttaagcgaacattttagggcctgggagtttgtcaagtaaggaagtctcaagcccaaagagcagcgtcctgaccatggtggtttcattacgagcccttctgctggctctcaggcagaagccccacagcaccgggaccattcatgaggtcactgcccagctcatgatgtccgtgaggctgtccttttggccagtagccgtgtgcagctgtgtggcacagatggcttcgttcatcctgatcaaggccccacctcagccacagcagtccccccaacctgtgttgtccaccctattattcatgtacctgccaggccctgctagatagcaccccgtggcattacataacacttcatgagtggctgtgtcttgtaattttggggacaggtttctctctttccctctcttttttttgtcaaaagcccagagactgacaaccagctgcagtgtctaagtgttcctcactgacagggtggggcctcaccacccctggagggagcagcgttggcagggagacagcctggcccagtgaccctgggcccaagccagcccctccagggctttcagggaagcgccatccattttcaaagatgtcaaacgtcacttcttcctgtagggcccgagtcctgcctcctatcagggccagatcatagaaggctattttctattctggggaacgattataacttaaatgattgttttaataaaaattctaagctggaaaaaaaaaaaaaaaaaa

SEQ ID NO: 2152 - protein, 595 aa, Homo sapiens
MAGAIASRMSFSSLKRKQPKTFTVRIVTMDAEMEFNCEMKWKGKDLFDLVCRTLGLRETWFFGLQYTIKDTVAWLKMDKKVLDHDVSKEEPVTFHFLAKFYPENAEEELVQEITQHLFFLQVKKQILDEKIYCPPEASVLLASYAVQAKYGDYDPSVHKRGFLAQEELLPKRVINLYQMTPEMWEERITAWYAEHRGRARDEAEMEYLKIAQDLEMYGVNYFAIRNKKGTELLLGVDALGLHIYDPENRLTPKISFPWNEIRNISYSDKEFTIKPLDKKIDVFKFNSSKLRVNKLILQLCIGNHDLFMRRRKADSLEVQQMKAQAREEKARKQMERQRLAREKQMREEAERTRDELERRLLQMKEEATMANEALMRSEETADLLAEKAQITEEEAKLLAQKAAEAEQEMQRIKATAIRTEEEKRLMEQKVLEAEVLALKMAEESERRAKEADQLKQDLQEAREAERRAKQKLLEIATKPTYPPMNPIPAPLPPDIPSFNLIGDSLSFDFKDTDMKRLSMEIEKEKVEYMEKSKHLQEQLNELKTEIEALKLKERETALDILHNENSDRGGSSKHNTIKKLTLQSAKSRVAFFEEL

SEQ ID NO: 2153 - DNA, 6066 bp, Homo sapiens
ggagtgaggacggtgacagccacgcgcgcgcgtacgcgcccgatgcagcgcggccccgtgaccctagtcggccgctgagaggcgcgcggagtctgggccgctgccgtctaggggtcccgtcccgaggcgtccccggcatctccggcccgaatcccggagtgccgggtcgcgcctgcaccgaaggtcccggctcctgtgccctccctgcagccgtcagggcccgtcccccaactcccctttccgctcaggcagggtcctcgcggcccatgctggccgctggggacccgcgcagcccagaccgttcccgggccggccagccggccaccatggtggccctgaggcctgtgcagcaactccaggggggctaaagggctcagagtgcaggccgtggggcgcgagggtcccgggcctgagccccgcgccatggccggggccatcgcttcccgcatgagcttcagctctctcaagaggaagcaacccaagacgttcaccgtgaggatcgtcaccatggacgccgagatggagttcaattgcgagatgaagtggaaagggaaggacctctttgatttggtgtgccggactctggggctccgagaaacctggttctttggactgcagtacacaatcaaggacacagtggcctggctcaaaatggacaagaaggtactggatcatgatgtttcaaaggaagaaccagtcacctttcacttcttggccaaattttatcctgagaatgctgaagaggagctggttcaggagatcacacaacatttattcttcttacaggtaaagaagcagattttagatgaaaagatctactgccctcctgaggcttctgtgctcctggcttcttacgccgtccaggccaagtatggtgactacgaccccagtgttcacaagcggggatttttggcccaagaggaattgcttccaaaaagggtaataaatctgtatcagatgactccggaaatgtgggaggagagaattactgcttggtacgcagagcaccgaggccgagccagggatgaagctgaaatggaatatctgaagatagctcaggacctggagatgtacggtgtgaactactttgcaatccggaataaaaagggcacagagctgctgcttggagtggatgccctggggcttcacatttatgaccctgagaacagactgacccccaagatctccttcccgtggaatgaaatccgaaacatctcgtacagtgacaaggagtttactattaaaccactggataagaaaattgatgtcttcaagtttaactcctcaaagcttcgtgttaataagctgattctccagctatgtatcgggaaccatgatctatttatgaggagaaggaaagccgattctttggaagttcagcagatgaaagcccaggccagggaggagaaggctagaaagcagatggagcggcagcgcctcgctcgagagaagcagatgagggaggaggctgaacgcacgagggatgagttggagaggaggctgctgcagatgaaagaagaagcaacaatggccaacgaagcactgatgcggtctgaggagacagctgacctgttggctgaaaaggcccagatcaccgaggaggaggcaaaacttctggcccagaaggccgcagaggctgagcaggaaatgcagcgcatcaaggccacagcgattcgcacggaggaggagaagcgcctgatggagcagaaggtgctggaagccgaggtgctggcactgaagatggctgaggagtcagagaggagggccaaagaggcagatcagctgaagcaggacctgcaggaagcacgcgaggcggagcgaagagccaagcagaagctcctggagattgccaccaagcccacgtacccgcccatgaacccaattccagcaccgttgcctcctgacataccaagcttcaacctcattggtgacagcctgtctttcgacttcaaagatactgacatgaagcggctttccatggagatagagaaagaaaaagtggaatacatggaaaagagcaagcatctgcaggagcagctcaatgaactcaagacagaaatcgaggccttgaaactgaaagagagggagacagctctggatattctgcacaatgagaactccgacaggggtggcagcagcaagcacaataccattaaaaagcctcaagcccaaggcagaagacctatctgcatttgagccctcaaactcaccttgcagagcgccaagtcccgagtggccttctttgaagagctctagcaggtgacccagccaccccaggacctgccacttctcctgctaccgggaccgcgggatggaccagatatcaagagagccatccatagggagctggctgggggtttccgtgggagctccagaactttccccagctgagtgaagagcccagcccctcttatgtgcaattgccttgaactacgaccctgtagagatttctctcatggcgttctagttctctgacctgagtctttgttttaagaagtatttgtcttcctttgtctaatgtgggattcctgactcccttcgtccaaggcaccggtgtgtgtgtgtcttgcactccagagctgacctccaccgcccagcctgggaagtcattgtagggagtgagacactgaagccctgagaagccagtgccatcatccccaccccgcccagggttccggaacattcattcccccaccggtgaggacctggcatgcagcgaagcagcccagcccggcggatcccaggccagcacgcctgccggcttctcatcgtcagggagcccgcccagagctcgtgacgagcaagtgctgggtccccgccaggcaccccgaggcggcgctctggctggcagctggtggggaataggcagggcagctgtggctggggagagactttaggcagaagctgtgatgcaggctgactgccagccgaggggctgggtagtgccgtgcgggagctgatggtacagggcactcgctgtccccctccggccaccctagaccagggtccgagaggcaggcaggagccactcatgtcttccccattgcccgacgcccatagacgctccttcctgtgtggggctggggtactccctggtcgtactgcagtcagcacccgtaacccggctatgaccagggatctgtaagccctgtggctccacaggtgctgcttctcactggcccagactctgagctccaccggcccagtctgcacggcccatctgcttcaccttccctcccagccacgtgccagtggccacagcccacttcccaacccactgttgtacccaggcctcactttgctgttgcccttgtccctcttcgggccctgaattttctgttccctgggggccagccagggccctttgtgcccctcccagcacaggcctgatgcaggtgtccactcacaggtggcgctcacctaggctgtcacaggacccacctccatgccaggcaacagagggccacagaaccacccccacggctcactccttggtctggggccaccttcttgccctttctttttttttttttttttttttttccgagatggagtctctctctgtcacccaggtgggagtgtggtggcacaatctcggctcactgcaacctccacctcctgagttcaagcaattctcctgcctcagcctcccaagtagctgggactacaggcatgcaccaccacacttggccaatgttctgtatttttaatagggacggggttttgccatgttagctaggctggtctcaaactcacacctgggattacaggcatgagccactgcacccagccccttcttgccctttcttttctccatggctgatgctgctgtggccagccagggcccttgagatccttccagtttggctgttatgcaaagcaggtgatttgtcttaatcagataaaagatagaggctatgggggcctcaagatttttggagagcagaggtggtctctggcaattccatctggttttgagaaacttagcagctcacagagcacagagatcctgccttcttcctactatcaggctgacctaatggggttgggctgctcggcaactgcttgggtcaccttgccccaaggaaaccagccctgggtgccacccagccacttagggtctacagggtgggactccagacctagagcgtaagtatggatgttgtggccctgtgtcttcctagtgtgacccagccaggagcggaagcttcaggcgtttgtaaagtgaggtctggctctgcctcctccgttttttttttttttctgtttctgtttctgttttttttttgagatggagtctcgctctgtcgcccaggctggagtgcagtgtcacgatctcagctcactgcaacctccgcctcccaggtacaagagattctcctgcctcagcctcccgagtagctgggactacaggcgtgtgccaccatgcctggctaatttttgtatttttagtagagatggggtttcgccatgttagccagactggtctcgaactcctgacctcaggtgatcctcccaccccggcttcccaaagttctgggattataggcgtgagccaccatgcccggtctcttctcagtcttgaagcccatccctggatttccaccaggagttactttcctcctgacctgtaaatttgttctttaacaatggctgcaggtgggagcatatggtggtttataaaaacgctgtcgggctttgtttccttctttagctgccgtgtctacttctgaagtctgggaagtgccaagccacgcggcctcaagggagctggctggtgtttgagctgtggcagaagcacctggggctccagggagcaggctgggaactgcaggaccttgctcagccaggagcacttccccctccttgaggcaggaatactgaggtgcctccccacagatggagaaggtggagaggaggatgggcctcaggagcatctcaagccccagtagcaggagaaagaaagaaagagatgcctggttttcacagactggttcctgtggctgggatgactgcatccttttttttttttttttgagacggagtttttgcctttgtcgcccaggctggagtgcaatggcgtgatctcggctcaccgcaacctccgcctcccggattcaagcaattctcctgcctcagcctcccgagtagctgggattacaggcacgcacctccacgtccggctaattttgtatttttagtggagacggggtttctccatgtcggtcaggctggtctcgaactcccgacctcaggtgatctgcccacctcggcctcccaaagtgctgggattacaggcatgagccaccgcgcttggccagactgcgtcctttttaagcgaacattttagggcctgggagtttgtcaagtaaggaagtctcaagcccaaagagcagcgtcctgaccatggtggtttcattacgagcccttctgctggctctcaggcagaagccccacagcaccgggaccattcatgaggtcactgcccagctcatgatgtccgtgaggctgtccttttggccagtagccgtgtgcagctgtgtggcacagatggcttcgttcatcctgatcaaggccccacctcagccacagcagtccccccaacctgtgttgtccaccctattattcatgtacctgccaggccctgctagatagcaccccgtggcattacataacacttcatgagtggctgtgtcttgtaattttggggacaggtttctctctttccctctcttttttttgtcaaaagcccagagactgacaaccagctgcagtgtctaagtgttcctcactgacagggtggggcctcaccacccctggagggagcagcgttggcagggagacagcctggcccagtgaccctgggcccaagccagcccctccagggctttcagggaagcgccatccattttcaaagatgtcaaacgtcacttcttcctgtagggcccgagtcctgcctcctatcagggccagatcatagaaggctattttctattctggggaacgattataacttaaatgattgttttaataaaaattctaagctggaaaaaaaaaaaaaaaaaa

SEQ ID NO: 2154 - protein, 590 aa, Homo sapiens
MAGAIASRMSFSSLKRKQPKTFTVRIVTMDAEMEFNCEMKWKGKDLFDLVCRTLGLRETWFFGLQYTIKDTVAWLKMDKKVLDHDVSKEEPVTFHFLAKFYPENAEEELVQEITQHLFFLQVKKQILDEKIYCPPEASVLLASYAVQAKYGDYDPSVHKRGFLAQEELLPKRVINLYQMTPEMWEERITAWYAEHRGRARDEAEMEYLKIAQDLEMYGVNYFAIRNKKGTELLLGVDALGLHIYDPENRLTPKISFPWNEIRNISYSDKEFTIKPLDKKIDVFKFNSSKLRVNKLILQLCIGNHDLFMRRRKADSLEVQQMKAQAREEKARKQMERQRLAREKQMREEAERTRDELERRLLQMKEEATMANEALMRSEETADLLAEKAQITEEEAKLLAQKAAEAEQEMQRIKATAIRTEEEKRLMEQKVLEAEVLALKMAEESERRAKEADQLKQDLQEAREAERRAKQKLLEIATKPTYPPMNPIPAPLPPDIPSFNLIGDSLSFDFKDTDMKRLSMEIEKEKVEYMEKSKHLQEQLNELKTEIEALKLKERETALDILHNENSDRGGSSKHNTIKKPQAQGRRPICI

SEQ ID NO: 2155 - DNA, 3106 bp, Homo sapiens
ggagtgaggacggtgacagccacgcgcgcgcgtacgcgcccgatgcagcgcggccccgtgaccctagtcggccgctgagaggcgcgcggagtctgggccgctgccgtctaggggtcccgtcccgaggcgtccccggcatctccggcccgaatcccggagtgccgggtcgcgcctgcaccgaaggtcccggctcctgtgccctccctgcagccgtcagggcccgtcccccaactcccctttccgctcaggcagggtcctcgcggcccatgctggccgctggggacccgcgcagcccagaccgttcccgggccggccagccggccaccatggtggccctgaggcctgtgcagcaactccaggggggctaaagggctcagagtgcaggccgtggggcgcgagggtcccgggcctgagccccgcgccatggccggggccatcgcttcccgcatgagcttcagctctctcaagaggaagcaacccaagacgttcaccgtgaggatcgtcaccatggacgccgagatggagttcaattgcgagatgaagtggaaagggaaggacctctttgatttggtgtgccggactctggggctccgagaaacctggttctttggactgcagtacacaatcaaggacacagtggcctggctcaaaatggacaagaaggtactggatcatgatgtttcaaaggaagaaccagtcacctttcacttcttggccaaattttatcctgagaatgctgaagaggagctggttcaggagatcacacaacatttattcttcttacaggtaaagaagcagattttagatgaaaagatctactgccctcctgaggcttctgtgctcctggcttcttacgccgtccaggccaagtatggtgactacgaccccagtgttcacaagcggggatttttggcccaagaggaattgcttccaaaaagggtaataaatctgtatcagatgactccggaaatgtgggaggagagaattactgcttggtacgcagagcaccgaggccgagccagggatgaagctgaaatggaatatctgaagatagctcaggacctggagatgtacggtgtgaactactttgcaatccggaataaaaagggcacagagctgctgcttggagtggatgccctggggcttcacatttatgaccctgagaacagactgacccccaagatctccttcccgtggaatgaaatccgaaacatctcgtacagtgacaaggagtttactattaaaccactggataagaaaattgatgtcttcaagtttaactcctcaaagcttcgtgttaataagctgattctccagctatgtatcgggaaccatgatctatttatgaggagaaggaaagccgattctttggaagttcagcagatgaaagcccaggccagggaggagaaggctagaaagcagatggagcggcagcgcctcgctcgagagaagcagatgagggaggaggctgaacgcacgagggatgagttggagaggaggctgctgcagatgaaagaagaagcaacaatggccaacgaagcactgatgcggtctgaggagacagctgacctgttggctgaaaaggcccagatcaccgaggaggaggcaaaacttctggcccagaaggccgcagaggctgagcaggaaatgcagcgcatcaaggccacagcgattcgcacggaggaggagaagcgcctgatggagcagaaggtgctggaagccgaggtgctggcactgaagatggctgaggagtcagagaggagggccaaagaggcagatcagctgaagcaggacctgcaggaagcacgcgaggcggagcgaagagccaagcagaagctcctggagattgccaccaagcccacgtacccgcccatgaacccaattccagcaccgttgcctcctgacataccaagcttcaacctcattggtgacagcctgtctttcgacttcaaagatactgacatgaagcggctttccatggagatagagaaagaaaaagtggaatacatggaaaagagcaagcatctgcaggagcagctcaatgaactcaagacagaaatcgaggccttgaaactgaaagagagggagacagctctggatattctgcacaatgagaactccgacaggggtggcagcagcaagcacaataccattaaaaagcctcaagcccaaggcagaagacctatctgcatttgagccctcaaagtaggttgttcccaggtactctctatgtggtgatggtgctgccctctgtgatactaacccgtgcatgagcttgcctgtctctgtcctcgggccacactgagcccttacgagggcaggtggtgcctgggtactggccgcagcatgctttgagtctaaaagtaggcacccaccctgtgaagccagaccagcctccagggccccagaagactgcctcgttccgaagagcatgtcatggggctgtaggaccagccattcttcccatctcgggtcattgttgggctggggaaggttatggcttcttgtccagtcaggtgtgtctaaaagtcctttgtcttggtggcatactcctagcatggaaatggggtcaatctgggcactttggagactggtgtgtttaactcaagatcaagaccttttatgcgttgacagcctctcaagacccatggtcacacctggcagcttctggtagtggggcaaaagggttgcttgtgctggctcattttcctttagagctttccctttctgcacacatcccttttcttttcaaataaagcaaacccagagcacagggtctgatatgtgagtccacggggagtggactgtctgttcatctgtgctcagccacctctgcttcagcttcctctccataggctgagcagagatgtggtcagagtgaactcacattggaacagtacactcacggcaccctggagaggagcggtcactggttgctgagtgaattaaccgaatgtttgctgcttttctcctgcaacagttcattattcctccagcatgcctaggcagtggagagaatgtattttgcccaataataaaatgacatcctgcctctaaaaaaaaaaaaaaaaaaaaaaaaaaaaaaaaaaaaaaaaaaaaaaaaaaa

SEQ ID NO: 2156 - protein, 590 aa, Homo sapiens; identical to SEQ ID NO: 2154

SEQ ID NO: 2157 - DNA, 5940 bp, Homo sapiens
ggagtgaggacggtgacagccacgcgcgcgcgtacgcgcccgatgcagcgcggccccgtgaccctagtcggccgctgagaggcgcgcggagtctgggccgctgccgtctaggggtcccgtcccgaggcgtccccggcatctccggcccgaatcccggagtgccgggtcgcgcctgcaccgaaggtcccggctcctgtgccctccctgcagccgtcagggcccgtcccccaactcccctttccgctcaggcagggtcctcgcggcccatgctggccgctggggacccgcgcagcccagaccgttcccgggccggccagccggccaccatggtggccctgaggcctgtgcagcaactccaggggggctaaagggctcagagtgcaggccgtggggcgcgagggtcccgggcctgagccccgcgccatggccggggccatcgcttcccgcatgagcttcagctctctcaagaggaagcaacccaagacgttcaccgtgaggatcgtcaccatggacgccgagatggagttcaattgcgaggtactggatcatgatgtttcaaaggaagaaccagtcacctttcacttcttggccaaattttatcctgagaatgctgaagaggagctggttcaggagatcacacaacatttattcttcttacaggtaaagaagcagattttagatgaaaagatctactgccctcctgaggcttctgtgctcctggcttcttacgccgtccaggccaagtatggtgactacgaccccagtgttcacaagcggggatttttggcccaagaggaattgcttccaaaaagggtaataaatctgtatcagatgactccggaaatgtgggaggagagaattactgcttggtacgcagagcaccgaggccgagccagggatgaagctgaaatggaatatctgaagatagctcaggacctggagatgtacggtgtgaactactttgcaatccggaataaaaagggcacagagctgctgcttggagtggatgccctggggcttcacatttatgaccctgagaacagactgacccccaagatctccttcccgtggaatgaaatccgaaacatctcgtacagtgacaaggagtttactattaaaccactggataagaaaattgatgtcttcaagtttaactcctcaaagcttcgtgttaataagctgattctccagctatgtatcgggaaccatgatctatttatgaggagaaggaaagccgattctttggaagttcagcagatgaaagcccaggccagggaggagaaggctagaaagcagatggagcggcagcgcctcgctcgagagaagcagatgagggaggaggctgaacgcacgagggatgagttggagaggaggctgctgcagatgaaagaagaagcaacaatggccaacgaagcactgatgcggtctgaggagacagctgacctgttggctgaaaaggcccagatcaccgaggaggaggcaaaacttctggcccagaaggccgcagaggctgagcaggaaatgcagcgcatcaaggccacagcgattcgcacggaggaggagaagcgcctgatggagcagaaggtgctggaagccgaggtgctggcactgaagatggctgaggagtcagagaggagggccaaagaggcagatcagctgaagcaggacctgcaggaagcacgcgaggcggagcgaagagccaagcagaagctcctggagattgccaccaagcccacgtacccgcccatgaacccaattccagcaccgttgcctcctgacataccaagcttcaacctcattggtgacagcctgtctttcgacttcaaagatactgacatgaagcggctttccatggagatagagaaagaaaaagtggaatacatggaaaagagcaagcatctgcaggagcagctcaatgaactcaagacagaaatcgaggccttgaaactgaaagagagggagacagctctggatattctgcacaatgagaactccgacaggggtggcagcagcaagcacaataccattaaaaagcctcaagcccaaggcagaagacctatctgcatttgagccctcaaactcaccttgcagagcgccaagtcccgagtggccttctttgaagagctctagcaggtgacccagccaccccaggacctgccacttctcctgctaccgggaccgcgggatggaccagatatcaagagagccatccatagggagctggctgggggtttccgtgggagctccagaactttccccagctgagtgaagagcccagcccctcttatgtgcaattgccttgaactacgaccctgtagagatttctctcatggcgttctagttctctgacctgagtctttgttttaagaagtatttgtcttcctttgtctaatgtgggattcctgactcccttcgtccaaggcaccggtgtgtgtgtgtcttgcactccagagctgacctccaccgcccagcctgggaagtcattgtagggagtgagacactgaagccctgagaagccagtgccatcatccccaccccgcccagggttccggaacattcattcccccaccggtgaggacctggcatgcagcgaagcagcccagcccggcggatcccaggccagcacgcctgccggcttctcatcgtcagggagcccgcccagagctcgtgacgagcaagtgctgggtccccgccaggcaccccgaggcggcgctctggctggcagctggtggggaataggcagggcagctgtggctggggagagactttaggcagaagctgtgatgcaggctgactgccagccgaggggctgggtagtgccgtgcgggagctgatggtacagggcactcgctgtccccctccggccaccctagaccagggtccgagaggcaggcaggagccactcatgtcttccccattgcccgacgcccatagacgctccttcctgtgtggggctggggtactccctggtcgtactgcagtcagcacccgtaacccggctatgaccagggatctgtaagccctgtggctccacaggtgctgcttctcactggcccagactctgagctccaccggcccagtctgcacggcccatctgcttcaccttccctcccagccacgtgccagtggccacagcccacttcccaacccactgttgtacccaggcctcactttgctgttgcccttgtccctcttcgggccctgaattttctgttccctgggggccagccagggccctttgtgcccctcccagcacaggcctgatgcaggtgtccactcacaggtggcgctcacctaggctgtcacaggacccacctccatgccaggcaacagagggccacagaaccacccccacggctcactccttggtctggggccaccttcttgccctttctttttttttttttttttttttttccgagatggagtctctctctgtcacccaggtgggagtgtggtggcacaatctcggctcactgcaacctccacctcctgagttcaagcaattctcctgcctcagcctcccaagtagctgggactacaggcatgcaccaccacacttggccaatgttctgtatttttaatagggacggggttttgccatgttagctaggctggtctcaaactcacacctgggattacaggcatgagccactgcacccagccccttcttgccctttcttttctccatggctgatgctgctgtggccagccagggcccttgagatccttccagtttggctgttatgcaaagcaggtgatttgtcttaatcagataaaagatagaggctatgggggcctcaagatttttggagagcagaggtggtctctggcaattccatctggttttgagaaacttagcagctcacagagcacagagatcctgccttcttcctactatcaggctgacctaatggggttgggctgctcggcaactgcttgggtcaccttgccccaaggaaaccagccctgggtgccacccagccacttagggtctacagggtgggactccagacctagagcgtaagtatggatgttgtggccctgtgtcttcctagtgtgacccagccaggagcggaagcttcaggcgtttgtaaagtgaggtctggctctgcctcctccgttttttttttttttctgtttctgtttctgttttttttttgagatggagtctcgctctgtcgcccaggctggagtgcagtgtcacgatctcagctcactgcaacctccgcctcccaggtacaagagattctcctgcctcagcctcccgagtagctgggactacaggcgtgtgccaccatgcctggctaatttttgtatttttagtagagatggggtttcgccatgttagccagactggtctcgaactcctgacctcaggtgatcctcccaccccggcttcccaaagttctgggattataggcgtgagccaccatgcccggtctcttctcagtcttgaagcccatccctggatttccaccaggagttactttcctcctgacctgtaaatttgttctttaacaatggctgcaggtgggagcatatggtggtttataaaaacgctgtcgggctttgtttccttctttagctgccgtgtctacttctgaagtctgggaagtgccaagccacgcggcctcaagggagctggctggtgtttgagctgtggcagaagcacctggggctccagggagcaggctgggaactgcaggaccttgctcagccaggagcacttccccctccttgaggcaggaatactgaggtgcctccccacagatggagaaggtggagaggaggatgggcctcaggagcatctcaagccccagtagcaggagaaagaaagaaagagatgcctggttttcacagactggttcctgtggctgggatgactgcatccttttttttttttttttgagacggagtttttgcctttgtcgcccaggctggagtgcaatggcgtgatctcggctcaccgcaacctccgcctcccggattcaagcaattctcctgcctcagcctcccgagtagctgggattacaggcacgcacctccacgtccggctaattttgtatttttagtggagacggggtttctccatgtcggtcaggctggtctcgaactcccgacctcaggtgatctgcccacctcggcctcccaaagtgctgggattacaggcatgagccaccgcgcttggccagactgcgtcctttttaagcgaacattttagggcctgggagtttgtcaagtaaggaagtctcaagcccaaagagcagcgtcctgaccatggtggtttcattacgagcccttctgctggctctcaggcagaagccccacagcaccgggaccattcatgaggtcactgcccagctcatgatgtccgtgaggctgtccttttggccagtagccgtgtgcagctgtgtggcacagatggcttcgttcatcctgatcaaggccccacctcagccacagcagtccccccaacctgtgttgtccaccctattattcatgtacctgccaggccctgctagatagcaccccgtggcattacataacacttcatgagtggctgtgtcttgtaattttggggacaggtttctctctttccctctcttttttttgtcaaaagcccagagactgacaaccagctgcagtgtctaagtgttcctcactgacagggtggggcctcaccacccctggagggagcagcgttggcagggagacagcctggcccagtgaccctgggcccaagccagcccctccagggctttcagggaagcgccatccattttcaaagatgtcaaacgtcacttcttcctgtagggcccgagtcctgcctcctatcagggccagatcatagaaggctattttctattctggggaacgattataacttaaatgattgttttaataaaaattctaagctggaaaaaaaaaaaaaaaaaa

SEQ ID NO: 2158 - protein, 548 aa, Homo sapiens
MAGAIASRMSFSSLKRKQPKTFTVRIVTMDAEMEFNCEVLDHDVSKEEPVTFHFLAKFYPENAEEELVQEITQHLFFLQVKKQILDEKIYCPPEASVLLASYAVQAKYGDYDPSVHKRGFLAQEELLPKRVINLYQMTPEMWEERITAWYAEHRGRARDEAEMEYLKIAQDLEMYGVNYFAIRNKKGTELLLGVDALGLHIYDPENRLTPKISFPWNEIRNISYSDKEFTIKPLDKKIDVFKFNSSKLRVNKLILQLCIGNHDLFMRRRKADSLEVQQMKAQAREEKARKQMERQRLAREKQMREEAERTRDELERRLLQMKEEATMANEALMRSEETADLLAEKAQITEEEAKLLAQKAAEAEQEMQRIKATAIRTEEEKRLMEQKVLEAEVLALKMAEESERRAKEADQLKQDLQEAREAERRAKQKLLEIATKPTYPPMNPIPAPLPPDIPSFNLIGDSLSFDFKDTDMKRLSMEIEKEKVEYMEKSKHLQEQLNELKTEIEALKLKERETALDILHNENSDRGGSSKHNTIKKPQAQGRRPICI

SEQ ID NO: 2159 - DNA, 5943 bp, Homo sapiens
ggagtgaggacggtgacagccacgcgcgcgcgtacgcgcccgatgcagcgcggccccgtgaccctagtcggccgctgagaggcgcgcggagtctgggccgctgccgtctaggggtcccgtcccgaggcgtccccggcatctccggcccgaatcccggagtgccgggtcgcgcctgcaccgaaggtcccggctcctgtgccctccctgcagccgtcagggcccgtcccccaactcccctttccgctcaggcagggtcctcgcggcccatgctggccgctggggacccgcgcagcccagaccgttcccgggccggccagccggccaccatggtggccctgaggcctgtgcagcaactccaggggggctaaagggctcagagtgcaggccgtggggcgcgagggtcccgggcctgagccccgcgccatggccggggccatcgcttcccgcatgagcttcagctctctcaagaggaagcaacccaagacgttcaccgtgaggatcgtcaccatggacgccgagatggagttcaattgcgagatgaagtggaaagggaaggacctctttgatttggtgtgccggactctggggctccgagaaacctggttctttggactgcagtacacaatcaaggacacagtggcctggctcaaaatggacaagaaggtaaagaagcagattttagatgaaaagatctactgccctcctgaggcttctgtgctcctggcttcttacgccgtccaggccaagtatggtgactacgaccccagtgttcacaagcggggatttttggcccaagaggaattgcttccaaaaagggtaataaatctgtatcagatgactccggaaatgtgggaggagagaattactgcttggtacgcagagcaccgaggccgagccagggatgaagctgaaatggaatatctgaagatagctcaggacctggagatgtacggtgtgaactactttgcaatccggaataaaaagggcacagagctgctgcttggagtggatgccctggggcttcacatttatgaccctgagaacagactgacccccaagatctccttcccgtggaatgaaatccgaaacatctcgtacagtgacaaggagtttactattaaaccactggataagaaaattgatgtcttcaagtttaactcctcaaagcttcgtgttaataagctgattctccagctatgtatcgggaaccatgatctatttatgaggagaaggaaagccgattctttggaagttcagcagatgaaagcccaggccagggaggagaaggctagaaagcagatggagcggcagcgcctcgctcgagagaagcagatgagggaggaggctgaacgcacgagggatgagttggagaggaggctgctgcagatgaaagaagaagcaacaatggccaacgaagcactgatgcggtctgaggagacagctgacctgttggctgaaaaggcccagatcaccgaggaggaggcaaaacttctggcccagaaggccgcagaggctgagcaggaaatgcagcgcatcaaggccacagcgattcgcacggaggaggagaagcgcctgatggagcagaaggtgctggaagccgaggtgctggcactgaagatggctgaggagtcagagaggagggccaaagaggcagatcagctgaagcaggacctgcaggaagcacgcgaggcggagcgaagagccaagcagaagctcctggagattgccaccaagcccacgtacccgcccatgaacccaattccagcaccgttgcctcctgacataccaagcttcaacctcattggtgacagcctgtctttcgacttcaaagatactgacatgaagcggctttccatggagatagagaaagaaaaagtggaatacatggaaaagagcaagcatctgcaggagcagctcaatgaactcaagacagaaatcgaggccttgaaactgaaagagagggagacagctctggatattctgcacaatgagaactccgacaggggtggcagcagcaagcacaataccattaaaaagcctcaagcccaaggcagaagacctatctgcatttgagccctcaaactcaccttgcagagcgccaagtcccgagtggccttctttgaagagctctagcaggtgacccagccaccccaggacctgccacttctcctgctaccgggaccgcgggatggaccagatatcaagagagccatccatagggagctggctgggggtttccgtgggagctccagaactttccccagctgagtgaagagcccagcccctcttatgtgcaattgccttgaactacgaccctgtagagatttctctcatggcgttctagttctctgacctgagtctttgttttaagaagtatttgtcttcctttgtctaatgtgggattcctgactcccttcgtccaaggcaccggtgtgtgtgtgtcttgcactccagagctgacctccaccgcccagcctgggaagtcattgtagggagtgagacactgaagccctgagaagccagtgccatcatccccaccccgcccagggttccggaacattcattcccccaccggtgaggacctggcatgcagcgaagcagcccagcccggcggatcccaggccagcacgcctgccggcttctcatcgtcagggagcccgcccagagctcgtgacgagcaagtgctgggtccccgccaggcaccccgaggcggcgctctggctggcagctggtggggaataggcagggcagctgtggctggggagagactttaggcagaagctgtgatgcaggctgactgccagccgaggggctgggtagtgccgtgcgggagctgatggtacagggcactcgctgtccccctccggccaccctagaccagggtccgagaggcaggcaggagccactcatgtcttccccattgcccgacgcccatagacgctccttcctgtgtggggctggggtactccctggtcgtactgcagtcagcacccgtaacccggctatgaccagggatctgtaagccctgtggctccacaggtgctgcttctcactggcccagactctgagctccaccggcccagtctgcacggcccatctgcttcaccttccctcccagccacgtgccagtggccacagcccacttcccaacccactgttgtacccaggcctcactttgctgttgcccttgtccctcttcgggccctgaattttctgttccctgggggccagccagggccctttgtgcccctcccagcacaggcctgatgcaggtgtccactcacaggtggcgctcacctaggctgtcacaggacccacctccatgccaggcaacagagggccacagaaccacccccacggctcactccttggtctggggccaccttcttgccctttctttttttttttttttttttttttccgagatggagtctctctctgtcacccaggtgggagtgtggtggcacaatctcggctcactgcaacctccacctcctgagttcaagcaattctcctgcctcagcctcccaagtagctgggactacaggcatgcaccaccacacttggccaatgttctgtatttttaatagggacggggttttgccatgttagctaggctggtctcaaactcacacctgggattacaggcatgagccactgcacccagccccttcttgccctttcttttctccatggctgatgctgctgtggccagccagggcccttgagatccttccagtttggctgttatgcaaagcaggtgatttgtcttaatcagataaaagatagaggctatgggggcctcaagatttttggagagcagaggtggtctctggcaattccatctggttttgagaaacttagcagctcacagagcacagagatcctgccttcttcctactatcaggctgacctaatggggttgggctgctcggcaactgcttgggtcaccttgccccaaggaaaccagccctgggtgccacccagccacttagggtctacagggtgggactccagacctagagcgtaagtatggatgttgtggccctgtgtcttcctagtgtgacccagccaggagcggaagcttcaggcgtttgtaaagtgaggtctggctctgcctcctccgttttttttttttttctgtttctgtttctgttttttttttgagatggagtctcgctctgtcgcccaggctggagtgcagtgtcacgatctcagctcactgcaacctccgcctcccaggtacaagagattctcctgcctcagcctcccgagtagctgggactacaggcgtgtgccaccatgcctggctaatttttgtatttttagtagagatggggtttcgccatgttagccagactggtctcgaactcctgacctcaggtgatcctcccaccccggcttcccaaagttctgggattataggcgtgagccaccatgcccggtctcttctcagtcttgaagcccatccctggatttccaccaggagttactttcctcctgacctgtaaatttgttctttaacaatggctgcaggtgggagcatatggtggtttataaaaacgctgtcgggctttgtttccttctttagctgccgtgtctacttctgaagtctgggaagtgccaagccacgcggcctcaagggagctggctggtgtttgagctgtggcagaagcacctggggctccagggagcaggctgggaactgcaggaccttgctcagccaggagcacttccccctccttgaggcaggaatactgaggtgcctccccacagatggagaaggtggagaggaggatgggcctcaggagcatctcaagccccagtagcaggagaaagaaagaaagagatgcctggttttcacagactggttcctgtggctgggatgactgcatccttttttttttttttttgagacggagtttttgcctttgtcgcccaggctggagtgcaatggcgtgatctcggctcaccgcaacctccgcctcccggattcaagcaattctcctgcctcagcctcccgagtagctgggattacaggcacgcacctccacgtccggctaattttgtatttttagtggagacggggtttctccatgtcggtcaggctggtctcgaactcccgacctcaggtgatctgcccacctcggcctcccaaagtgctgggattacaggcatgagccaccgcgcttggccagactgcgtcctttttaagcgaacattttagggcctgggagtttgtcaagtaaggaagtctcaagcccaaagagcagcgtcctgaccatggtggtttcattacgagcccttctgctggctctcaggcagaagccccacagcaccgggaccattcatgaggtcactgcccagctcatgatgtccgtgaggctgtccttttggccagtagccgtgtgcagctgtgtggcacagatggcttcgttcatcctgatcaaggccccacctcagccacagcagtccccccaacctgtgttgtccaccctattattcatgtacctgccaggccctgctagatagcaccccgtggcattacataacacttcatgagtggctgtgtcttgtaattttggggacaggtttctctctttccctctcttttttttgtcaaaagcccagagactgacaaccagctgcagtgtctaagtgttcctcactgacagggtggggcctcaccacccctggagggagcagcgttggcagggagacagcctggcccagtgaccctgggcccaagccagcccctccagggctttcagggaagcgccatccattttcaaagatgtcaaacgtcacttcttcctgtagggcccgagtcctgcctcctatcagggccagatcatagaaggctattttctattctggggaacgattataacttaaatgattgttttaataaaaattctaagctggaaaaaaaaaaaaaaaaaa

SEQ ID NO: 2160 - protein, 549 aa, Homo sapiens
MAGAIASRMSFSSLKRKQPKTFTVRIVTMDAEMEFNCEMKWKGKDLFDLVCRTLGLRETWFFGLQYTIKDTVAWLKMDKKVKKQILDEKIYCPPEASVLLASYAVQAKYGDYDPSVHKRGFLAQEELLPKRVINLYQMTPEMWEERITAWYAEHRGRARDEAEMEYLKIAQDLEMYGVNYFAIRNKKGTELLLGVDALGLHIYDPENRLTPKISFPWNEIRNISYSDKEFTIKPLDKKIDVFKFNSSKLRVNKLILQLCIGNHDLFMRRRKADSLEVQQMKAQAREEKARKQMERQRLAREKQMREEAERTRDELERRLLQMKEEATMANEALMRSEETADLLAEKAQITEEEAKLLAQKAAEAEQEMQRIKATAIRTEEEKRLMEQKVLEAEVLALKMAEESERRAKEADQLKQDLQEAREAERRAKQKLLEIATKPTYPPMNPIPAPLPPDIPSFNLIGDSLSFDFKDTDMKRLSMEIEKEKVEYMEKSKHLQEQLNELKTEIEALKLKERETALDILHNENSDRGGSSKHNTIKKPQAQGRRPICI

SEQ ID NO: 2161 - DNA, 5817 bp, Homo sapiens
ggagtgaggacggtgacagccacgcgcgcgcgtacgcgcccgatgcagcgcggccccgtgaccctagtcggccgctgagaggcgcgcggagtctgggccgctgccgtctaggggtcccgtcccgaggcgtccccggcatctccggcccgaatcccggagtgccgggtcgcgcctgcaccgaaggtcccggctcctgtgccctccctgcagccgtcagggcccgtcccccaactcccctttccgctcaggcagggtcctcgcggcccatgctggccgctggggacccgcgcagcccagaccgttcccgggccggccagccggccaccatggtggccctgaggcctgtgcagcaactccaggggggctaaagggctcagagtgcaggccgtggggcgcgagggtcccgggcctgagccccgcgccatggccggggccatcgcttcccgcatgagcttcagctctctcaagaggaagcaacccaagacgttcaccgtgaggatcgtcaccatggacgccgagatggagttcaattgcgaggtaaagaagcagattttagatgaaaagatctactgccctcctgaggcttctgtgctcctggcttcttacgccgtccaggccaagtatggtgactacgaccccagtgttcacaagcggggatttttggcccaagaggaattgcttccaaaaagggtaataaatctgtatcagatgactccggaaatgtgggaggagagaattactgcttggtacgcagagcaccgaggccgagccagggatgaagctgaaatggaatatctgaagatagctcaggacctggagatgtacggtgtgaactactttgcaatccggaataaaaagggcacagagctgctgcttggagtggatgccctggggcttcacatttatgaccctgagaacagactgacccccaagatctccttcccgtggaatgaaatccgaaacatctcgtacagtgacaaggagtttactattaaaccactggataagaaaattgatgtcttcaagtttaactcctcaaagcttcgtgttaataagctgattctccagctatgtatcgggaaccatgatctatttatgaggagaaggaaagccgattctttggaagttcagcagatgaaagcccaggccagggaggagaaggctagaaagcagatggagcggcagcgcctcgctcgagagaagcagatgagggaggaggctgaacgcacgagggatgagttggagaggaggctgctgcagatgaaagaagaagcaacaatggccaacgaagcactgatgcggtctgaggagacagctgacctgttggctgaaaaggcccagatcaccgaggaggaggcaaaacttctggcccagaaggccgcagaggctgagcaggaaatgcagcgcatcaaggccacagcgattcgcacggaggaggagaagcgcctgatggagcagaaggtgctggaagccgaggtgctggcactgaagatggctgaggagtcagagaggagggccaaagaggcagatcagctgaagcaggacctgcaggaagcacgcgaggcggagcgaagagccaagcagaagctcctggagattgccaccaagcccacgtacccgcccatgaacccaattccagcaccgttgcctcctgacataccaagcttcaacctcattggtgacagcctgtctttcgacttcaaagatactgacatgaagcggctttccatggagatagagaaagaaaaagtggaatacatggaaaagagcaagcatctgcaggagcagctcaatgaactcaagacagaaatcgaggccttgaaactgaaagagagggagacagctctggatattctgcacaatgagaactccgacaggggtggcagcagcaagcacaataccattaaaaagcctcaagcccaaggcagaagacctatctgcatttgagccctcaaactcaccttgcagagcgccaagtcccgagtggccttctttgaagagctctagcaggtgacccagccaccccaggacctgccacttctcctgctaccgggaccgcgggatggaccagatatcaagagagccatccatagggagctggctgggggtttccgtgggagctccagaactttccccagctgagtgaagagcccagcccctcttatgtgcaattgccttgaactacgaccctgtagagatttctctcatggcgttctagttctctgacctgagtctttgttttaagaagtatttgtcttcctttgtctaatgtgggattcctgactcccttcgtccaaggcaccggtgtgtgtgtgtcttgcactccagagctgacctccaccgcccagcctgggaagtcattgtagggagtgagacactgaagccctgagaagccagtgccatcatccccaccccgcccagggttccggaacattcattcccccaccggtgaggacctggcatgcagcgaagcagcccagcccggcggatcccaggccagcacgcctgccggcttctcatcgtcagggagcccgcccagagctcgtgacgagcaagtgctgggtccccgccaggcaccccgaggcggcgctctggctggcagctggtggggaataggcagggcagctgtggctggggagagactttaggcagaagctgtgatgcaggctgactgccagccgaggggctgggtagtgccgtgcgggagctgatggtacagggcactcgctgtccccctccggccaccctagaccagggtccgagaggcaggcaggagccactcatgtcttccccattgcccgacgcccatagacgctccttcctgtgtggggctggggtactccctggtcgtactgcagtcagcacccgtaacccggctatgaccagggatctgtaagccctgtggctccacaggtgctgcttctcactggcccagactctgagctccaccggcccagtctgcacggcccatctgcttcaccttccctcccagccacgtgccagtggccacagcccacttcccaacccactgttgtacccaggcctcactttgctgttgcccttgtccctcttcgggccctgaattttctgttccctgggggccagccagggccctttgtgcccctcccagcacaggcctgatgcaggtgtccactcacaggtggcgctcacctaggctgtcacaggacccacctccatgccaggcaacagagggccacagaaccacccccacggctcactccttggtctggggccaccttcttgccctttctttttttttttttttttttttttccgagatggagtctctctctgtcacccaggtgggagtgtggtggcacaatctcggctcactgcaacctccacctcctgagttcaagcaattctcctgcctcagcctcccaagtagctgggactacaggcatgcaccaccacacttggccaatgttctgtatttttaatagggacggggttttgccatgttagctaggctggtctcaaactcacacctgggattacaggcatgagccactgcacccagccccttcttgccctttcttttctccatggctgatgctgctgtggccagccagggcccttgagatccttccagtttggctgttatgcaaagcaggtgatttgtcttaatcagataaaagatagaggctatgggggcctcaagatttttggagagcagaggtggtctctggcaattccatctggttttgagaaacttagcagctcacagagcacagagatcctgccttcttcctactatcaggctgacctaatggggttgggctgctcggcaactgcttgggtcaccttgccccaaggaaaccagccctgggtgccacccagccacttagggtctacagggtgggactccagacctagagcgtaagtatggatgttgtggccctgtgtcttcctagtgtgacccagccaggagcggaagcttcaggcgtttgtaaagtgaggtctggctctgcctcctccgttttttttttttttctgtttctgtttctgttttttttttgagatggagtctcgctctgtcgcccaggctggagtgcagtgtcacgatctcagctcactgcaacctccgcctcccaggtacaagagattctcctgcctcagcctcccgagtagctgggactacaggcgtgtgccaccatgcctggctaatttttgtatttttagtagagatggggtttcgccatgttagccagactggtctcgaactcctgacctcaggtgatcctcccaccccggcttcccaaagttctgggattataggcgtgagccaccatgcccggtctcttctcagtcttgaagcccatccctggatttccaccaggagttactttcctcctgacctgtaaatttgttctttaacaatggctgcaggtgggagcatatggtggtttataaaaacgctgtcgggctttgtttccttctttagctgccgtgtctacttctgaagtctgggaagtgccaagccacgcggcctcaagggagctggctggtgtttgagctgtggcagaagcacctggggctccagggagcaggctgggaactgcaggaccttgctcagccaggagcacttccccctccttgaggcaggaatactgaggtgcctccccacagatggagaaggtggagaggaggatgggcctcaggagcatctcaagccccagtagcaggagaaagaaagaaagagatgcctggttttcacagactggttcctgtggctgggatgactgcatccttttttttttttttttgagacggagtttttgcctttgtcgcccaggctggagtgcaatggcgtgatctcggctcaccgcaacctccgcctcccggattcaagcaattctcctgcctcagcctcccgagtagctgggattacaggcacgcacctccacgtccggctaattttgtatttttagtggagacggggtttctccatgtcggtcaggctggtctcgaactcccgacctcaggtgatctgcccacctcggcctcccaaagtgctgggattacaggcatgagccaccgcgcttggccagactgcgtcctttttaagcgaacattttagggcctgggagtttgtcaagtaaggaagtctcaagcccaaagagcagcgtcctgaccatggtggtttcattacgagcccttctgctggctctcaggcagaagccccacagcaccgggaccattcatgaggtcactgcccagctcatgatgtccgtgaggctgtccttttggccagtagccgtgtgcagctgtgtggcacagatggcttcgttcatcctgatcaaggccccacctcagccacagcagtccccccaacctgtgttgtccaccctattattcatgtacctgccaggccctgctagatagcaccccgtggcattacataacacttcatgagtggctgtgtcttgtaattttggggacaggtttctctctttccctctcttttttttgtcaaaagcccagagactgacaaccagctgcagtgtctaagtgttcctcactgacagggtggggcctcaccacccctggagggagcagcgttggcagggagacagcctggcccagtgaccctgggcccaagccagcccctccagggctttcagggaagcgccatccattttcaaagatgtcaaacgtcacttcttcctgtagggcccgagtcctgcctcctatcagggccagatcatagaaggctattttctattctggggaacgattataacttaaatgattgttttaataaaaattctaagctggaaaaaaaaaaaaaaaaaa

SEQ ID NO: 2162 - protein, 507 aa, Homo sapiens
MAGAIASRMSFSSLKRKQPKTFTVRIVTMDAEMEFNCEVKKQILDEKIYCPPEASVLLASYAVQAKYGDYDPSVHKRGFLAQEELLPKRVINLYQMTPEMWEERITAWYAEHRGRARDEAEMEYLKIAQDLEMYGVNYFAIRNKKGTELLLGVDALGLHIYDPENRLTPKISFPWNEIRNISYSDKEFTIKPLDKKIDVFKFNSSKLRVNKLILQLCIGNHDLFMRRRKADSLEVQQMKAQAREEKARKQMERQRLAREKQMREEAERTRDELERRLLQMKEEATMANEALMRSEETADLLAEKAQITEEEAKLLAQKAAEAEQEMQRIKATAIRTEEEKRLMEQKVLEAEVLALKMAEESERRAKEADQLKQDLQEAREAERRAKQKLLEIATKPTYPPMNPIPAPLPPDIPSFNLIGDSLSFDFKDTDMKRLSMEIEKEKVEYMEKSKHLQEQLNELKTEIEALKLKERETALDILHNENSDRGGSSKHNTIKKPQAQGRRPICI

SEQ ID NO: 2163 - DNA, 2197 bp, Homo sapiens
ggagtgaggacggtgacagccacgcgcgcgcgtacgcgcccgatgcagcgcggccccgtgaccctagtcggccgctgagaggcgcgcggagtctgggccgctgccgtctaggggtcccgtcccgaggcgtccccggcatctccggcccgaatcccggagtgccgggtcgcgcctgcaccgaaggtcccggctcctgtgccctccctgcagccgtcagggcccgtcccccaactcccctttccgctcaggcagggtcctcgcggcccatgctggccgctggggacccgcgcagcccagaccgttcccgggccggccagccggccaccatggtggccctgaggcctgtgcagcaactccaggggggctaaagggctcagagtgcaggccgtggggcgcgagggtcccgggcctgagccccgcgccatggccggggccatcgcttcccgcatgagcttcagctctctcaagaggaagcaacccaagacgttcaccgtgaggatcgtcaccatggacgccgagatggagttcaattgcgaggtaaagaagcagattttagatgaaaagatctactgccctcctgaggcttctgtgctcctggcttcttacgccgtccaggccaagtatggtgactacgaccccagtgttcacaagcggggatttttggcccaagaggaattgcttccaaaaagggtaataaatctgtatcagatgactccggaaatgtgggaggagagaattactgcttggtacgcagagcaccgaggccgagccagggatgaagctgaaatggaatatctgaagatagctcaggacctggagatgtacggtgtgaactactttgcaatccggaataaaaagggcacagagctgctgcttggagtggatgccctggggcttcacatttatgaccctgagaacagactgacccccaagatctccttcccgtggaatgaaatccgaaacatctcgtacagtgacaaggagtttactattaaaccactggataagaaaattgatgtcttcaagtttaactcctcaaagcttcgtgttaataagctgattctccagctatgtatcgggaaccatgatctatttatgaggagaaggaaagccgattctttggaagttcagcagatgaaagcccaggccagggaggagaaggctagaaagcagatggagcggcagcgcctcgctcgagagaagcagatgagggaggaggctgaacgcacgagggatgagttggagaggaggctgctgcagatgaaagaagaagcaacaatggccaacgaagcactgatgcggtctgaggagacagctgacctgttggctgaaaaggcccagatcaccgaggaggaggcaaaacttctggcccagaaggccgcagaggctgagcaggaaatgcagcgcatcaaggccacagcgattcgcacggaggaggagaagcgcctgatggagcagaaggtgctggaagccgaggtgctggcactgaagatggctgaggagtcagagaggagggccaaagaggcagatcagctgaagcaggacctgcaggaagcacgcgaggcggagcgaagagccaagcagaagctcctggagattgccaccaagcccacgtacccgcccatgaacccaattccagcaccgttgcctcctgacataccaagcttcaacctcattggtgacagcctgtctttcgacttcaaagatactgacatgaagcggctttccatggagatagagaaagaaaaagtggaatacatggaaaagagcaagcatctgcaggagcagctcaatgaactcaagacagaaatcgaggccttgaaactgaaagagagggagacagctctggatattctgcacaatgagaactccgacaggggtggcagcagcaagcacaataccattaaaaagcctcaagcccaaggcagaagacctatctgcatttgagccctcaaacttcctctccataggctgagcagagatgtggtcagagtgaactcacattggaacagtacactcacggcaccctggagaggagcggtcactggttgctgagtgaattaaccgaatgtttgctgcttttctcctgcaacagttcattattcctccagcatgcctaggcagtggagagaatgtattttgcccaataataaaatgacatcctgcctctaaaaaaaaaaaaaaaaaaaaaaaaaaa

SEQ ID NO: 2164 - protein, 507 aa, Homo sapiens; identical to SEQ ID NO: 2162

SEQ ID NO: 2165 - DNA, 6081 bp, Homo sapiens
ggagtgaggacggtgacagccacgcgcgcgcgtacgcgcccgatgcagcgcggccccgtgaccctagtcggccgctgagaggcgcgcggagtctgggccgctgccgtctaggggtcccgtcccgaggcgtccccggcatctccggcccgaatcccggagtgccgggtcgcgcctgcaccgaaggtcccggctcctgtgccctccctgcagccgtcagggcccgtcccccaactcccctttccgctcaggcagggtcctcgcggcccatgctggccgctggggacccgcgcagcccagaccgttcccgggccggccagccggccaccatggtggccctgaggcctgtgcagcaactccaggggggctaaagggctcagagtgcaggccgtggggcgcgagggtcccgggcctgagccccgcgccatggccggggccatcgcttcccgcatgagcttcagctctctcaagaggaagcaacccaagacgttcaccgtgaggatcgtcaccatggacgccgagatggagttcaattgcgagatgaagtggaaagggaaggacctctttgatttggtgtgccggactctggggctccgagaaacctggttctttggactgcagtacacaatcaaggacacagtggcctggctcaaaatggacaagaaggtactggatcatgatgtttcaaaggaagaaccagtcacctttcacttcttggccaaattttatcctgagaatgctgaagaggagctggttcaggagatcacacaacatttattcttcttacaggtaaagaagcagattttagatgaaaagatctactgccctcctgaggcttctgtgctcctggcttcttacgccgtccaggccaagtatggtgactacgaccccagtgttcacaagcggggatttttggcccaagaggaattgcttccaaaaagggtaataaatctgtatcagatgactccggaaatgtgggaggagagaattactgcttggtacgcagagcaccgaggccgagccagggatgaagctgaaatggaatatctgaagatagctcaggacctggagatgtacggtgtgaactactttgcaatccggaataaaaagggcacagagctgctgcttggagtggatgccctggggcttcacatttatgaccctgagaacagactgacccccaagatctccttcccgtggaatgaaatccgaaacatctcgtacagtgacaaggagtttactattaaaccactggataagaaaattgatgtcttcaagtttaactcctcaaagcttcgtgttaataagctgattctccagctatgtatcgggaaccatgatctatttatgaggagaaggaaagccgattctttggaagttcagcagatgaaagcccaggccagggaggagaaggctagaaagcagatggagcggcagcgcctcgctcgagagaagcagatgagggaggaggctgaacgcacgagggatgagttggagaggaggctgctgcagatgaaagaagaagcaacaatggccaacgaagcactgatgcggtctgaggagacagctgacctgttggctgaaaaggcccagatcaccgaggaggaggcaaaacttctggcccagaaggccgcagaggctgagcaggaaatgcagcgcatcaaggccacagcgattcgcacggaggaggagaagcgcctgatggagcagaaggtgctggaagccgaggtgctggcactgaagatggctgaggagtcagagaggagggccaaagaggcagatcagctgaagcaggacctgcaggaagcacgcgaggcggagcgaagagccaagcagaagctcctggagattgccaccaagcccacgtacccgcccatgaacccaattccagcaccgttgcctcctgacataccaagcttcaacctcattggtgacagcctgtctttcgacttcaaagatactgacatgaagcggctttccatggagatagagaaagaaaaagtggaatacatggaaaagagcaagcatctgcaggagcagctcaatgaactcaagacagaaatcgaggccttgaaactgaaagagagggagacagctctggatattctgcacaatgagaactccgacaggggtggcagcagcaagcacaataccattaaaaagcctcaagcccaaggcagaagacctatctgcatttgagccctcaaagtaggttgttcccagctcaccttgcagagcgccaagtcccgagtggccttctttgaagagctctagcaggtgacccagccaccccaggacctgccacttctcctgctaccgggaccgcgggatggaccagatatcaagagagccatccatagggagctggctgggggtttccgtgggagctccagaactttccccagctgagtgaagagcccagcccctcttatgtgcaattgccttgaactacgaccctgtagagatttctctcatggcgttctagttctctgacctgagtctttgttttaagaagtatttgtcttcctttgtctaatgtgggattcctgactcccttcgtccaaggcaccggtgtgtgtgtgtcttgcactccagagctgacctccaccgcccagcctgggaagtcattgtagggagtgagacactgaagccctgagaagccagtgccatcatccccaccccgcccagggttccggaacattcattcccccaccggtgaggacctggcatgcagcgaagcagcccagcccggcggatcccaggccagcacgcctgccggcttctcatcgtcagggagcccgcccagagctcgtgacgagcaagtgctgggtccccgccaggcaccccgaggcggcgctctggctggcagctggtggggaataggcagggcagctgtggctggggagagactttaggcagaagctgtgatgcaggctgactgccagccgaggggctgggtagtgccgtgcgggagctgatggtacagggcactcgctgtccccctccggccaccctagaccagggtccgagaggcaggcaggagccactcatgtcttccccattgcccgacgcccatagacgctccttcctgtgtggggctggggtactccctggtcgtactgcagtcagcacccgtaacccggctatgaccagggatctgtaagccctgtggctccacaggtgctgcttctcactggcccagactctgagctccaccggcccagtctgcacggcccatctgcttcaccttccctcccagccacgtgccagtggccacagcccacttcccaacccactgttgtacccaggcctcactttgctgttgcccttgtccctcttcgggccctgaattttctgttccctgggggccagccagggccctttgtgcccctcccagcacaggcctgatgcaggtgtccactcacaggtggcgctcacctaggctgtcacaggacccacctccatgccaggcaacagagggccacagaaccacccccacggctcactccttggtctggggccaccttcttgccctttctttttttttttttttttttttttccgagatggagtctctctctgtcacccaggtgggagtgtggtggcacaatctcggctcactgcaacctccacctcctgagttcaagcaattctcctgcctcagcctcccaagtagctgggactacaggcatgcaccaccacacttggccaatgttctgtatttttaatagggacggggttttgccatgttagctaggctggtctcaaactcacacctgggattacaggcatgagccactgcacccagccccttcttgccctttcttttctccatggctgatgctgctgtggccagccagggcccttgagatccttccagtttggctgttatgcaaagcaggtgatttgtcttaatcagataaaagatagaggctatgggggcctcaagatttttggagagcagaggtggtctctggcaattccatctggttttgagaaacttagcagctcacagagcacagagatcctgccttcttcctactatcaggctgacctaatggggttgggctgctcggcaactgcttgggtcaccttgccccaaggaaaccagccctgggtgccacccagccacttagggtctacagggtgggactccagacctagagcgtaagtatggatgttgtggccctgtgtcttcctagtgtgacccagccaggagcggaagcttcaggcgtttgtaaagtgaggtctggctctgcctcctccgttttttttttttttctgtttctgtttctgttttttttttgagatggagtctcgctctgtcgcccaggctggagtgcagtgtcacgatctcagctcactgcaacctccgcctcccaggtacaagagattctcctgcctcagcctcccgagtagctgggactacaggcgtgtgccaccatgcctggctaatttttgtatttttagtagagatggggtttcgccatgttagccagactggtctcgaactcctgacctcaggtgatcctcccaccccggcttcccaaagttctgggattataggcgtgagccaccatgcccggtctcttctcagtcttgaagcccatccctggatttccaccaggagttactttcctcctgacctgtaaatttgttctttaacaatggctgcaggtgggagcatatggtggtttataaaaacgctgtcgggctttgtttccttctttagctgccgtgtctacttctgaagtctgggaagtgccaagccacgcggcctcaagggagctggctggtgtttgagctgtggcagaagcacctggggctccagggagcaggctgggaactgcaggaccttgctcagccaggagcacttccccctccttgaggcaggaatactgaggtgcctccccacagatggagaaggtggagaggaggatgggcctcaggagcatctcaagccccagtagcaggagaaagaaagaaagagatgcctggttttcacagactggttcctgtggctgggatgactgcatccttttttttttttttttgagacggagtttttgcctttgtcgcccaggctggagtgcaatggcgtgatctcggctcaccgcaacctccgcctcccggattcaagcaattctcctgcctcagcctcccgagtagctgggattacaggcacgcacctccacgtccggctaattttgtatttttagtggagacggggtttctccatgtcggtcaggctggtctcgaactcccgacctcaggtgatctgcccacctcggcctcccaaagtgctgggattacaggcatgagccaccgcgcttggccagactgcgtcctttttaagcgaacattttagggcctgggagtttgtcaagtaaggaagtctcaagcccaaagagcagcgtcctgaccatggtggtttcattacgagcccttctgctggctctcaggcagaagccccacagcaccgggaccattcatgaggtcactgcccagctcatgatgtccgtgaggctgtccttttggccagtagccgtgtgcagctgtgtggcacagatggcttcgttcatcctgatcaaggccccacctcagccacagcagtccccccaacctgtgttgtccaccctattattcatgtacctgccaggccctgctagatagcaccccgtggcattacataacacttcatgagtggctgtgtcttgtaattttggggacaggtttctctctttccctctcttttttttgtcaaaagcccagagactgacaaccagctgcagtgtctaagtgttcctcactgacagggtggggcctcaccacccctggagggagcagcgttggcagggagacagcctggcccagtgaccctgggcccaagccagcccctccagggctttcagggaagcgccatccattttcaaagatgtcaaacgtcacttcttcctgtagggcccgagtcctgcctcctatcagggccagatcatagaaggctattttctattctggggaacgattataacttaaatgattgttttaataaaaattctaagctggaaaaaaaaaaaaaaaaaa

SEQ ID NO: 2166 - protein, 590 aa, Homo sapiens; identical to SEQ ID NO: 2154

SEQ ID NO: 2167 - DNA, 4731 bp, Homo sapiens
ggagtgaggacggtgacagccacgcgcgcgcgtacgcgcccgatgcagcgcggccccgtgaccctagtcggccgctgagaggcgcgcggagtctgggccgctgccgtctaggggtcccgtcccgaggcgtccccggcatctccggcccgaatcccggagtgccgggtcgcgcctgcaccgaaggtcccggctcctgtgccctccctgcagccgtcagggcccgtcccccaactcccctttccgctcaggcagggtcctcgcggcccatgctggccgctggggacccgcgcagcccagaccgttcccgggccggccagccggccaccatggtggccctgaggcctgtgcagcaactccaggggggctaaagggctcagagtgcaggccgtggggcgcgagggtcccgggcctgagccccgcgccatggccggggccatcgcttcccgcatgagcttcagctctctcaagaggaagcaacccaagacgttcaccgtgaggatcgtcaccatggacgccgagatggagttcaattgcgagatgaagtggaaagggaaggacctctttgatttggtgtgccggactctggggctccgagaaacctggttctttggactgcagtacacaatcaaggacacagtggcctggctcaaaatggacaagaaggtactggatcatgatgtttcaaaggaagaaccagtcacctttcacttcttggccaaattttatcctgagaatgctgaagaggagctggttcaggagatcacacaacatttattcttcttacaggtaaagaagcagattttagatgaaaagatctactgccctcctgaggcttctgtgctcctggcttcttacgccgtccaggccaagctcaccttgcagagcgccaagtcccgagtggccttctttgaagagctctagcaggtgacccagccaccccaggacctgccacttctcctgctaccgggaccgcgggatggaccagatatcaagagagccatccatagggagctggctgggggtttccgtgggagctccagaactttccccagctgagtgaagagcccagcccctcttatgtgcaattgccttgaactacgaccctgtagagatttctctcatggcgttctagttctctgacctgagtctttgttttaagaagtatttgtcttcctttgtctaatgtgggattcctgactcccttcgtccaaggcaccggtgtgtgtgtgtcttgcactccagagctgacctccaccgcccagcctgggaagtcattgtagggagtgagacactgaagccctgagaagccagtgccatcatccccaccccgcccagggttccggaacattcattcccccaccggtgaggacctggcatgcagcgaagcagcccagcccggcggatcccaggccagcacgcctgccggcttctcatcgtcagggagcccgcccagagctcgtgacgagcaagtgctgggtccccgccaggcaccccgaggcggcgctctggctggcagctggtggggaataggcagggcagctgtggctggggagagactttaggcagaagctgtgatgcaggctgactgccagccgaggggctgggtagtgccgtgcgggagctgatggtacagggcactcgctgtccccctccggccaccctagaccagggtccgagaggcaggcaggagccactcatgtcttccccattgcccgacgcccatagacgctccttcctgtgtggggctggggtactccctggtcgtactgcagtcagcacccgtaacccggctatgaccagggatctgtaagccctgtggctccacaggtgctgcttctcactggcccagactctgagctccaccggcccagtctgcacggcccatctgcttcaccttccctcccagccacgtgccagtggccacagcccacttcccaacccactgttgtacccaggcctcactttgctgttgcccttgtccctcttcgggccctgaattttctgttccctgggggccagccagggccctttgtgcccctcccagcacaggcctgatgcaggtgtccactcacaggtggcgctcacctaggctgtcacaggacccacctccatgccaggcaacagagggccacagaaccacccccacggctcactccttggtctggggccaccttcttgccctttctttttttttttttttttttttttccgagatggagtctctctctgtcacccaggtgggagtgtggtggcacaatctcggctcactgcaacctccacctcctgagttcaagcaattctcctgcctcagcctcccaagtagctgggactacaggcatgcaccaccacacttggccaatgttctgtatttttaatagggacggggttttgccatgttagctaggctggtctcaaactcacacctgggattacaggcatgagccactgcacccagccccttcttgccctttcttttctccatggctgatgctgctgtggccagccagggcccttgagatccttccagtttggctgttatgcaaagcaggtgatttgtcttaatcagataaaagatagaggctatgggggcctcaagatttttggagagcagaggtggtctctggcaattccatctggttttgagaaacttagcagctcacagagcacagagatcctgccttcttcctactatcaggctgacctaatggggttgggctgctcggcaactgcttgggtcaccttgccccaaggaaaccagccctgggtgccacccagccacttagggtctacagggtgggactccagacctagagcgtaagtatggatgttgtggccctgtgtcttcctagtgtgacccagccaggagcggaagcttcaggcgtttgtaaagtgaggtctggctctgcctcctccgttttttttttttttctgtttctgtttctgttttttttttgagatggagtctcgctctgtcgcccaggctggagtgcagtgtcacgatctcagctcactgcaacctccgcctcccaggtacaagagattctcctgcctcagcctcccgagtagctgggactacaggcgtgtgccaccatgcctggctaatttttgtatttttagtagagatggggtttcgccatgttagccagactggtctcgaactcctgacctcaggtgatcctcccaccccggcttcccaaagttctgggattataggcgtgagccaccatgcccggtctcttctcagtcttgaagcccatccctggatttccaccaggagttactttcctcctgacctgtaaatttgttctttaacaatggctgcaggtgggagcatatggtggtttataaaaacgctgtcgggctttgtttccttctttagctgccgtgtctacttctgaagtctgggaagtgccaagccacgcggcctcaagggagctggctggtgtttgagctgtggcagaagcacctggggctccagggagcaggctgggaactgcaggaccttgctcagccaggagcacttccccctccttgaggcaggaatactgaggtgcctccccacagatggagaaggtggagaggaggatgggcctcaggagcatctcaagccccagtagcaggagaaagaaagaaagagatgcctggttttcacagactggttcctgtggctgggatgactgcatccttttttttttttttttgagacggagtttttgcctttgtcgcccaggctggagtgcaatggcgtgatctcggctcaccgcaacctccgcctcccggattcaagcaattctcctgcctcagcctcccgagtagctgggattacaggcacgcacctccacgtccggctaattttgtatttttagtggagacggggtttctccatgtcggtcaggctggtctcgaactcccgacctcaggtgatctgcccacctcggcctcccaaagtgctgggattacaggcatgagccaccgcgcttggccagactgcgtcctttttaagcgaacattttagggcctgggagtttgtcaagtaaggaagtctcaagcccaaagagcagcgtcctgaccatggtggtttcattacgagcccttctgctggctctcaggcagaagccccacagcaccgggaccattcatgaggtcactgcccagctcatgatgtccgtgaggctgtccttttggccagtagccgtgtgcagctgtgtggcacagatggcttcgttcatcctgatcaaggccccacctcagccacagcagtccccccaacctgtgttgtccaccctattattcatgtacctgccaggccctgctagatagcaccccgtggcattacataacacttcatgagtggctgtgtcttgtaattttggggacaggtttctctctttccctctcttttttttgtcaaaagcccagagactgacaaccagctgcagtgtctaagtgttcctcactgacagggtggggcctcaccacccctggagggagcagcgttggcagggagacagcctggcccagtgaccctgggcccaagccagcccctccagggctttcagggaagcgccatccattttcaaagatgtcaaacgtcacttcttcctgtagggcccgagtcctgcctcctatcagggccagatcatagaaggctattttctattctggggaacgattataacttaaatgattgttttaataaaaattctaagctggaaaaaaaaaaaaaaaaaa

SEQ ID NO: 2168 - protein, 165 aa, Homo sapiens
MAGAIASRMSFSSLKRKQPKTFTVRIVTMDAEMEFNCEMKWKGKDLFDLVCRTLGLRETWFFGLQYTIKDTVAWLKMDKKVLDHDVSKEEPVTFHFLAKFYPENAEEELVQEITQHLFFLQVKKQILDEKIYCPPEASVLLASYAVQAKLTLQSAKSRVAFFEEL

SEQ ID NO: 2169 - DNA, 4194 bp, Homo sapiens
gcggccgcgctcgtctcgccgggctgttcgcgggcaggccctgccctgaagggacgaatcggcttggagcgcgggaggtggagtcggccccggcggtcgctccctggacccaacccgaggctgacccaggcccctgcccatgcggggcgcccctggctcggaagagtcccccgggccgggagcagctccaggcagcggccccggaggaagaggaagaagggacagtgctcagcttgggggacccggaccctcgccgcggcatttggagccgggggcagtcccgaactctgtgcttggcaccgccgctccgagtagggcagcgcctgccgggaccctgacccggaccccctgcgcctcgtaggcggcggcgccgccgcgccaccctgttcttccgtgtctccctctgcctggcggcagtcacggccaagaacctacattaagaaacgcattcagatgcatcagccgtttgtaaagcacctgtcgtgagccagagagtattatgagggaggccgaggacttcatgctccggacagagaaacggcgctgggattagggattgccacttctgagaggatgctgggaatctgcagggggagacggaaattcttggctgcctcgttgagtcttctctgcatcccagccatcacctggatttacctgttttctgggagcttcgaagatggaaagcccgtgtctctgtcaccgctggagtcccaggcacacagccccaggtacacggcctccagccagcgggagcgcgagagcctggaggtgcgcatgcgcgaggtggaggaggagaaccgcgccctccgcaggcagctcagcctggcccagggccgagccccatcccatcgccgaggcaaccactccaagacctactccatggaggagggcactggagacagcgagaaccttcgggctggcatcgtggcaggcaacagctccgagtgtgggcagcagccggtcgtggagaaatgcgagacaatccacgttgctattgtctgcgccggatacaatgccagccgggatgtcgtcaccctggtcaaatccgtcctgttccatagacggaaccctctgcacttccaccttattgctgactccattgcggagcagatcctggccacgctcttccagacctggatggtgcccgctgtgcgtgtggacttctacaatgcagacgagctcaagtctgaagtttcctggatccccaataaacattactctgggatttatggtctgatgaagcttgtcctgaccaagactcttcctgccaacctggagagagtcatcgtccttgacacggatatcacctttgccactgacattgcagagctgtgggctgtgttccacaagttcaaaggtcagcaagtcctgggcttggtggagaaccagagtgactggtaccttggaaacctgtggaaaaatcaccgcccatggccagcccttggaagaggctacaacacaggggtgatcctgttacttctggataagctgcggaagatgaaatgggagcagatgtggaggctgaccgcagagagggagctcatgggcatgctctctacatccttagctgaccaggatattttcaatgccgtcatcaaacaaaaccccttccttgtgtaccagctcccctgcttctggaatgtgcagctgtcagaccacacccgctccgagcagtgctacagagacgtgtctgatctaaaggtcattcactggaactcccccaagaagctccgggtgaagaacaagcatgtggagttttttcgcaacctctacctgaccttcctggagtatgacggcaatcttctgaggcgggaactgtttggctgccccagtgaggctgatgtcaacagtgaaaacctccagaagcagctgtctgagctggacgaggacgacctgtgctatgagttccggcgagagcgcttcactgtccaccgcacccacctgtacttcctgcactacgagtatgagcctgcagcagacagcacggacgtcaccctggtcgctcagctgtccatggacaggctccagatgctggaggccatctgcaagcactgggaggggcccatcagcctggccctctacctgtcagacgccgaggcccagcagttcctccgctacgcacagggctctgaggtgcttatgagccgccacaacgtgggctaccacatcgtgtacaaggagggccagttctaccccgtgaacctgctgcgcaacgtggccatgaagcacatcagcactccctacatgttcctgtctgacattgacttcctgcccatgtatgggctctatgagtacctcaggaagtctgtcatccagctcgatcttgccaacaccaagaaagcaatgattgtccccgcgttcgagacactgcgctaccggctgtccttccccaagtcaaaagcggagttgctgtcaatgctggacatggggaccctcttcacattcaggtaccacgtctggacgaaaggccacgcacccacaaacttcgccaagtggcggaccgccaccacgccttaccgggttgagtgggaggccgattttgagccgtatgttgttgtgagacgtgactgcccggagtacgaccggaggtttgtaggctttggctggaacaaagtggctcatatcatggagctggatgtgcaggagtatgagttcattgtgctgcccaacgcctacatgatccacatgcctcatgcccccagcttcgacattaccaagttccgttccaacaagcaataccgcatctgtctcaaaaccctcaaggaagagtttcagcaggacatgtcccgccgctacggctttgctgccctgaaatatctcacagccgagaacaacagctagcaccaagaagcccaccactagggggagacatgctgtaggggaagtgccactcgctgtttggggcccggccttcaaattcaaaattgagccatgctttttcggtttgtttttatttatctctttggcccagccaagctgccctcactacagagaccttggacaaggatccagccagtccctctctgccccacaaccctgcattcccagaggttagctatgcagcccacctagatgagtctcttcaagaatgggaaatcaaggggtgacagggagtaaaagggttatcatcttactgcaaagccacaagatcagggcagggctttaggatgttctggatgctttttaataattatgcttcccatcataactggggagaaagggaagtcagggttctaggggttattcgtcccaggaaatagaagtgaaattgtctttattaagtgaaaactttcccctttgccctgcaatgtagctgggcattcaaacggagggcaaaccgatgatctaaaccaaccacttggaaaaacccaatggggacattgtaaccagagggtcctggaggtggggttgatgggtttccttatccccaaagtcactcctgttttgttttgtttttctttgggggttttgtttatttttggggctggcaatccaaaatagaaaatctgatcctttgaggctctaaaggaaaatcagctgcctctaccaaccaccctctatcagcagtggcccaggaaggaggtcaagcatcttcggccgatatttaaacatgggcagcttccttcaggatgatcaccgaggctcccgtgactttgaactccctactctccagaatccaggggctatagcgatggggactgcggaattacgagggctggctgttttacaccggtcacattttctattggcagtgactgattcatgggaaagggctttgaaggaactacttcagtgcacacacaaggtacgaacctctcaggcctttcgaagaactttcataattcatgaaagcccagttctgaagattcacgtatccatctggagacctacaggaagaaagtgattgggttcctctggttcttgcctgcttcactgtggatgggaagaggtgacaacctcagtctccctttgggacctgtccaagggtaggcaaccaccttcaccttcacacagattgaggagacactggactttttacccattttctttaatcttcaatattaatattgtgtttacattgatgagaacaagagttaatgccctaccctctgctgggctgtttgtattgagttgcaatgtgaccagcgaaagctgcatttaataaatgaaagtacagactgtttcttcccc

SEQ ID NO: 2170 - protein, 756 aa, Homo sapiens
MLGICRGRRKFLAASLSLLCIPAITWIYLFSGSFEDGKPVSLSPLESQAHSPRYTASSQRERESLEVRMREVEEENRALRRQLSLAQGRAPSHRRGNHSKTYSMEEGTGDSENLRAGIVAGNSSECGQQPVVEKCETIHVAIVCAGYNASRDVVTLVKSVLFHRRNPLHFHLIADSIAEQILATLFQTWMVPAVRVDFYNADELKSEVSWIPNKHYSGIYGLMKLVLTKTLPANLERVIVLDTDITFATDIAELWAVFHKFKGQQVLGLVENQSDWYLGNLWKNHRPWPALGRGYNTGVILLLLDKLRKMKWEQMWRLTAERELMGMLSTSLADQDIFNAVIKQNPFLVYQLPCFWNVQLSDHTRSEQCYRDVSDLKVIHWNSPKKLRVKNKHVEFFRNLYLTFLEYDGNLLRRELFGCPSEADVNSENLQKQLSELDEDDLCYEFRRERFTVHRTHLYFLHYEYEPAADSTDVTLVAQLSMDRLQMLEAICKHWEGPISLALYLSDAEAQQFLRYAQGSEVLMSRHNVGYHIVYKEGQFYPVNLLRNVAMKHISTPYMFLSDIDFLPMYGLYEYLRKSVIQLDLANTKKAMIVPAFETLRYRLSFPKSKAELLSMLDMGTLFTFRYHVWTKGHAPTNFAKWRTATTPYRVEWEADFEPYVVVRRDCPEYDRRFVGFGWNKVAHIMELDVQEYEFIVLPNAYMIHMPHAPSFDITKFRSNKQYRICLKTLKEEFQQDMSRRYGFAALKYLTAENNS

SEQ ID NO: 2171 - DNA, 4131 bp, Homo sapiens
gcggccgcgctcgtctcgccgggctgttcgcgggcaggccctgccctgaagggacgaatcggcttggagcgcgggaggtggagtcggccccggcggtcgctccctggacccaacccgaggctgacccaggcccctgcccatgcggggcgcccctggctcggaagagtcccccgggccgggagcagctccaggcagcggccccggaggaagaggaagaagggacagtgctcagcttgggggacccggaccctcgccgcggcatttggagccgggggcagtcccgaactctgtgcttggcaccgccgctccgagtagggcagcgcctgccgggaccctgacccggaccccctgcgcctcgtaggcggcggcgccgccgcgccaccctgttcttccgtgtctccctctgcctggcggcagtcacggccaagagagtattatgagggaggccgaggacttcatgctccggacagagaaacggcgctgggattagggattgccacttctgagaggatgctgggaatctgcagggggagacggaaattcttggctgcctcgttgagtcttctctgcatcccagccatcacctggatttacctgttttctgggagcttcgaagatggaaagcccgtgtctctgtcaccgctggagtcccaggcacacagccccaggtacacggcctccagccagcgggagcgcgagagcctggaggtgcgcatgcgcgaggtggaggaggagaaccgcgccctccgcaggcagctcagcctggcccagggccgagccccatcccatcgccgaggcaaccactccaagacctactccatggaggagggcactggagacagcgagaaccttcgggctggcatcgtggcaggcaacagctccgagtgtgggcagcagccggtcgtggagaaatgcgagacaatccacgttgctattgtctgcgccggatacaatgccagccgggatgtcgtcaccctggtcaaatccgtcctgttccatagacggaaccctctgcacttccaccttattgctgactccattgcggagcagatcctggccacgctcttccagacctggatggtgcccgctgtgcgtgtggacttctacaatgcagacgagctcaagtctgaagtttcctggatccccaataaacattactctgggatttatggtctgatgaagcttgtcctgaccaagactcttcctgccaacctggagagagtcatcgtccttgacacggatatcacctttgccactgacattgcagagctgtgggctgtgttccacaagttcaaaggtcagcaagtcctgggcttggtggagaaccagagtgactggtaccttggaaacctgtggaaaaatcaccgcccatggccagcccttggaagaggctacaacacaggggtgatcctgttacttctggataagctgcggaagatgaaatgggagcagatgtggaggctgaccgcagagagggagctcatgggcatgctctctacatccttagctgaccaggatattttcaatgccgtcatcaaacaaaaccccttccttgtgtaccagctcccctgcttctggaatgtgcagctgtcagaccacacccgctccgagcagtgctacagagacgtgtctgatctaaaggtcattcactggaactcccccaagaagctccgggtgaagaacaagcatgtggagttttttcgcaacctctacctgaccttcctggagtatgacggcaatcttctgaggcgggaactgtttggctgccccagtgaggctgatgtcaacagtgaaaacctccagaagcagctgtctgagctggacgaggacgacctgtgctatgagttccggcgagagcgcttcactgtccaccgcacccacctgtacttcctgcactacgagtatgagcctgcagcagacagcacggacgtcaccctggtcgctcagctgtccatggacaggctccagatgctggaggccatctgcaagcactgggaggggcccatcagcctggccctctacctgtcagacgccgaggcccagcagttcctccgctacgcacagggctctgaggtgcttatgagccgccacaacgtgggctaccacatcgtgtacaaggagggccagttctaccccgtgaacctgctgcgcaacgtggccatgaagcacatcagcactccctacatgttcctgtctgacattgacttcctgcccatgtatgggctctatgagtacctcaggaagtctgtcatccagctcgatcttgccaacaccaagaaagcaatgattgtccccgcgttcgagacactgcgctaccggctgtccttccccaagtcaaaagcggagttgctgtcaatgctggacatggggaccctcttcacattcaggtaccacgtctggacgaaaggccacgcacccacaaacttcgccaagtggcggaccgccaccacgccttaccgggttgagtgggaggccgattttgagccgtatgttgttgtgagacgtgactgcccggagtacgaccggaggtttgtaggctttggctggaacaaagtggctcatatcatggagctggatgtgcaggagtatgagttcattgtgctgcccaacgcctacatgatccacatgcctcatgcccccagcttcgacattaccaagttccgttccaacaagcaataccgcatctgtctcaaaaccctcaaggaagagtttcagcaggacatgtcccgccgctacggctttgctgccctgaaatatctcacagccgagaacaacagctagcaccaagaagcccaccactagggggagacatgctgtaggggaagtgccactcgctgtttggggcccggccttcaaattcaaaattgagccatgctttttcggtttgtttttatttatctctttggcccagccaagctgccctcactacagagaccttggacaaggatccagccagtccctctctgccccacaaccctgcattcccagaggttagctatgcagcccacctagatgagtctcttcaagaatgggaaatcaaggggtgacagggagtaaaagggttatcatcttactgcaaagccacaagatcagggcagggctttaggatgttctggatgctttttaataattatgcttcccatcataactggggagaaagggaagtcagggttctaggggttattcgtcccaggaaatagaagtgaaattgtctttattaagtgaaaactttcccctttgccctgcaatgtagctgggcattcaaacggagggcaaaccgatgatctaaaccaaccacttggaaaaacccaatggggacattgtaaccagagggtcctggaggtggggttgatgggtttccttatccccaaagtcactcctgttttgttttgtttttctttgggggttttgtttatttttggggctggcaatccaaaatagaaaatctgatcctttgaggctctaaaggaaaatcagctgcctctaccaaccaccctctatcagcagtggcccaggaaggaggtcaagcatcttcggccgatatttaaacatgggcagcttccttcaggatgatcaccgaggctcccgtgactttgaactccctactctccagaatccaggggctatagcgatggggactgcggaattacgagggctggctgttttacaccggtcacattttctattggcagtgactgattcatgggaaagggctttgaaggaactacttcagtgcacacacaaggtacgaacctctcaggcctttcgaagaactttcataattcatgaaagcccagttctgaagattcacgtatccatctggagacctacaggaagaaagtgattgggttcctctggttcttgcctgcttcactgtggatgggaagaggtgacaacctcagtctccctttgggacctgtccaagggtaggcaaccaccttcaccttcacacagattgaggagacactggactttttacccattttctttaatcttcaatattaatattgtgtttacattgatgagaacaagagttaatgccctaccctctgctgggctgtttgtattgagttgcaatgtgaccagcgaaagctgcatttaataaatgaaagtacagactgtttcttcccc

SEQ ID NO: 2172 - protein, 756 aa, Homo sapiens; identical to SEQ ID NO: 2170

SEQ ID NO: 2173 - DNA, 3255 bp, Homo sapiens
accgttgcggccgcaggggtctgggcagggctgggcagtgctgccggagcaaaagcggtagcgggagcccggccggagctgggtctggagacgccgtggcagcctgaacggagtgtgcgacggattgggaggtttgtctacagattttgagcgttcgaagttgacccctgactaagtatactttgctgctccctcagcctttgaaaaaatgtctgtcacatatgatgattccgttggagtagaagtgtccagcgacagcttctgggaggtcgggaactacaagcggactgtgaagcggatcgacgatggccaccgcctgtgcagcgacctcatgaactgcctgcatgagcgggcgcgcatcgagaaggcgtatgcgcagcagctcactgagtgggcccggcgctggaggcagcttgtggagaaagggccccagtacgggaccgtggagaaggcctggatggccttcatgtccgaggcagagagggtgagcgagctgcacctcgaggtgaaggcctcactgatgaacgatgacttcgagaagatcaagaactggcagaaggaagcctttcacaagcagatgatgggcggcttcaaggagaccaaggaagctgaggacggctttcggaaggcacagaagccctgggccaagaagctgaaagaggtagaagcagcaaagaaagcccaccatgcagcgtgcaaagaggagaagctggctatctcacgagaagccaacagcaaggcagacccatccttcaaccctgaacagctcaagaaattgcaagacaaaatagaaaagtgcaagcaagatgttcttaagaccaaagagaagtatgagaagtccctcaaggaactcgaccagggcacaccccagtacatggagaacatggagcaggtgtttgagcagtgccagcagttcgaggagaaacgccttcgcttcttccgggaggttctgctggaggttcagaagcacctaaacctgtccaatgtggctggttacaaagccatttaccatgacctggagcagagcatcagagcagctgatgcagtggaggacctgaggtggttccgagccaatcacgggccaggcatggccatgaactggccgcagtttgaggagtggtccgcagacctgattcgaaccctcagccggagagagaagaagaaggccactgacggcttcaccctgacgggcatcaaccagacaggcgaccagtttttgccgagtaagcccagcagcacccttaatgtcccgagcaaccccgcccagtctgcgcagtcacagtccagctacaaccccttcgaggatgaggacgacacgggcagcaccgtcagtgagaaggaggacattaaggccaaaaatgtgagcagctacgagaagacccagagctatcccaccgactggtcagacgatgagtctaacaaccccttctcctccacggatgccaatggggactcgaatccattcgacgacgacgccacctcggggacggaagtgcgagtccgggccctgtatgactatgaggggcaggagcatgatgagctgagcttcaaggctggggatgagctgaccaagatggaggacgaggatgagcagggctggtgcaagggacgcttggacaacgggcaagttggcctatacccggcaaattatgtggaggcgatccagtgatgagtcggggacaggccagcggggggacggaggcggcgggcccaggagcctcagccagccacgtgggcatccactccttttcctgcaagagatgatggttccattgctcttggcttcatggtgttcctggaaggcagatgagctggtcatttcgcctgggactcggcacctttccgagtgcagctggagggatctgagcgcaggaagacgcagaacaacagaaatagccgcccctccccgcccactgtgcctgttggcctatcatagatctctatgttcttgactttgtctctcctttccgagtcaatggtgggttacactgatcttgttccactgattactctctctgacgagtccatcacctgcaacttaaatgaacaagcttacatcccattttgagtgaagattttgaggtttttaatttaaaggctgtgtacagttatacttttttatacacctgttcatttctacttaaattatggcacagattgatgcgcaccagtcttgaggaaacgatctccctattcccttaccctgttactcagccacgccgtgtgtaggcttagcctcaggtggcagatgtttgaggaaaggaattatgccaggaaggtgggaccgggttatggtcgggtttctattgggaatgctctttgtgcttttgggcatctgaatggaagctttacatagaaccttaggtagaactcccccaaatcgccatatttaaaaattattttcactctattcttgcttaaaactgtactcttttgcaaattaacaattttatcactgattcagagttaaaaagaagactaacttttcaagcaaatgcatctgtaaagatgctttagattagactgtcatgtctcagtgtctatctgtatatattatttgatattcagagaatctaaagcactcgtctactgttttaatgagatttaacagcttttaacagtgagtttcgtttgtaaactgcttgaagtctgtggcattcaggcacacgtctggctggccggctgggtctcctcccgggctcagtgggcctggggcctctctgacgtggtgcctgctggagggaggctcgtcgtcaccagctgactgctggtccggcttctgaccggcctttgtcctggctccgtagcagaacactgtaaaagtgcccgcgtctttgcagtagttgcagatttcagtcgtcgtgttacttgtgcacaaacagaagctgggtcttacccgcagcacgagtgtctcgggctgcccggagtcgcccgggagcaggtgctgcagccagagttacgcgggggccacgcgggccggcgggggtggggggaacgtgggggaacctgtgtttcacgtgactcagcagtgcccgccgccgtcaccagctatgcattcactccgtttccagtgagcagatgtcttgcttggaaagtggacctgtgtctgtgtctgtcctgagaacttaccagcagaaatcctcatttctgtgctacggatttaccaaaaattgtcaagtctttttcagtttaacagttcctttacatgtgtagtatttgaggaaaaaaatcaataaacagttgatctcgtgcata

SEQ ID NO: 2174 - protein, 486 aa, Homo sapiens
MSVTYDDSVGVEVSSDSFWEVGNYKRTVKRIDDGHRLCSDLMNCLHERARIEKAYAQQLTEWARRWRQLVEKGPQYGTVEKAWMAFMSEAERVSELHLEVKASLMNDDFEKIKNWQKEAFHKQMMGGFKETKEAEDGFRKAQKPWAKKLKEVEAAKKAHHAACKEEKLAISREANSKADPSFNPEQLKKLQDKIEKCKQDVLKTKEKYEKSLKELDQGTPQYMENMEQVFEQCQQFEEKRLRFFREVLLEVQKHLNLSNVAGYKAIYHDLEQSIRAADAVEDLRWFRANHGPGMAMNWPQFEEWSADLIRTLSRREKKKATDGFTLTGINQTGDQFLPSKPSSTLNVPSNPAQSAQSQSSYNPFEDEDDTGSTVSEKEDIKAKNVSSYEKTQSYPTDWSDDESNNPFSSTDANGDSNPFDDDATSGTEVRVRALYDYEGQEHDELSFKAGDELTKMEDEDEQGWCKGRLDNGQVGLYPANYVEAIQ

SEQ ID NO: 2175 - DNA, 1677 bp, Homo sapiens
ctccgcggccccctcccccggccccgggctccggctccggctccggctctggctctgcgcggtggcagcggcggcggcggcgcggggaccgaggttgaagttcatgagttcgcccagcctcagtgacctgggcaagagagagccggccgccgccgcggacgagcggggcacgcagcagcgccgggcctgcgccaacgccacctggaacagcatccacaacggggtgatcgccgtcttccagcgcaaggggctgcccgaccaggagctcttcagcctcaacgagggcgtccggcagctgttgaagacagagctggggtccttcttcacggagtacctgcagaaccagctgctgacaaaaggcatggtgatccttcgggacaagattcgcttctatgagggacagaagctgctggactcactggcagagacctgggacttcttcttcagtgacgtgctgcccatgctgcaggccatcttctacccggtgcagggcaaggagccatcggtgcgccagctggccctgctgcacttccggaatgccatcaccctcagtgtgaagctagaggatgcgctggcccgggcccatgcccgtgtgccccctgccatcgtgcagatgctgctggtgctgcagggggtacatgagtccaggggcgtgactgaggactacctgcgcctggagacgctggtccagaaggtggtgtcgccatacctgggcacctacggcctccactccagcgaggggcccttcacccattcctgcatcctggaaaagcgcctcctccgccgctcccgctcgggggacgtgctggccaagaaccctgtggtgcgctccaagagctacaacacgcctctgctgaaccccgtgcaggagcacgaggcggagggcgcggcggccggcggtaccagcatccgcaggcactctgtgtcggagatgacgtcctgccccgagcctcagggcttctccgacccgcccggccagggccccaccgggaccttcaggtcctccccggcgccccactcagggccctgccccagcagactgtaccccacgacccagccccctgagcagggcttggatcccacccgcagctccctgccccgctccagcccggagaacctggtggaccagatcctggagtccgtggactcggattctgaagggattttcattgactttggccggggccggggctctggcatgtccgacttggagggctctgggggccggcagagtgtcgtgtgaggcctcacagctggccttgagtttttactgacacgtccctgtgtgcgggggtgtccatgtggcgtgtgtgtgagtgagacttttttactgcgtcccgtcccgccagccctatcggcctcgtcactggccttggtcactttgtatttctgtcttggttggaaataccatcagccttccttgctcggcccaggtctgtttcaggcatctgagtcggcgtttacccaggggccgggccagagacgggggtcggccgctcgctcccacgctcctcctgccccagccctctggtgtccacacctgcccacagagaatgtaaacccagtgggctctgcccacgccgggccccaaagtgaccagactccagcacacctgtctcctcctgcctggggtggccatggggatggaagggggtggaataaaacctgtcaacctgg

SEQ ID NO: 2176 - protein, 379 aa, Homo sapiens
MSSPSLSDLGKREPAAAADERGTQQRRACANATWNSIHNGVIAVFQRKGLPDQELFSLNEGVRQLLKTELGSFFTEYLQNQLLTKGMVILRDKIRFYEGQKLLDSLAETWDFFFSDVLPMLQAIFYPVQGKEPSVRQLALLHFRNAITLSVKLEDALARAHARVPPAIVQMLLVLQGVHESRGVTEDYLRLETLVQKVVSPYLGTYGLHSSEGPFTHSCILEKRLLRRSRSGDVLAKNPVVRSKSYNTPLLNPVQEHEAEGAAAGGTSIRRHSVSEMTSCPEPQGFSDPPGQGPTGTFRSSPAPHSGPCPSRLYPTTQPPEQGLDPTRSSLPRSSPENLVDQILESVDSDSEGIFIDFGRGRGSGMSDLEGSGGRQSVV

SEQ ID NO: 2177 - DNA, 1560 bp, Homo sapiens
ctccgcggccccctcccccggccccgggctccggctccggctccggctctggctctgcgcggtggcagcggcggcggcggcgcggggaccgagcatccacaacggggtgatcgccgtcttccagcgcaaggggctgcccgaccaggagctcttcagcctcaacgagggcgtccggcagctgttgaagacagagctggggtccttcttcacggagtacctgcagaaccagctgctgacaaaaggcatggtgatccttcgggacaagattcgcttctatgagggacagaagctgctggactcactggcagagacctgggacttcttcttcagtgacgtgctgcccatgctgcaggccatcttctacccggtgcagggcaaggagccatcggtgcgccagctggccctgctgcacttccggaatgccatcaccctcagtgtgaagctagaggatgcgctggcccgggcccatgcccgtgtgccccctgccatcgtgcagatgctgctggtgctgcagggggtacatgagtccaggggcgtgactgaggactacctgcgcctggagacgctggtccagaaggtggtgtcgccatacctgggcacctacggcctccactccagcgaggggcccttcacccattcctgcatcctggaaaagcgcctcctccgccgctcccgctcgggggacgtgctggccaagaaccctgtggtgcgctccaagagctacaacacgcctctgctgaaccccgtgcaggagcacgaggcggagggcgcggcggccggcggtaccagcatccgcaggcactctgtgtcggagatgacgtcctgccccgagcctcagggcttctccgacccgcccggccagggccccaccgggaccttcaggtcctccccggcgccccactcagggccctgccccagcagactgtaccccacgacccagccccctgagcagggcttggatcccacccgcagctccctgccccgctccagcccggagaacctggtggaccagatcctggagtccgtggactcggattctgaagggattttcattgactttggccggggccggggctctggcatgtccgacttggagggctctgggggccggcagagtgtcgtgtgaggcctcacagctggccttgagtttttactgacacgtccctgtgtgcgggggtgtccatgtggcgtgtgtgtgagtgagacttttttactgcgtcccgtcccgccagccctatcggcctcgtcactggccttggtcactttgtatttctgtcttggttggaaataccatcagccttccttgctcggcccaggtctgtttcaggcatctgagtcggcgtttacccaggggccgggccagagacgggggtcggccgctcgctcccacgctcctcctgccccagccctctggtgtccacacctgcccacagagaatgtaaacccagtgggctctgcccacgccgggccccaaagtgaccagactccagcacacctgtctcctcctgcctggggtggccatggggatggaagggggtggaataaaacctgtcaacctgg

SEQ ID NO: 2178 - protein, 293 aa, Homo sapiens
MVILRDKIRFYEGQKLLDSLAETWDFFFSDVLPMLQAIFYPVQGKEPSVRQLALLHFRNAITLSVKLEDALARAHARVPPAIVQMLLVLQGVHESRGVTEDYLRLETLVQKVVSPYLGTYGLHSSEGPFTHSCILEKRLLRRSRSGDVLAKNPVVRSKSYNTPLLNPVQEHEAEGAAAGGTSIRRHSVSEMTSCPEPQGFSDPPGQGPTGTFRSSPAPHSGPCPSRLYPTTQPPEQGLDPTRSSLPRSSPENLVDQILESVDSDSEGIFIDFGRGRGSGMSDLEGSGGRQSVV

SEQ ID NO: 2179 - DNA, 1900 bp, Homo sapiens
caggaaggggtgctctgtgggcttggaggatgcaggcgccttcctggggactgctctgtgagcagtgataaaatatttatcagccagcagctgggcttccctgcatagggtgcagtcgggggcagctcccacccgagcctgcagcctgagttctgctgagtcatgggggagcccagtgagccgcctgccctcaagctcctgggccccctctgccctttggccatgtgaacgcctcctaatgtgtaagccattcggctgcccccaaggccaggcatccagtgtgcttagtgctgagcagggtttcagagctcacccccaggagggtgcagacctcagccaaggtcgcagagcagaggagacccgtgggctgggattccacctgtgcccaccctggcagcatcccacctcctgagtcctctcggcacccagcaagcatccacaacggggtgatcgccgtcttccagcgcaaggggctgcccgaccaggagctcttcagcctcaacgagggcgtccggcagctgttgaagacagagctggggtccttcttcacggagtacctgcagaaccagctgctgacaaaaggcatggtgatccttcgggacaagattcgcttctatgagggacagaagctgctggactcactggcagagacctgggacttcttcttcagtgacgtgctgcccatgctgcaggccatcttctacccggtgcagggcaaggagccatcggtgcgccagctggccctgctgcacttccggaatgccatcaccctcagtgtgaagctagaggatgcgctggcccgggcccatgcccgtgtgccccctgccatcgtgcagatgctgctggtgctgcagggggtacatgagtccaggggcgtgactgaggactacctgcgcctggagacgctggtccagaaggtggtgtcgccatacctgggcacctacggcctccactccagcgaggggcccttcacccattcctgcatcctggaaaagcgcctcctccgccgctcccgctcgggggacgtgctggccaagaaccctgtggtgcgctccaagagctacaacacgcctctgctgaaccccgtgcaggagcacgaggcggagggcgcggcggccggcggtaccagcatccgcaggcactctgtgtcggagatgacgtcctgccccgagcctcagggcttctccgacccgcccggccagggccccaccgggaccttcaggtcctccccggcgccccactcagggccctgccccagcagactgtaccccacgacccagccccctgagcagggcttggatcccacccgcagctccctgccccgctccagcccggagaacctggtggaccagatcctggagtccgtggactcggattctgaagggattttcattgactttggccggggccggggctctggcatgtccgacttggagggctctgggggccggcagagtgtcgtgtgaggcctcacagctggccttgagtttttactgacacgtccctgtgtgcgggggtgtccatgtggcgtgtgtgtgagtgagacttttttactgcgtcccgtcccgccagccctatcggcctcgtcactggccttggtcactttgtatttctgtcttggttggaaataccatcagccttccttgctcggcccaggtctgtttcaggcatctgagtcggcgtttacccaggggccgggccagagacgggggtcggccgctcgctcccacgctcctcctgccccagccctctggtgtccacacctgcccacagagaatgtaaacccagtgggctctgcccacgccgggccccaaagtgaccagactccagcacacctgtctcctcctgcctggggtggccatggggatggaagggggtggaataaaacctgtcaacctgg

SEQ ID NO: 2180 - protein, 293 aa, Homo sapiens; identical to SEQ ID NO: 2178

SEQ ID NO: 2181 - DNA, 2017 bp, Homo sapiens
caggaaggggtgctctgtgggcttggaggatgcaggcgccttcctggggactgctctgtgagcagtgataaaatatttatcagccagcagctgggcttccctgcatagggtgcagtcgggggcagctcccacccgagcctgcagcctgagttctgctgagtcatgggggagcccagtgagccgcctgccctcaagctcctgggccccctctgccctttggccatgtgaacgcctcctaatgtgtaagccattcggctgcccccaaggccaggcatccagtgtgcttagtgctgagcagggtttcagagctcacccccaggagggtgcagacctcagccaaggtcgcagagcagaggagacccgtgggctgggattccacctgtgcccaccctggcagcatcccacctcctgagtcctctcggcacccagcaaggttgaagttcatgagttcgcccagcctcagtgacctgggcaagagagagccggccgccgccgcggacgagcggggcacgcagcagcgccgggcctgcgccaacgccacctggaacagcatccacaacggggtgatcgccgtcttccagcgcaaggggctgcccgaccaggagctcttcagcctcaacgagggcgtccggcagctgttgaagacagagctggggtccttcttcacggagtacctgcagaaccagctgctgacaaaaggcatggtgatccttcgggacaagattcgcttctatgagggacagaagctgctggactcactggcagagacctgggacttcttcttcagtgacgtgctgcccatgctgcaggccatcttctacccggtgcagggcaaggagccatcggtgcgccagctggccctgctgcacttccggaatgccatcaccctcagtgtgaagctagaggatgcgctggcccgggcccatgcccgtgtgccccctgccatcgtgcagatgctgctggtgctgcagggggtacatgagtccaggggcgtgactgaggactacctgcgcctggagacgctggtccagaaggtggtgtcgccatacctgggcacctacggcctccactccagcgaggggcccttcacccattcctgcatcctggaaaagcgcctcctccgccgctcccgctcgggggacgtgctggccaagaaccctgtggtgcgctccaagagctacaacacgcctctgctgaaccccgtgcaggagcacgaggcggagggcgcggcggccggcggtaccagcatccgcaggcactctgtgtcggagatgacgtcctgccccgagcctcagggcttctccgacccgcccggccagggccccaccgggaccttcaggtcctccccggcgccccactcagggccctgccccagcagactgtaccccacgacccagccccctgagcagggcttggatcccacccgcagctccctgccccgctccagcccggagaacctggtggaccagatcctggagtccgtggactcggattctgaagggattttcattgactttggccggggccggggctctggcatgtccgacttggagggctctgggggccggcagagtgtcgtgtgaggcctcacagctggccttgagtttttactgacacgtccctgtgtgcgggggtgtccatgtggcgtgtgtgtgagtgagacttttttactgcgtcccgtcccgccagccctatcggcctcgtcactggccttggtcactttgtatttctgtcttggttggaaataccatcagccttccttgctcggcccaggtctgtttcaggcatctgagtcggcgtttacccaggggccgggccagagacgggggtcggccgctcgctcccacgctcctcctgccccagccctctggtgtccacacctgcccacagagaatgtaaacccagtgggctctgcccacgccgggccccaaagtgaccagactccagcacacctgtctcctcctgcctggggtggccatggggatggaagggggtggaataaaacctgtcaacctgg

SEQ ID NO: 2182 - protein, 379 aa, Homo sapiens; identical to SEQ ID NO: 2176

SEQ ID NO: 2183 - DNA, 1873 bp, Homo sapiens
cggcctccgtttgcgccgggtctgtgctggccgcgcgcctggcgctccacgctgagcctctccgtgcaatgattaacccggcggggcggccggcgcgggacccgagacggaggcgcggggccggggcgggaccccgcaggaccgctcggcttcctgctctcgccggagtttccgcgtagagggcgcatcgccggcccggggcccttggtgcggcgtggcgcagggcgcggcgtggggcgcgcgtgggcgcggcgcaggcggcccgggtcaccatgaggactctccgcaggttgaagttcatgagttcgcccagcctcagtgacctgggcaagagagagccggccgccgccgcggacgagcggggcacgcagcagcgccgggcctgcgccaacgccacctggaacagcatccacaacggggtgatcgccgtcttccagcgcaaggggctgcccgaccaggagctcttcagcctcaacgagggcgtccggcagctgttgaagacagagctggggtccttcttcacggagtacctgcagaaccagctgctgacaaaaggcatggtgatccttcgggacaagattcgcttctatgagggacagaagctgctggactcactggcagagacctgggacttcttcttcagtgacgtgctgcccatgctgcaggccatcttctacccggtgcagggcaaggagccatcggtgcgccagctggccctgctgcacttccggaatgccatcaccctcagtgtgaagctagaggatgcgctggcccgggcccatgcccgtgtgccccctgccatcgtgcagatgctgctggtgctgcagggggtacatgagtccaggggcgtgactgaggactacctgcgcctggagacgctggtccagaaggtggtgtcgccatacctgggcacctacggcctccactccagcgaggggcccttcacccattcctgcatcctggaaaagcgcctcctccgccgctcccgctcgggggacgtgctggccaagaaccctgtggtgcgctccaagagctacaacacgcctctgctgaaccccgtgcaggagcacgaggcggagggcgcggcggccggcggtaccagcatccgcaggcactctgtgtcggagatgacgtcctgccccgagcctcagggcttctccgacccgcccggccagggccccaccgggaccttcaggtcctccccggcgccccactcagggccctgccccagcagactgtaccccacgacccagccccctgagcagggcttggatcccacccgcagctccctgccccgctccagcccggagaacctggtggaccagatcctggagtccgtggactcggattctgaagggattttcattgactttggccggggccggggctctggcatgtccgacttggagggctctgggggccggcagagtgtcgtgtgaggcctcacagctggccttgagtttttactgacacgtccctgtgtgcgggggtgtccatgtggcgtgtgtgtgagtgagacttttttactgcgtcccgtcccgccagccctatcggcctcgtcactggccttggtcactttgtatttctgtcttggttggaaataccatcagccttccttgctcggcccaggtctgtttcaggcatctgagtcggcgtttacccaggggccgggccagagacgggggtcggccgctcgctcccacgctcctcctgccccagccctctggtgtccacacctgcccacagagaatgtaaacccagtgggctctgcccacgccgggccccaaagtgaccagactccagcacacctgtctcctcctgcctggggtggccatggggatggaagggggtggaataaaacctgtcaacctgg

SEQ ID NO: 2184 - protein, 388 aa, Homo sapiens
MRTLRRLKFMSSPSLSDLGKREPAAAADERGTQQRRACANATWNSIHNGVIAVFQRKGLPDQELFSLNEGVRQLLKTELGSFFTEYLQNQLLTKGMVILRDKIRFYEGQKLLDSLAETWDFFFSDVLPMLQAIFYPVQGKEPSVRQLALLHFRNAITLSVKLEDALARAHARVPPAIVQMLLVLQGVHESRGVTEDYLRLETLVQKVVSPYLGTYGLHSSEGPFTHSCILEKRLLRRSRSGDVLAKNPVVRSKSYNTPLLNPVQEHEAEGAAAGGTSIRRHSVSEMTSCPEPQGFSDPPGQGPTGTFRSSPAPHSGPCPSRLYPTTQPPEQGLDPTRSSLPRSSPENLVDQILESVDSDSEGIFIDFGRGRGSGMSDLEGSGGRQSVV

SEQ ID NO: 2185 - DNA, 1752 bp, Homo sapiens
agcatccacaacggggtgatcgccgtcttccagcgcaaggggctgcccgaccaggagctcttcagcctcaacgagggcgtccggcagctgttgaagacagagctggggtccttcttcacggagtacctgcagaaccagctgctgacaaaaggcatggtgatccttcgggacaagattcgcttctatgaggagctgcagagagacaaggcggcggcggctgctgtgctgggtgcagtgaggaagaggccctcggtggtgcccatggctggccaggatcctgcgctgagcacgagtcacccgttctacgacgtggccagacatggcattctgcaggtggcaggggatgaccgctttggaagacgtgttgtcacgttcagctgctgccggatgccaccctcccacgagctggaccaccagcggctgctggagtatttgaagtacacactggaccaatacgttgagaacgattataccatcgtctatttccactacgggctgaacagccggaacaagccttccctgggctggctccagagcgcatacaaggagttcgataggaagtacaagaagaacttgaaggccctctacgtggtgcaccccaccagcttcatcaaggtcctgtggaacatcttgaagcccctcatcagtcacaagtttgggaagaaagtcatctatttcaactacctgagtgagctccacgaacaccttaaatacgaccagctggtcatccctcccgaagttttgcggtacgatgagaagctccagagcctgcacgagggccggacgccgcctcccaccaagacaccaccgccgcggcccccgctgcccacacagcagtttggcgtcagtctgcaatacctcaaagacaaaaatcaaggcgaactcatcccccctgtgctgaggttcacagtgacgtacctgagagagaaaggcctgcgcaccgagggcctgttccggagatccgccagcgtgcagaccgtccgcgagatccagaggctctacaaccaagggaagcccgtgaactttgacgactacggggacattcacatccctgccgtgatcctgaagaccttcctgcgagagctgccccagccgcttctgaccttccaggcctacgagcagattctcgggatcacctgtgtggagagcagcctgcgtgtcactggctgccgccagatcttacggagcctcccagagcacaactacgtcgtcctccgctacctcatgggcttcctgcatgcggtgtcccgggagagcatcttcaacaaaatgaacagctctaacctggcctgtgtcttcgggctgaatttgatctggccatcccagggggtctcctccctgagtgcccttgtgcccctgaacatgttcactgaactgctgatcgagtactatgaaaagatcttcagcaccccggaggcacctggggagcacggcctggcaccatgggaacaggggagcagggcagcccctttgcaggaggctgtgccacggacacaagccacgggcctcaccaagcctaccctacctccgagtcccctgatggcagccagaagacgtctctagtgttgcgaacactctgtatatttcgagctacctcccacacctgtctgtgcacttgtatgttttgtaaacttggcatctgtaaaaataaccagccattagatgaattcagaaccttctaatgaaaactccatgcctctggtccttggactcttgtccatggttcctgagctgtggaccgggatagaataa

SEQ ID NO: 2186 - protein, 469 aa, Homo sapiens
MVILRDKIRFYEELQRDKAAAAAVLGAVRKRPSVVPMAGQDPALSTSHPFYDVARHGILQVAGDDRFGRRVVTFSCCRMPPSHELDHQRLLEYLKYTLDQYVENDYTIVYFHYGLNSRNKPSLGWLQSAYKEFDRKYKKNLKALYVVHPTSFIKVLWNILKPLISHKFGKKVIYFNYLSELHEHLKYDQLVIPPEVLRYDEKLQSLHEGRTPPPTKTPPPRPPLPTQQFGVSLQYLKDKNQGELIPPVLRFTVTYLREKGLRTEGLFRRSASVQTVREIQRLYNQGKPVNFDDYGDIHIPAVILKTFLRELPQPLLTFQAYEQILGITCVESSLRVTGCRQILRSLPEHNYVVLRYLMGFLHAVSRESIFNKMNSSNLACVFGLNLIWPSQGVSSLSALVPLNMFTELLIEYYEKIFSTPEAPGEHGLAPWEQGSRAAPLQEAVPRTQATGLTKPTLPPSPLMAARRRL

SEQ ID NO: 2187 - DNA, 1725 bp, Homo sapiens
acgtccggggaggggccaggtgagcggcagacccggcacgcaggtgggggccggcggggtccgtggccagagctgcagagagacaaggcggcggcggctgctgtgctgggtgcagtgaggaagaggccctcggtggtgcccatggctggccaggatcctgcgctgagcacgagtcacccgttctacgacgtggccagacatggcattctgcaggtggcaggggatgaccgctttggaagacgtgttgtcacgttcagctgctgccggatgccaccctcccacgagctggaccaccagcggctgctggagtatttgaagtacacactggaccaatacgttgagaacgattataccatcgtctatttccactacgggctgaacagccggaacaagccttccctgggctggctccagagcgcatacaaggagttcgataggaaagacggggatctcactatgtggcccaggctggtctcgaactccaagctcaagcgatcctcccacctcagcctcccaaagtactgggattacaggtacaagaagaacttgaaggccctctacgtggtgcaccccaccagcttcatcaaggtcctgtggaacatcttgaagcccctcatcagtcacaagtttgggaagaaagtcatctatttcaactacctgagtgagctccacgaacaccttaaatacgaccagctggtcatccctcccgaagttttgcggtacgatgagaagctccagagcctgcacgagggccggacgccgcctcccaccaagacaccaccgccgcggcccccgctgcccacacagcagtttggcgtcagtctgcaatacctcaaagacaaaaatcaaggcgaactcatcccccctgtgctgaggttcacagtgacgtacctgagagagaaaggcctgcgcaccgagggcctgttccggagatccgccagcgtgcagaccgtccgcgagatccagaggctctacaaccaagggaagcccgtgaactttgacgactacggggacattcacatccctgccgtgatcctgaagaccttcctgcgagagctgccccagccgcttctgaccttccaggcctacgagcagattctcgggatcacctgtgtggagagcagcctgcgtgtcactggctgccgccagatcttacggagcctcccagagcacaactacgtcgtcctccgctacctcatgggcttcctgcatgcggtgtcccgggagagcatcttcaacaaaatgaacagctctaacctggcctgtgtcttcgggctgaatttgatctggccatcccagggggtctcctccctgagtgcccttgtgcccctgaacatgttcactgaactgctgatcgagtactatgaaaagatcttcagcaccccggaggcacctggggagcacggcctggcaccatgggaacaggggagcagggcagcccctttgcaggaggctgtgccacggacacaagccacgggcctcaccaagcctaccctacctccgagtcccctgatggcagccagaagacgtctctagtgttgcgaacactctgtatatttcgagctacctcccacacctgtctgtgcacttgtatgttttgtaaacttggcatctgtaaaaataaccagccattagatgaattcagaaccttctaatgaaaactccatgcctctggtccttggactcttgtccatggttcctgagctgtggaccgggatagaataa

SEQ ID NO: 2188 - protein, 464 aa, Homo sapiens
MAGQDPALSTSHPFYDVARHGILQVAGDDRFGRRVVTFSCCRMPPSHELDHQRLLEYLKYTLDQYVENDYTIVYFHYGLNSRNKPSLGWLQSAYKEFDRKDGDLTMWPRLVSNSKLKRSSHLSLPKYWDYRYKKNLKALYVVHPTSFIKVLWNILKPLISHKFGKKVIYFNYLSELHEHLKYDQLVIPPEVLRYDEKLQSLHEGRTPPPTKTPPPRPPLPTQQFGVSLQYLKDKNQGELIPPVLRFTVTYLREKGLRTEGLFRRSASVQTVREIQRLYNQGKPVNFDDYGDIHIPAVILKTFLRELPQPLLTFQAYEQILGITCVESSLRVTGCRQILRSLPEHNYVVLRYLMGFLHAVSRESIFNKMNSSNLACVFGLNLIWPSQGVSSLSALVPLNMFTELLIEYYEKIFSTPEAPGEHGLAPWEQGSRAAPLQEAVPRTQATGLTKPTLPPSPLMAARRRL

SEQ ID NO: 2189 - DNA, 1632 bp, Homo sapiens
acgtccggggaggggccaggtgagcggcagacccggcacgcaggtgggggccggcggggtccgtggccagagctgcagagagacaaggcggcggcggctgctgtgctgggtgcagtgaggaagaggccctcggtggtgcccatggctggccaggatcctgcgctgagcacgagtcacccgttctacgacgtggccagacatggcattctgcaggtggcaggggatgaccgctttggaagacgtgttgtcacgttcagctgctgccggatgccaccctcccacgagctggaccaccagcggctgctggagtatttgaagtacacactggaccaatacgttgagaacgattataccatcgtctatttccactacgggctgaacagccggaacaagccttccctgggctggctccagagcgcatacaaggagttcgataggaagtacaagaagaacttgaaggccctctacgtggtgcaccccaccagcttcatcaaggtcctgtggaacatcttgaagcccctcatcagtcacaagtttgggaagaaagtcatctatttcaactacctgagtgagctccacgaacaccttaaatacgaccagctggtcatccctcccgaagttttgcggtacgatgagaagctccagagcctgcacgagggccggacgccgcctcccaccaagacaccaccgccgcggcccccgctgcccacacagcagtttggcgtcagtctgcaatacctcaaagacaaaaatcaaggcgaactcatcccccctgtgctgaggttcacagtgacgtacctgagagagaaaggcctgcgcaccgagggcctgttccggagatccgccagcgtgcagaccgtccgcgagatccagaggctctacaaccaagggaagcccgtgaactttgacgactacggggacattcacatccctgccgtgatcctgaagaccttcctgcgagagctgccccagccgcttctgaccttccaggcctacgagcagattctcgggatcacctgtgtggagagcagcctgcgtgtcactggctgccgccagatcttacggagcctcccagagcacaactacgtcgtcctccgctacctcatgggcttcctgcatgcggtgtcccgggagagcatcttcaacaaaatgaacagctctaacctggcctgtgtcttcgggctgaatttgatctggccatcccagggggtctcctccctgagtgcccttgtgcccctgaacatgttcactgaactgctgatcgagtactatgaaaagatcttcagcaccccggaggcacctggggagcacggcctggcaccatgggaacaggggagcagggcagcccctttgcaggaggctgtgccacggacacaagccacgggcctcaccaagcctaccctacctccgagtcccctgatggcagccagaagacgtctctagtgttgcgaacactctgtatatttcgagctacctcccacacctgtctgtgcacttgtatgttttgtaaacttggcatctgtaaaaataaccagccattagatgaattcagaaccttctaatgaaaactccatgcctctggtccttggactcttgtccatggttcctgagctgtggaccgggatagaataa

SEQ ID NO: 2190 - protein, 433 aa, Homo sapiens
MAGQDPALSTSHPFYDVARHGILQVAGDDRFGRRVVTFSCCRMPPSHELDHQRLLEYLKYTLDQYVENDYTIVYFHYGLNSRNKPSLGWLQSAYKEFDRKYKKNLKALYVVHPTSFIKVLWNILKPLISHKFGKKVIYFNYLSELHEHLKYDQLVIPPEVLRYDEKLQSLHEGRTPPPTKTPPPRPPLPTQQFGVSLQYLKDKNQGELIPPVLRFTVTYLREKGLRTEGLFRRSASVQTVREIQRLYNQGKPVNFDDYGDIHIPAVILKTFLRELPQPLLTFQAYEQILGITCVESSLRVTGCRQILRSLPEHNYVVLRYLMGFLHAVSRESIFNKMNSSNLACVFGLNLIWPSQGVSSLSALVPLNMFTELLIEYYEKIFSTPEAPGEHGLAPWEQGSRAAPLQEAVPRTQATGLTKPTLPPSPLMAARRRL

SEQ ID NO: 2191 - DNA, 2113 bp, Homo sapiens
ctcctcgcccccacccagacccagaaggcgccaccatggcggcgcccccgcagcccgtcacccacctcatctttgacatggacggacttcttctggatactgaacggctgtattcagtggtgtttcaagaaatatgtaatcgctatgacaagaaatacagctgggatgtaaagtccctggttatgggtaagaaggcattagaggcggcacagattataatagacgtcttgcagctcccgatgtccaaagaggagctggtggaagaaagccaaacgaagttaaaggaagtgttccccacggctgcgctcatgccaggggcggagaaactcatcatccacctgcggaaacatggcatcccctttgcactggccaccagctcggggtccgcgtcgttcgatatgaagacaagccgccacaaggagttcttcagcttgttttcccacattgtgctgggagatgaccccgaagtgcagcatggcaagccagacccggacatcttcctagcttgtgccaagaggttctctccccctcctgctatggagaagtgccttgtctttgaagatgctcccaatggggtggaggcggccctggcagctgggatgcaggtggtcatggttcctgacggaaacttgagccgagatctgacaacaaaggccaccctggtgctgaattccctgcaggacttccagcccgagctgtttggtttgccctcctatgagtgagagggagggcctcagtcttccgcccccagcccactctcatggtccacactgctgggggaaagggaaaggaaatcagcaactcttcaatcccaacctgcgctgtgattttagcctcctgagattggagtttccatcccatgttggtttgtcccagtctaacgtgttgataaaatgtgacttgacggttgagacaaaaaatacagtagagacagaaacgaagcccagaacaaagatgaaacttgaattaccatctcagaagtcaagctgatggagtatgtgataaagtgaatgtacatgtatatacacacacacctccatatatacatgtgtgtatcagtttggtaatatgcaggtaggcattacatgcatatgtatgtagacatatgcatgcatgtatatgtaaaatatatacttttccaagacaaaatggaacatcacttctctcttctagtttttctgaacactggctgggaaatgtaaactgtgtatgcatataagtatatgctttatgtatgcatatgtatgtagatatgtttatatctatcgtctgcatcactctcctcagtgttgatgtcaacatgcaatgacaactgataaagcgagatggtagttctgcctggtttgcagtctgagtgggaaagtcctgtttttgatgagcactccttgttagctaacatttaaattctttttgtgacctcagaatgtctctggatctttcctcattgactgactctgtgccacgtcatccatagtttattgttagtatgaacacaactgtaacatttacctggtatctacatccttacctgcattggaaaatgtttgctacctcacaacaaccatttgcctcctttaagaacactgatgggctgcactttttggatagaaatagaatttgatttcagaatgtatgcttggtgagtctcagtgcccaggaacacttttggaataatttatcagacattgaacttctgtgattaatcgcttttatagatttactcagtctttaaaattcgtctctgatttgccagagaaaaacggtggtagccatggaaatcgggagtgaaggagcactgcttcattgtggctcagcccttcctaggggcctctgccctttgatgtccttgagctactcttcagctctggaagttgtggacaaaccgtaggaatgtatgtgtgcgtgtggtggagtgattgtctgtgaatgacaggccctggctattgattgatgttgcatcaatttagcaaattcatttcctcattcttgatggcctgaatatatgtctgcacttttaatgctcctcttaaccagttgtaacatcttaccatttccctaacaaattgaattagtttaataaaatcttttgacacatgttaaaaaaaaaaaaaaa

SEQ ID NO: 2192 - protein, 214 aa, Homo sapiens
MDGLLLDTERLYSVVFQEICNRYDKKYSWDVKSLVMGKKALEAAQIIIDVLQLPMSKEELVEESQTKLKEVFPTAALMPGAEKLIIHLRKHGIPFALATSSGSASFDMKTSRHKEFFSLFSHIVLGDDPEVQHGKPDPDIFLACAKRFSPPPAMEKCLVFEDAPNGVEAALAAGMQVVMVPDGNLSRDLTTKATLVLNSLQDFQPELFGLPSYE

SEQ ID NO: 2193 - DNA, 2331 bp, Homo sapiens
acagcggtgaccgagtgagaggagggcggcggcggcggcggcggcggcggcgtgaagtcactgctgctctgggttcgggttggcgactgaaggcggtaccggcctcccggaacagcccgggggagggcttaggtgcagaagggcaggctggccgcggccggtttggtctggggaccacgggctggagcaggtggaaatttaaaattgtttacagtcaacactgtttccagccatgggtttgtctccatctgctcctgctgttgcagttcaggcctcaaatgcttcagcgtccccaccttcaggatgcccgatgcatgaagggaaaatgaaaggctgtccagtgaatacagggccatctggcccaacctgtgagaagaaaacatactctgtgcctgcccaccaggaacgcgcctatgagtacgtggagtgtcccattaggggcactgcggctgagaataaggagaacctagatccttcaaatctgatgccaccaccaaatcaaacaccagctccagatcagccatttgcattgtctactgtcagagaagagtcatccattccgagagcagattcagagaaaaagtgggtttacccttctgagcagatgttctggaatgcaatgttaaagaaagggtggaagtggaaggatgaggatatcagtcagaaggatatgtataatatcattagaattcacaatcagaataacgagcaggcttggaaggagattttgaagtgggaagcccttcatgctgcagagtgtccttgtggtccatcattgatccggtttggagggaaagcaaaagagtattcaccaagggcacgaattcgttcctggatggggtatgagttgccttttgataggcacgattggatcataaaccgttgcgggacagaagttagatatgtgattgattattatgatggtggtgaagtcaacaaggactaccagttcaccatcctggacgtccgtcctgccttagattcactttcggcagtatgggacagaatgaaagtcgcttggtggcgttggacctcgtaaagcactgtttcagatggaaaaatataaactatttttttctgagcgatacattaaactattttccccagattgaattgcactcatgatgtaatgggaacttcaagtgggtaatcacactttttccttcacttaacgaaggatactatgcactgttcacttttgacttgtgttgtaccttgcagtttatagcagatcattttgttttcttcctacttagcttaagtgggaagcagtctctcagtttttcctttacctgcagtattgtctgtatatttcatctcgaaaagcctgaacaacctctgaaaaagagcttttaaaaagtgatgaaagttgcttttttttcttactattttctcaggaatactccagagatgtaaagcctgagagtccatggtgatgctcaagagctttcatctggccaaatattttaactaaagctgttcattataaataagaggtgattataccttttttaaaaaaagttaccattatttctaaagcccctatggtatgattgtgacctttaacaaaatgcaaaggtatacactggaaaggtactcagcaaaattctctccaaattctgatttatatgaatttcttggactggatagagtactttcaactataccttcctttggaacataccttttaaaaaatgttccctttaaatcctgttattctaatatgtaactctgctcccaacaaacaggtctcctcattgtccttggcatttgacaagttatcccaacttcgaatctcatttcttcctttgctggcagcctccacccttccccacatcagtcggcctaatccaaaccttgaaagcctggcttaagtcccagtatcagtgatggtccccctctaaaacatgattttatatttggctgagtgttaaaattcacaagatgagcatttttttcccagatggagaacgcttcaactcagtctagattttttttgtttgttttaaggaagctctaagtttgccattgaaactttttgtaccagtaatccataaactggttgttctatttatagcagcatgttacaaatgactgctttttttttttaactgtctatactattaaatcctttaatttatcctgaatgctgtagtgttaaattagtggatgaaattggcagtctgtgggtgattaatttggtatggatttgtcagttttgtgtggagtttaagaaatagaacagccttaaactctacatttcaaaatacttgtatattttaaaataaagctgattagttcacaggttttaaaaaaaaaaaaaaaaaaaaa

SEQ ID NO: 2194 - protein, 268 aa, Homo sapiens
MGLSPSAPAVAVQASNASASPPSGCPMHEGKMKGCPVNTGPSGPTCEKKTYSVPAHQERAYEYVECPIRGTAAENKENLDPSNLMPPPNQTPAPDQPFALSTVREESSIPRADSEKKWVYPSEQMFWNAMLKKGWKWKDEDISQKDMYNIIRIHNQNNEQAWKEILKWEALHAAECPCGPSLIRFGGKAKEYSPRARIRSWMGYELPFDRHDWIINRCGTEVRYVIDYYDGGEVNKDYQFTILDVRPALDSLSAVWDRMKVAWWRWTS

SEQ ID NO: 2195 - DNA, 5304 bp, Homo sapiens
ggctgggctgcgaatagcgtgttcctctccggcggaacacacacacccggccttggggctgtctcctgagctccctcctccacggagagcgctgagcgccgccgggaattccatcccaccgtgggcacgcagtctttggaggtcccgggcgcagcacgctcggtgtccccacactgcagcaagacagagaccccgcgggaaccttgagcttggaacaacccttgagcctctgcagtcggaagagtgggcgcagcagcccagcggaggccaggcgcgcaacctcgggcgccggggcaaggagagagtgcagggaggcgcagctcaggcgcccggctcaggagcgggaggaagttctcgcggcgccgggagcgcggtggacgcgccctgggcgcacgcccaggcagccttctccctggccctcgggactgtcctcgggccgcaaggaggagcttgctggagtcttagaggccatccagagccagcgagcaggagcgctgcgtctcccgcctcagctaggaagggggagtggcgctggcaggctggagctgggaacccagcgagcgcctgaccttcctcctcctcttcctgaccctcttcgcgtcttgggctccggaggaaggttctagcggctgcaggaggtccccagacccattttcctagaaggctggtgatggatctgctgctcctgccgccgccggggcacttggagcgcaccggcggcgcgtgagctgggctttgctctccactgccctgggcaaaccccgggccagccccgcctggcacctttgcctgagtccctttcggttcccgacccaaagccaccagcgtccagggagggaggaggaggtggtcctcaggtgcagccccgccgagatgtccgcgcagagcctgctccacagcgtcttctcctgttcctcgcccgcttcaagtagcgcggcctcggccaagggcttctccaagaggaagctgcgccagacccgcagcctggacccggccctgatcggcggctgcgggagcgacgaggcgggcgcggagggcagtgcgcggggagccacggcgggccgcctctactccccatcactcccagccgagagtctcggccctcgcttggcgtcctcttcccggggtccgccccccagggccaccaggctaccgcctcctggacctctttgctcgtccttctccacacccagcaccccgcaggagaagtcaccatccggcagctttcactttgactatgaggttcccctgggtcgcggcggcctcaagaagagcatggcctgggacctgccttctgtcctggccgggccagccagtagccgaagcgcttccagcatcctctgttcatccgggggaggccccaatggcatcttcgcttctcctaggaggtggctccagcagaggaagttccagtccccacccgacagtcgcgggcacccctacgtcgtgtggaaatccgagttggagttgtatgatcttcagatcttaggcacaaaaccaccgatgaattccgatacacatcgtaactttgaccccaccgcaacccttagaaatcagggtgatttcacctggaacagcatgtcaggccgcagtgtacggctgaggtcagtccccatccagagtctctcagagctggagagggcccggctgcaggaagtggctttttatcagttgcaacaggactgtgacctgagctgtcagatcaccattcccaaagatggacaaaagagaaagaaatctttaagaaagaaactggattcactaggaaaggagaaaaacaaagacaaagaattcatcccacaggcatttggaatgcccttatcccaagtcattgcgaatgacagggcctataaactcaagcaggacttgcagagggacgagcagaaagatgcatctgactttgtggcttccctcctcccatttggaaataaaagacaaaacaaagaactctcaagcagtaactcatctctcagctcaacctcagaaacaccgaatgagtcaacgtccccaaacaccccggaaccggctcctcgggctaggaggaggggtgccatgtcagtggattctatcaccgatcttgatgacaatcagtctcgactactagaagctttacaactttccttgcctgctgaggctcaaagtaaaaaggaaaaagccagagataagaaactcagtctgaatcctatttacagacaggtccctaggctggtggacagctgctgtcagcacctagaaaaacatggcctccagacagtggggatattccgagttggaagctcaaaaaagagagtgagacaattacgtgaggaatttgaccgtgggattgatgtctctctggaggaggagcacagtgttcatgatgtggcagccttgctgaaagagttcctgagggacatgccagacccccttctcaccagggagctgtacacagctttcatcaacactctcttgttggagccggaggaacagctgggcaccttgcagctcctcatataccttctacctccctgcaactgcgacaccctccaccgcctgctacagttcctctccatcgtggccaggcatgccgatgacaacatcagcaaagatgggcaagaggtcactgggaataaaatgacatctctaaacttagccaccatatttggacccaacctgctgcacaagcagaagtcatcagacaaagaattctcagttcagagttcagcccgggctgaggagagcacggccatcatcgctgttgtgcaaaagatgattgaaaattatgaagccctgttcatggttcccccagatctccagaacgaagtgctgatcagcctgttagagaccgatcctgatgtcgtggactatttactcagaagaaaggcttcccaatcatcaacaagttctgtgcttccggctgcagtgcaggcctgcccacagtaccctgccagcatgtttacgccctgacctggagggaccagctaaggaagccctgacatgctgcagtcggaagtttccttttccgtgggagggaggcattcatctacagactccaacaaggcctccagcggagacatctccccttatgacaacaactccccagtgctgtctgagcgctccctgctggctatgcaagaggacgcggccccggggggctcggagaagctttacagagtgccagggcagtttatgctggtgggccacttgtcgtcgtcaaagtcaagggaaagttctcctggaccaaggcttgggaaagatctgtcagaggagcctttcgatatctggggaacttggcattcaacattaaaaagcggatccaaagacccaggaatgacaggttcctctggagacatttttgaaagcagctccctaagagcggggccctgctccctttctcaagggaacctgtccccaaattggcctcggtggcaggggagccccgcagagctggacagcgacacgcagggggctcggaggactcaggccgcagcccccgcgacggagggcagggcccaccctgcggtgtcgcgcgcctgcagcacgccccacgtccaggtggcagggaaagccgagcggcccacggccaggtcggagcagtacttgaccctgagcggcgcccacgacctcagcgagagtgagctggatgtggccgggctgcagagccgggccacacctcagtgccaaagaccccatgggagtgggagggatgacaagcggcccccgcctccatacccgggcccagggaagcccgcggcagcggcagcctggatccaggggcccccggaaggcgtggagacacccacggaccagggaggccaagcagccgagcgagagcagcaggtcacgcagaaaaaactgagcagcgccaactccctgccagcgggcgagcaggacagtccgcgcctgggggacgctggctggctcgactggcagagagagcgctggcagatctgggagctcctgtcgaccgacaaccccgatgccctgcccgagacgctggtctgagcccgcacccagccgagccccccctgccccgagccccccgccctccagcccaggggggaccgtgggtggtggccactggcacacttagtgttcttctttcacacttctcaaaagtgacacaagagaaatccagttcacctacagaggtagagcactcacgcccccgccattgagaataaggttccattgcgtagccagccttaggaaaaacaaacagaacccaaaccagatggcaatgtccaatctaaaaacgtccctcttggctctataatataagatacaactcttgcttggtatagcctaaccgtatttatgtgtcttcggttttgactattgtgtattctgtaacagattatgtataatcatatatgatatattcacaaagagaaaacaaaaggaacttttaaaaaaaaaatcacttcacttatattaagcaatgagatatactaaacaatgagattctatagaatgttctagaatgtgcacaagcgggtttctgtgcttttgccatagctttataactggggataacccttccttcgataccaaacactaacaagaggaagcagaatatgagaagccatatttttacataggagtcagatacaaaaagaaaaatcactgaatgcttttagatattgaatacgttttcaggaaaatgctaaatctgatagattacgaaatatatttttagaacttgtttagaaaggattcagttaaccaaacaagaaaaaggcagtgcctcacaaagaaattaagaagttgtccgtcccacgttacatcaaattcagttttatataggccatatataatatatatttataatgtataatttttatgtatttttcaaaactacaaactggaatccaactataaagtgtttaagaatctacacagaatattcaaattatagaacatgttttttccctttgccccataatcagtatttgccaaattacatgcaattccttaaaaactaaatcacatttggtaaaaggcctacagctttgtacttacattgtgccaaaggctgaggaaatgttttctttcgtaattttatgtgtattgtaaaatgttctaccgtactttagtagtttgaagtttttcaagtgcataactatttttgaccagcagatggcgatacgcttcagtattttatgcaattttttttcacttctgaagggaaagtgtattataaaaaaagattttttttttttttataaaacatgctactcttaattttcatgttggtgatgaaattcccagtggtgtttcttaaggttctatcttgtgccatgatgaataaaaagttaagcaaag

SEQ ID NO: 2196 - protein, 690 aa, Homo sapiens
MSAQSLLHSVFSCSSPASSSAASAKGFSKRKLRQTRSLDPALIGGCGSDEAGAEGSARGATAGRLYSPSLPAESLGPRLASSSRGPPPRATRLPPPGPLCSSFSTPSTPQEKSPSGSFHFDYEVPLGRGGLKKSMAWDLPSVLAGPASSRSASSILCSSGGGPNGIFASPRRWLQQRKFQSPPDSRGHPYVVWKSELELYDLQILGTKPPMNSDTHRNFDPTATLRNQGDFTWNSMSGRSVRLRSVPIQSLSELERARLQEVAFYQLQQDCDLSCQITIPKDGQKRKKSLRKKLDSLGKEKNKDKEFIPQAFGMPLSQVIANDRAYKLKQDLQRDEQKDASDFVASLLPFGNKRQNKELSSSNSSLSSTSETPNESTSPNTPEPAPRARRRGAMSVDSITDLDDNQSRLLEALQLSLPAEAQSKKEKARDKKLSLNPIYRQVPRLVDSCCQHLEKHGLQTVGIFRVGSSKKRVRQLREEFDRGIDVSLEEEHSVHDVAALLKEFLRDMPDPLLTRELYTAFINTLLLEPEEQLGTLQLLIYLLPPCNCDTLHRLLQFLSIVARHADDNISKDGQEVTGNKMTSLNLATIFGPNLLHKQKSSDKEFSVQSSARAEESTAIIAVVQKMIENYEALFMVPPDLQNEVLISLLETDPDVVDYLLRRKASQSSTSSVLPAAVQACPQYPASMFTP

SEQ ID NO: 2197 - DNA, 3632 bp, Homo sapiens
ggctgggctgcgaatagcgtgttcctctccggcggaacacacacacccggccttggggctgtctcctgagctccctcctccacggagagcgctgagcgccgccgggaattccatcccaccgtgggcacgcagtctttggaggtcccgggcgcagcacgctcggtgtccccacactgcagcaagacagagaccccgcgggaaccttgagcttggaacaacccttgagcctctgcagtcggaagagtgggcgcagcagcccagcggaggccaggcgcgcaacctcgggcgccggggcaaggagagagtgcagggaggcgcagctcaggcgcccggctcaggagcgggaggaagttctcgcggcgccgggagcgcggtggacgcgccctgggcgcacgcccaggcagccttctccctggccctcgggactgtcctcgggccgcaaggaggagcttgctggagtcttagaggccatccagagccagcgagcaggagcgctgcgtctcccgcctcagctaggaagggggagtggcgctggcaggctggagctgggaacccagcgagcgcctgaccttcctcctcctcttcctgaccctcttcgcgtcttgggctccggaggaaggttctagcggctgcaggaggtccccagacccattttcctagaaggctggtgatggatctgctgctcctgccgccgccggggcacttggagcgcaccggcggcgcgtgagctgggctttgctctccactgccctgggcaaaccccgggccagccccgcctggcacctttgcctgagtccctttcggttcccgacccaaagccaccagcgtccagggagggaggaggaggtggtcctcaggtgcagccccgccgagatgtccgcgcagagcctgctccacagcgtcttctcctgttcctcgcccgcttcaagtagcgcggcctcggccaagggcttctccaagaggaagctgcgccagacccgcagcctggacccggccctgatcggcggctgcgggagcgacgaggcgggcgcggagggcagtgcgcggggagccacggcgggccgcctctactccccatcactcccagccgagagtctcggccctcgcttggcgtcctcttcccggggtccgccccccagggccaccaggctaccgcctcctggacctctttgctcgtccttctccacacccagcaccccgcaggagaagtcaccatccggcagctttcactttgactatgaggttcccctgggtcgcggcggcctcaagaagagcatggcctgggacctgccttctgtcctggccgggccagccagtagccgaagcgcttccagcatcctctgttcatccgggggaggccccaatggcatcttcgcttctcctaggaggtggctccagcagaggaagttccagtccccacccgacagtcgcgggcacccctacgtcgtgtggaaatccgagggtgatttcacctggaacagcatgtcaggccgcagtgtacggctgaggtcagtccccatccagagtctctcagagctggagagggcccggctgcaggaagtggctttttatcagttgcaacaggactgtgacctgagctgtcagatcaccattcccaaagatggacaaaagagaaagaaatctttaagaaagaaactggattcactaggaaaggagaaaaacaaagacaaagaattcatcccacaggcatttggaatgcccttatcccaagtcattgcgaatgacagggcctataaactcaagcaggacttgcagagggacgagcagaaagatgcatctgactttgtggcttccctcctcccatttggaaataaaagacaaaacaaagaactctcaagcagtaactcatctctcagctcaacctcagaaacaccgaatgagtcaacgtccccaaacaccccggaaccggctcctcgggctaggaggaggggtgccatgtcagtggattctatcaccgatcttgatgacaatcagtctcgactactagaagctttacaactttccttgcctgctgaggctcaaagtaaaaaggaaaaagccagagataagaaactcagtctgaatcctatttacagacaggtccctaggctggtggacagctgctgtcagcacctagaaaaacatggcctccagacagtggggatattccgagttggaagctcaaaaaagagagtgagacaattacgtgaggaatttgaccgtgggattgatgtctctctggaggaggagcacagtgttcatgatgtggcagccttgctgaaagagttcctgagggacatgccagacccccttctcaccagggagctgtacacagctttcatcaacactctcttgttggagccggaggaacagctgggcaccttgcagctcctcatataccttctacctccctgcaactgcgacaccctccaccgcctgctacagttcctctccatcgtggccaggcatgccgatgacaacatcagcaaagatgggcaagaggtcactgggaataaaatgacatctctaaacttagccaccatatttggacccaacctgctgcacaagcagaagtcatcagacaaagaattctcagttcagagttcagcccgggctgaggagagcacggccatcatcgctgttgtgcaaaagatgattgaaaattatgaagccctgttcatggttcccccagatctccagaacgaagtgctgatcagcctgttagagaccgatcctgatgtcgtggactatttactcagaagaaaggcttcccaatcatcaagccctgacatgctgcagtcggaagtttccttttccgtgggagggaggcattcatctacagactccaacaaggcctccagcggagacatctccccttatgacaacaactccccagtgctgtctgagcgctccctgctggctatgcaagaggacgcggccccggggggctcggagaagctttacagagtgccagggcagtttatgctggtgggccacttgtcgtcgtcaaagtcaagggaaagttctcctggaccaaggcttgggaaaggtaactggagcctggccagcaggcgctggccaaaacaagcgaccctcctcttgttgcatgtggcatggtgtggggctcttcggaccttctcttcgtctctcccttatttgatgtttctgtaattcaacctgcatttaccgagtacctgctgaacgcctactctaggaagaggaaggtatggcgagcccagtcgttggctgggagggtccctgcaggccacactccaagtctcagatatctgggaaataaacgcatgcccagaggagccactcctattcccagctgattctttttccctccagcatcctaggaactttatgtatactggatttgggttgcatatttgctagtctgaggtgccacccaattactgctgttacatttctaaagaaaacaagctgaacctactatatgtatgaagacaaccttccagaaccaaatagtgttagtatccaatgacaagagagcactatactgggagtcacaaacctgctctgccactttcaacctgcaggatctccagtgagcgattgagcttcccagagtcccatttcctcctgctgtgaaaactcagaatgataac

SEQ ID NO: 2198 - protein, 765 aa, Homo sapiens
MSAQSLLHSVFSCSSPASSSAASAKGFSKRKLRQTRSLDPALIGGCGSDEAGAEGSARGATAGRLYSPSLPAESLGPRLASSSRGPPPRATRLPPPGPLCSSFSTPSTPQEKSPSGSFHFDYEVPLGRGGLKKSMAWDLPSVLAGPASSRSASSILCSSGGGPNGIFASPRRWLQQRKFQSPPDSRGHPYVVWKSEGDFTWNSMSGRSVRLRSVPIQSLSELERARLQEVAFYQLQQDCDLSCQITIPKDGQKRKKSLRKKLDSLGKEKNKDKEFIPQAFGMPLSQVIANDRAYKLKQDLQRDEQKDASDFVASLLPFGNKRQNKELSSSNSSLSSTSETPNESTSPNTPEPAPRARRRGAMSVDSITDLDDNQSRLLEALQLSLPAEAQSKKEKARDKKLSLNPIYRQVPRLVDSCCQHLEKHGLQTVGIFRVGSSKKRVRQLREEFDRGIDVSLEEEHSVHDVAALLKEFLRDMPDPLLTRELYTAFINTLLLEPEEQLGTLQLLIYLLPPCNCDTLHRLLQFLSIVARHADDNISKDGQEVTGNKMTSLNLATIFGPNLLHKQKSSDKEFSVQSSARAEESTAIIAVVQKMIENYEALFMVPPDLQNEVLISLLETDPDVVDYLLRRKASQSSSPDMLQSEVSFSVGGRHSSTDSNKASSGDISPYDNNSPVLSERSLLAMQEDAAPGGSEKLYRVPGQFMLVGHLSSSKSRESSPGPRLGKGNWSLASRRWPKQATLLLLHVAWCGALRTFSSSLPYLMFL

SEQ ID NO: 2199 - DNA, 3728 bp, Homo sapiens
ggctgggctgcgaatagcgtgttcctctccggcggaacacacacacccggccttggggctgtctcctgagctccctcctccacggagagcgctgagcgccgccgggaattccatcccaccgtgggcacgcagtctttggaggtcccgggcgcagcacgctcggtgtccccacactgcagcaagacagagaccccgcgggaaccttgagcttggaacaacccttgagcctctgcagtcggaagagtgggcgcagcagcccagcggaggccaggcgcgcaacctcgggcgccggggcaaggagagagtgcagggaggcgcagctcaggcgcccggctcaggagcgggaggaagttctcgcggcgccgggagcgcggtggacgcgccctgggcgcacgcccaggcagccttctccctggccctcgggactgtcctcgggccgcaaggaggagcttgctggagtcttagaggccatccagagccagcgagcaggagcgctgcgtctcccgcctcagctaggaagggggagtggcgctggcaggctggagctgggaacccagcgagcgcctgaccttcctcctcctcttcctgaccctcttcgcgtcttgggctccggaggaaggttctagcggctgcaggaggtccccagacccattttcctagaaggctggtgatggatctgctgctcctgccgccgccggggcacttggagcgcaccggcggcgcgtgagctgggctttgctctccactgccctgggcaaaccccgggccagccccgcctggcacctttgcctgagtccctttcggttcccgacccaaagccaccagcgtccagggagggaggaggaggtggtcctcaggtgcagccccgccgagatgtccgcgcagagcctgctccacagcgtcttctcctgttcctcgcccgcttcaagtagcgcggcctcggccaagggcttctccaagaggaagctgcgccagacccgcagcctggacccggccctgatcggcggctgcgggagcgacgaggcgggcgcggagggcagtgcgcggggagccacggcgggccgcctctactccccatcactcccagccgagagtctcggccctcgcttggcgtcctcttcccggggtccgccccccagggccaccaggctaccgcctcctggacctctttgctcgtccttctccacacccagcaccccgcaggagaagtcaccatccggcagctttcactttgactatgaggttcccctgggtcgcggcggcctcaagaagagcatggcctgggacctgccttctgtcctggccgggccagccagtagccgaagcgcttccagcatcctctgttcatccgggggaggccccaatggcatcttcgcttctcctaggaggtggctccagcagaggaagttccagtccccacccgacagtcgcgggcacccctacgtcgtgtggaaatccgagttggagttgtatgatcttcagatcttaggcacaaaaccaccgatgaattccgatacacatcgtaactttgaccccaccgcaacccttagaaatcagggtgatttcacctggaacagcatgtcaggccgcagtgtacggctgaggtcagtccccatccagagtctctcagagctggagagggcccggctgcaggaagtggctttttatcagttgcaacaggactgtgacctgagctgtcagatcaccattcccaaagatggacaaaagagaaagaaatctttaagaaagaaactggattcactaggaaaggagaaaaacaaagacaaagaattcatcccacaggcatttggaatgcccttatcccaagtcattgcgaatgacagggcctataaactcaagcaggacttgcagagggacgagcagaaagatgcatctgactttgtggcttccctcctcccatttggaaataaaagacaaaacaaagaactctcaagcagtaactcatctctcagctcaacctcagaaacaccgaatgagtcaacgtccccaaacaccccggaaccggctcctcgggctaggaggaggggtgccatgtcagtggattctatcaccgatcttgatgacaatcagtctcgactactagaagctttacaactttccttgcctgctgaggctcaaagtaaaaaggaaaaagccagagataagaaactcagtctgaatcctatttacagacaggtccctaggctggtggacagctgctgtcagcacctagaaaaacatggcctccagacagtggggatattccgagttggaagctcaaaaaagagagtgagacaattacgtgaggaatttgaccgtgggattgatgtctctctggaggaggagcacagtgttcatgatgtggcagccttgctgaaagagttcctgagggacatgccagacccccttctcaccagggagctgtacacagctttcatcaacactctcttgttggagccggaggaacagctgggcaccttgcagctcctcatataccttctacctccctgcaactgcgacaccctccaccgcctgctacagttcctctccatcgtggccaggcatgccgatgacaacatcagcaaagatgggcaagaggtcactgggaataaaatgacatctctaaacttagccaccatatttggacccaacctgctgcacaagcagaagtcatcagacaaagaattctcagttcagagttcagcccgggctgaggagagcacggccatcatcgctgttgtgcaaaagatgattgaaaattatgaagccctgttcatggttcccccagatctccagaacgaagtgctgatcagcctgttagagaccgatcctgatgtcgtggactatttactcagaagaaaggcttcccaatcatcaagccctgacatgctgcagtcggaagtttccttttccgtgggagggaggcattcatctacagactccaacaaggcctccagcggagacatctccccttatgacaacaactccccagtgctgtctgagcgctccctgctggctatgcaagaggacgcggccccggggggctcggagaagctttacagagtgccagggcagtttatgctggtgggccacttgtcgtcgtcaaagtcaagggaaagttctcctggaccaaggcttgggaaaggtaactggagcctggccagcaggcgctggccaaaacaagcgaccctcctcttgttgcatgtggcatggtgtggggctcttcggaccttctcttcgtctctcccttatttgatgtttctgtaattcaacctgcatttaccgagtacctgctgaacgcctactctaggaagaggaaggtatggcgagcccagtcgttggctgggagggtccctgcaggccacactccaagtctcagatatctgggaaataaacgcatgcccagaggagccactcctattcccagctgattctttttccctccagcatcctaggaactttatgtatactggatttgggttgcatatttgctagtctgaggtgccacccaattactgctgttacatttctaaagaaaacaagctgaacctactatatgtatgaagacaaccttccagaaccaaatagtgttagtatccaatgacaagagagcactatactgggagtcacaaacctgctctgccactttcaacctgcaggatctccagtgagcgattgagcttcccagagtcccatttcctcctgctgtgaaaactcagaatgataac

SEQ ID NO: 2200 - protein, 797 aa, Homo sapiens
MSAQSLLHSVFSCSSPASSSAASAKGFSKRKLRQTRSLDPALIGGCGSDEAGAEGSARGATAGRLYSPSLPAESLGPRLASSSRGPPPRATRLPPPGPLCSSFSTPSTPQEKSPSGSFHFDYEVPLGRGGLKKSMAWDLPSVLAGPASSRSASSILCSSGGGPNGIFASPRRWLQQRKFQSPPDSRGHPYVVWKSELELYDLQILGTKPPMNSDTHRNFDPTATLRNQGDFTWNSMSGRSVRLRSVPIQSLSELERARLQEVAFYQLQQDCDLSCQITIPKDGQKRKKSLRKKLDSLGKEKNKDKEFIPQAFGMPLSQVIANDRAYKLKQDLQRDEQKDASDFVASLLPFGNKRQNKELSSSNSSLSSTSETPNESTSPNTPEPAPRARRRGAMSVDSITDLDDNQSRLLEALQLSLPAEAQSKKEKARDKKLSLNPIYRQVPRLVDSCCQHLEKHGLQTVGIFRVGSSKKRVRQLREEFDRGIDVSLEEEHSVHDVAALLKEFLRDMPDPLLTRELYTAFINTLLLEPEEQLGTLQLLIYLLPPCNCDTLHRLLQFLSIVARHADDNISKDGQEVTGNKMTSLNLATIFGPNLLHKQKSSDKEFSVQSSARAEESTAIIAVVQKMIENYEALFMVPPDLQNEVLISLLETDPDVVDYLLRRKASQSSSPDMLQSEVSFSVGGRHSSTDSNKASSGDISPYDNNSPVLSERSLLAMQEDAAPGGSEKLYRVPGQFMLVGHLSSSKSRESSPGPRLGKGNWSLASRRWPKQATLLLLHVAWCGALRTFSSSLPYLMFL

SEQ ID NO: 2201 - DNA, 3947 bp, Homo sapiens
gcctgcctctgttctgaaaggacaggaacttctcaatgatccgatgaaaagattgcatatttttggtcccaagattcacagtagcggaggtctctggcaacaaaaggtatcgtgggagtcacagctatgccagctgggccatttctcagacattcaatatgatctgccatttcaggatgcattttttaccaaaaaaataatttttttaaaacagactcaacttcctactgcaagcttagttcagttagattagagaggacagcaaagacgcggctgattataatttatggggtgatttcacctggaacagcatgtcaggccgcagtgtacggctgaggtcagtccccatccagagtctctcagagctggagagggcccggctgcaggaagtggctttttatcagttgcaacaggactgtgacctgagctgtcagatcaccattcccaaagatggacaaaagagaaagaaatctttaagaaagaaactggattcactaggaaaggagaaaaacaaagacaaagaattcatcccacaggcatttggaatgcccttatcccaagtcattgcgaatgacagggcctataaactcaagcaggacttgcagagggacgagcagaaagatgcatctgactttgtggcttccctcctcccatttggaaataaaagacaaaacaaagaactctcaagcagtaactcatctctcagctcaacctcagaaacaccgaatgagtcaacgtccccaaacaccccggaaccggctcctcgggctaggaggaggggtgccatgtcagtggattctatcaccgatcttgatgacaatcagtctcgactactagaagctttacaactttccttgcctgctgaggctcaaagtaaaaaggaaaaagccagagataagaaactcagtctgaatcctatttacagacaggtccctaggctggtggacagctgctgtcagcacctagaaaaacatggcctccagacagtggggatattccgagttggaagctcaaaaaagagagtgagacaattacgtgaggaatttgaccgtgggattgatgtctctctggaggaggagcacagtgttcatgatgtggcagccttgctgaaagagttcctgagggacatgccagacccccttctcaccagggagctgtacacagctttcatcaacactctcttgttggagccggaggaacagctgggcaccttgcagctcctcatataccttctacctccctgcaactgcgacaccctccaccgcctgctacagttcctctccatcgtggccaggcatgccgatgacaacatcagcaaagatgggcaagaggtcactgggaataaaatgacatctctaaacttagccaccatatttggacccaacctgctgcacaagcagaagtcatcagacaaagaattctcagttcagagttcagcccgggctgaggagagcacggccatcatcgctgttgtgcaaaagatgattgaaaattatgaagccctgttcatggttcccccagatctccagaacgaagtgctgatcagcctgttagagaccgatcctgatgtcgtggactatttactcagaagaaaggcttcccaatcatcaagccctgacatgctgcagtcggaagtttccttttccgtgggagggaggcattcatctacagactccaacaaggcctccagcggagacatctccccttatgacaacaactccccagtgctgtctgagcgctccctgctggctatgcaagaggacgcggccccggggggctcggagaagctttacagagtgccagggcagtttatgctggtgggccacttgtcgtcgtcaaagtcaagggaaagttctcctggaccaaggcttgggaaagatctgtcagaggagcctttcgatatctggggaacttggcattcaacattaaaaagcggatccaaagacccaggaatgacaggttcctctggagacatttttgaaagcagctccctaagagcggggccctgctccctttctcaagggaacctgtccccaaattggcctcggtggcaggggagccccgcagagctggacagcgacacgcagggggctcggaggactcaggccgcagcccccgcgacggagggcagggcccaccctgcggtgtcgcgcgcctgcagcacgccccacgtccaggtggcagggaaagccgagcggcccacggccaggtcggagcagtacttgaccctgagcggcgcccacgacctcagcgagagtgagctggatgtggccgggctgcagagccgggccacacctcagtgccaaagaccccatgggagtgggagggatgacaagcggcccccgcctccatacccgggcccagggaagcccgcggcagcggcagcctggatccaggggcccccggaaggcgtggagacacccacggaccagggaggccaagcagccgagcgagagcagcaggtcacgcagaaaaaactgagcagcgccaactccctgccagcgggcgagcaggacagtccgcgcctgggggacgctggctggctcgactggcagagagagcgctggcagatctgggagctcctgtcgaccgacaaccccgatgccctgcccgagacgctggtctgagcccgcacccagccgagccccccctgccccgagccccccgccctccagcccaggggggaccgtgggtggtggccactggcacacttagtgttcttctttcacacttctcaaaagtgacacaagagaaatccagttcacctacagaggtagagcactcacgcccccgccattgagaataaggttccattgcgtagccagccttaggaaaaacaaacagaacccaaaccagatggcaatgtccaatctaaaaacgtccctcttggctctataatataagatacaactcttgcttggtatagcctaaccgtatttatgtgtcttcggttttgactattgtgtattctgtaacagattatgtataatcatatatgatatattcacaaagagaaaacaaaaggaacttttaaaaaaaaaatcacttcacttatattaagcaatgagatatactaaacaatgagattctatagaatgttctagaatgtgcacaagcgggtttctgtgcttttgccatagctttataactggggataacccttccttcgataccaaacactaacaagaggaagcagaatatgagaagccatatttttacataggagtcagatacaaaaagaaaaatcactgaatgcttttagatattgaatacgttttcaggaaaatgctaaatctgatagattacgaaatatatttttagaacttgtttagaaaggattcagttaaccaaacaagaaaaaggcagtgcctcacaaagaaattaagaagttgtccgtcccacgttacatcaaattcagttttatataggccatatataatatatatttataatgtataatttttatgtatttttcaaaactacaaactggaatccaactataaagtgtttaagaatctacacagaatattcaaattatagaacatgttttttccctttgccccataatcagtatttgccaaattacatgcaattccttaaaaactaaatcacatttggtaaaaggcctacagctttgtacttacattgtgccaaaggctgaggaaatgttttctttcgtaattttatgtgtattgtaaaatgttctaccgtactttagtagtttgaagtttttcaagtgcataactatttttgaccagcagatggcgatacgcttcagtattttatgcaattttttttcacttctgaagggaaagtgtattataaaaaaagattttttttttttttataaaacatgctactcttaattttcatgttggtgatgaaattcccagtggtgtttcttaaggttctatcttgtgccatgatgaataaaaagttaagcaaag

SEQ ID NO: 2202 - protein, 771 aa, Homo sapiens
MSGRSVRLRSVPIQSLSELERARLQEVAFYQLQQDCDLSCQITIPKDGQKRKKSLRKKLDSLGKEKNKDKEFIPQAFGMPLSQVIANDRAYKLKQDLQRDEQKDASDFVASLLPFGNKRQNKELSSSNSSLSSTSETPNESTSPNTPEPAPRARRRGAMSVDSITDLDDNQSRLLEALQLSLPAEAQSKKEKARDKKLSLNPIYRQVPRLVDSCCQHLEKHGLQTVGIFRVGSSKKRVRQLREEFDRGIDVSLEEEHSVHDVAALLKEFLRDMPDPLLTRELYTAFINTLLLEPEEQLGTLQLLIYLLPPCNCDTLHRLLQFLSIVARHADDNISKDGQEVTGNKMTSLNLATIFGPNLLHKQKSSDKEFSVQSSARAEESTAIIAVVQKMIENYEALFMVPPDLQNEVLISLLETDPDVVDYLLRRKASQSSSPDMLQSEVSFSVGGRHSSTDSNKASSGDISPYDNNSPVLSERSLLAMQEDAAPGGSEKLYRVPGQFMLVGHLSSSKSRESSPGPRLGKDLSEEPFDIWGTWHSTLKSGSKDPGMTGSSGDIFESSSLRAGPCSLSQGNLSPNWPRWQGSPAELDSDTQGARRTQAAAPATEGRAHPAVSRACSTPHVQVAGKAERPTARSEQYLTLSGAHDLSESELDVAGLQSRATPQCQRPHGSGRDDKRPPPPYPGPGKPAAAAAWIQGPPEGVETPTDQGGQAAEREQQVTQKKLSSANSLPAGEQDSPRLGDAGWLDWQRERWQIWELLSTDNPDALPETLV

SEQ ID NO: 2203 - DNA, 5118 bp, Homo sapiens
ggctgggctgcgaatagcgtgttcctctccggcggaacacacacacccggccttggggctgtctcctgagctccctcctccacggagagcgctgagcgccgccgggaattccatcccaccgtgggcacgcagtctttggaggtcccgggcgcagcacgctcggtgtccccacactgcagcaagacagagaccccgcgggaaccttgagcttggaacaacccttgagcctctgcagtcggaagagtgggcgcagcagcccagcggaggccaggcgcgcaacctcgggcgccggggcaaggagagagtgcagggaggcgcagctcaggcgcccggctcaggagcgggaggaagttctcgcggcgccgggagcgcggtggacgcgccctgggcgcacgcccaggcagccttctccctggccctcgggactgtcctcgggccgcaaggaggagcttgctggagtcttagaggccatccagagccagcgagcaggagcgctgcgtctcccgcctcagctaggaagggggagtggcgctggcaggctggagctgggaacccagcgagcgcctgaccttcctcctcctcttcctgaccctcttcgcgtcttgggctccggaggaaggttctagcggctgcaggaggtccccagacccattttcctagaaggctggtgatggatctgctgctcctgccgccgccggggcacttggagcgcaccggcggcgcgtgagctgggctttgctctccactgccctgggcaaaccccgggccagccccgcctggcacctttgcctgagtccctttcggttcccgacccaaagccaccagcgtccagggagggaggaggaggtggtcctcaggtgcagccccgccgagatgtccgcgcagagcctgctccacagcgtcttctcctgttcctcgcccgcttcaagtagcgcggcctcggccaagggcttctccaagaggaagctgcgccagacccgcagcctggacccggccctgatcggcggctgcgggagcgacgaggcgggcgcggagggcagtgcgcggggagccacggcgggccgcctctactccccatcactcccagccgagagtctcggccctcgcttggcgtcctcttcccggggtccgccccccagggccaccaggctaccgcctcctggacctctttgctcgtccttctccacacccagcaccccgcaggagaagtcaccatccggcagctttcactttgactatgaggttcccctgggtcgcggcggcctcaagaagagcatggcctgggacctgccttctgtcctggccgggccagccagtagccgaagcgcttccagcatcctctgttcatccgggggaggccccaatggcatcttcgcttctcctaggaggtggctccagcagaggaagttccagtccccacccgacagtcgcgggcacccctacgtcgtgtggaaatccgagggtgatttcacctggaacagcatgtcaggccgcagtgtacggctgaggtcagtccccatccagagtctctcagagctggagagggcccggctgcaggaagtggctttttatcagttgcaacaggactgtgacctgagctgtcagatcaccattcccaaagatggacaaaagagaaagaaatctttaagaaagaaactggattcactaggaaaggagaaaaacaaagacaaagaattcatcccacaggcatttggaatgcccttatcccaagtcattgcgaatgacagggcctataaactcaagcaggacttgcagagggacgagcagaaagatgcatctgactttgtggcttccctcctcccatttggaaataaaagacaaaacaaagaactctcaagcagtaactcatctctcagctcaacctcagaaacaccgaatgagtcaacgtccccaaacaccccggaaccggctcctcgggctaggaggaggggtgccatgtcagtggattctatcaccgatcttgatgacaatcagtctcgactactagaagctttacaactttccttgcctgctgaggctcaaagtaaaaaggaaaaagccagagataagaaactcagtctgaatcctatttacagacaggtccctaggctggtggacagctgctgtcagcacctagaaaaacatggcctccagacagtggggatattccgagttggaagctcaaaaaagagagtgagacaattacgtgaggaatttgaccgtgggattgatgtctctctggaggaggagcacagtgttcatgatgtggcagccttgctgaaagagttcctgagggacatgccagacccccttctcaccagggagctgtacacagctttcatcaacactctcttgttggagccggaggaacagctgggcaccttgcagctcctcatataccttctacctccctgcaactgcgacaccctccaccgcctgctacagttcctctccatcgtggccaggcatgccgatgacaacatcagcaaagatgggcaagaggtcactgggaataaaatgacatctctaaacttagccaccatatttggacccaacctgctgcacaagcagaagtcatcagacaaagaattctcagttcagagttcagcccgggctgaggagagcacggccatcatcgctgttgtgcaaaagatgattgaaaattatgaagccctgttcatggttcccccagatctccagaacgaagtgctgatcagcctgttagagaccgatcctgatgtcgtggactatttactcagaagaaaggcttcccaatcatcaagccctgacatgctgcagtcggaagtttccttttccgtgggagggaggcattcatctacagactccaacaaggcctccagcggagacatctccccttatgacaacaactccccagtgctgtctgagcgctccctgctggctatgcaagaggacgcggccccggggggctcggagaagctttacagagtgccagggcagtttatgctggtgggccacttgtcgtcgtcaaagtcaagggaaagttctcctggaccaaggcttgggaaagatctgtcagaggagcctttcgatatctggggaacttggcattcaacattaaaaagcggatccaaagacccaggaatgacaggttcctctggagacatttttgaaagcagctccctaagagcggggccctgctccctttctcaagggaacctgtccccaaattggcctcggtggcaggggagccccgcagagctggacagcgacacgcagggggctcggaggactcaggccgcagcccccgcgacggagggcagggcccaccctgcggtgtcgcgcgcctgcagcacgccccacgtccaggtggcagggaaagccgagcggcccacggccaggtcggagcagtacttgaccctgagcggcgcccacgacctcagcgagagtgagctggatgtggccgggctgcagagccgggccacacctcagtgccaaagaccccatgggagtgggagggatgacaagcggcccccgcctccatacccgggcccagggaagcccgcggcagcggcagcctggatccaggggcccccggaaggcgtggagacacccacggaccagggaggccaagcagccgagcgagagcagcaggtcacgcagaaaaaactgagcagcgccaactccctgccagcgggcgagcaggacagtccgcgcctgggggacgctggctggctcgactggcagagagagcgctggcagatctgggagctcctgtcgaccgacaaccccgatgccctgcccgagacgctggtctgagcccgcacccagccgagccccccctgccccgagccccccgccctccagcccaggggggaccgtgggtggtggccactggcacacttagtgttcttctttcacacttctcaaaagtgacacaagagaaatccagttcacctacagaggtagagcactcacgcccccgccattgagaataaggttccattgcgtagccagccttaggaaaaacaaacagaacccaaaccagatggcaatgtccaatctaaaaacgtccctcttggctctataatataagatacaactcttgcttggtatagcctaaccgtatttatgtgtcttcggttttgactattgtgtattctgtaacagattatgtataatcatatatgatatattcacaaagagaaaacaaaaggaacttttaaaaaaaaaatcacttcacttatattaagcaatgagatatactaaacaatgagattctatagaatgttctagaatgtgcacaagcgggtttctgtgcttttgccatagctttataactggggataacccttccttcgataccaaacactaacaagaggaagcagaatatgagaagccatatttttacataggagtcagatacaaaaagaaaaatcactgaatgcttttagatattgaatacgttttcaggaaaatgctaaatctgatagattacgaaatatatttttagaacttgtttagaaaggattcagttaaccaaacaagaaaaaggcagtgcctcacaaagaaattaagaagttgtccgtcccacgttacatcaaattcagttttatataggccatatataatatatatttataatgtataatttttatgtatttttcaaaactacaaactggaatccaactataaagtgtttaagaatctacacagaatattcaaattatagaacatgttttttccctttgccccataatcagtatttgccaaattacatgcaattccttaaaaactaaatcacatttggtaaaaggcctacagctttgtacttacattgtgccaaaggctgaggaaatgttttctttcgtaattttatgtgtattgtaaaatgttctaccgtactttagtagtttgaagtttttcaagtgcataactatttttgaccagcagatggcgatacgcttcagtattttatgcaattttttttcacttctgaagggaaagtgtattataaaaaaagattttttttttttttataaaacatgctactcttaattttcatgttggtgatgaaattcccagtggtgtttcttaaggttctatcttgtgccatgatgaataaaaagttaagcaaag

SEQ ID NO: 2204 - protein, 974 aa, Homo sapiens
MSAQSLLHSVFSCSSPASSSAASAKGFSKRKLRQTRSLDPALIGGCGSDEAGAEGSARGATAGRLYSPSLPAESLGPRLASSSRGPPPRATRLPPPGPLCSSFSTPSTPQEKSPSGSFHFDYEVPLGRGGLKKSMAWDLPSVLAGPASSRSASSILCSSGGGPNGIFASPRRWLQQRKFQSPPDSRGHPYVVWKSEGDFTWNSMSGRSVRLRSVPIQSLSELERARLQEVAFYQLQQDCDLSCQITIPKDGQKRKKSLRKKLDSLGKEKNKDKEFIPQAFGMPLSQVIANDRAYKLKQDLQRDEQKDASDFVASLLPFGNKRQNKELSSSNSSLSSTSETPNESTSPNTPEPAPRARRRGAMSVDSITDLDDNQSRLLEALQLSLPAEAQSKKEKARDKKLSLNPIYRQVPRLVDSCCQHLEKHGLQTVGIFRVGSSKKRVRQLREEFDRGIDVSLEEEHSVHDVAALLKEFLRDMPDPLLTRELYTAFINTLLLEPEEQLGTLQLLIYLLPPCNCDTLHRLLQFLSIVARHADDNISKDGQEVTGNKMTSLNLATIFGPNLLHKQKSSDKEFSVQSSARAEESTAIIAVVQKMIENYEALFMVPPDLQNEVLISLLETDPDVVDYLLRRKASQSSSPDMLQSEVSFSVGGRHSSTDSNKASSGDISPYDNNSPVLSERSLLAMQEDAAPGGSEKLYRVPGQFMLVGHLSSSKSRESSPGPRLGKDLSEEPFDIWGTWHSTLKSGSKDPGMTGSSGDIFESSSLRAGPCSLSQGNLSPNWPRWQGSPAELDSDTQGARRTQAAAPATEGRAHPAVSRACSTPHVQVAGKAERPTARSEQYLTLSGAHDLSESELDVAGLQSRATPQCQRPHGSGRDDKRPPPPYPGPGKPAAAAAWIQGPPEGVETPTDQGGQAAEREQQVTQKKLSSANSLPAGEQDSPRLGDAGWLDWQRERWQIWELLSTDNPDALPETLV

SEQ ID NO: 2205 - DNA, 1288 bp, Homo sapiens
atggatttcatctttcatgagaaacaggaaggtttcctgtgtgctcagcactgtctgaacaatctattgcaaggagaatattttagccctgtggaattagcctcaattgcacatcagctagatgaagaagagaggatgagaatggcagaaggaggagtcaccagtgaagagtatcttgcatttttacagcagccttcagaaaacatggatgataccggtttcttctccattcaggtaataagcaatgccttgaagttctggggtttagagatcatccatttcaataatcctgaatatcagaagctcggcattgatcctataaatgaaagatcttttatatgtaattataaacaacactggtttactattagaaaatttggaaaacactggtttaacttgaattctctcttggcgggtccagaattaatatcagatacatgccttgcaaatttcttggctcgattacaacaacaagcatattctgtatttgttgtcaagggtgatctgccagactgtgaagctgaccaactcctgcagatcatcagtgtcgaagagatggatacaccaaaacttaatggaaaaaaattagtaaaacaaaaagagcatagagtctataaaacagtccttgaaaaagtatcagaagaaagtgatgagtctggaacatcagaccaagatgaggaggattttcagagggcccttgaactaagccgccaagaaaccaatagagaagatgaacatctccgcagtactattgagttaagcatgcaaggtagttccggaaacacatcgcaagatcttccaaagacatcatgtgtaactcctgcttcagaacagccgaagaaaataaaagaagactattttgaaaagcatcagcaggaacagaagcagcagcaacaacagtcagatctgccgggccacagttcatacctacacgaaaggccaacaacaagttcgagagcaattgagagtgatctcagtgatgacatcagtgaaggcacagtacaggccgctgtcgacaccattttagaaattatgagaaagaatttgaaaatcaaaggggaaaaataatgcctttaaaaataatttagatagtcatactttccaacattatcctgtgtgattatactgtaggatccattttggtcatctgtcaaagagatgaggaaataaggcttttagacagtttgcaaacaaaatgacgagagagatgtgggactaaataatgatcgttcaactactagccaaggagacattcagcaattaattaaatttaaattagctttcaaaa

SEQ ID NO: 2206 - protein, 355 aa, Homo sapiens
MDFIFHEKQEGFLCAQHCLNNLLQGEYFSPVELASIAHQLDEEERMRMAEGGVTSEEYLAFLQQPSENMDDTGFFSIQVISNALKFWGLEIIHFNNPEYQKLGIDPINERSFICNYKQHWFTIRKFGKHWFNLNSLLAGPELISDTCLANFLARLQQQAYSVFVVKGDLPDCEADQLLQIISVEEMDTPKLNGKKLVKQKEHRVYKTVLEKVSEESDESGTSDQDEEDFQRALELSRQETNREDEHLRSTIELSMQGSSGNTSQDLPKTSCVTPASEQPKKIKEDYFEKHQQEQKQQQQQSDLPGHSSYLHERPTTSSRAIESDLSDDISEGTVQAAVDTILEIMRKNLKIKGEK

SEQ ID NO: 2207 - DNA, 2873 bp, Homo sapiens
tgaagattacaaatgagactgggaaaccctcttcaataagacctgtgtgatgatagattgtgtcctgagcccgcaggtcaggctgaaagagtcaacaaccagcaaagtgaagatctaggagtctgttccccttgaacctgtgtggacctgatcaaacctcgagggaaaggctgggagaacacatccctggtcagctgtaggaaagccagagagcatttgagaagaggctgaagcttgaattttgcaaacacacaagccctctgcatttccccagagagaaggtttttttctcgtcttcatttcctttgaaacacctggggtgaggaaaaacctctacattggccaagcagaagaaacagaatctatgactgaagaggatcggctaagagtggttcctcgcagcttaaagggaggcacttttcacactctgtcttaaaatcagaagttgaattcatgaacacatatgatttagatagaagtcatgggatgcagcagttcttcaacgaaaaccaggagatctgacacatcactgagagctgcgttgatcatccagaactggtaccgaggttacaaagctcgactgaaggccagacaacactatgccctcaccatcttccagtccatcgaatatgctgatgaacaaggccaaatgcagttatccaccttcttttccttcatgttggaaaactacacacatatacataaggaagagctagaattaagaaatcagtctcttgaaagcgaacaggacatgagggatagatgggattatgtggactcgatagatgtcccagactcctataatggtcctcggctacaatttcctctcacttgtacggatattgatttacttcttgaggccttcaaggaacaacagatacttcatgcccattatgtcttagaggtgctatttgaaaccaagaaagtcctgaagcaaatgccgaatttcactcacatacaaacttctccctccaaagaggtaacaatctgtggtgatttgcatgggaaactggatgatctttttttgatcttctacaagaatggtctcccctcagagaggaacccgtatgtttttaatggtgactttgtagatcgaggaaagaattccatagagatcctaatgatcctgtgtgtgagttttcttgtctaccccaatgacctgcacttgaacagagggaaccacgaagattttatgatgaatctgaggtatggcttcacgaaagaaattttgcataaatataagctacatggaaaaagaatcttacaaatcttggaagaattctatgcctggctcccaatcggtacaatcgttgacaatgaaatcctggtcatccatggtgggatatcagagaccacagacttgaatttactccaccgtgtagagaggaacaagatgaaatctgtgctgataccaccaacggaaacaaacagagaccatgacactgactcgaagcacaataaagtaggtgtgacttttaatgcacatggaagaatcaaaacaaatggatctcctactgaacacttaacagagcatgaatgggaacagattattgatattctgtggagtgatcccagaggcaaaaatggctgttttccaaatacgtgccgaggagggggctgctattttggaccagatgttacttccaagattcttaataaataccagttgaagatgctcatcaggtctcatgaatgtaagcccgaagggtatgaaatctgtcatgatgggaaggtggtgactatattttctgcttctaattattatgaagaaggcagcaatcgaggagcttacatcaaactatgttctggtacaactcctcgatttttccagtaccaagtaactaaagcaacgtgctttcagcctcttcgccaaagagtggatactatggaaaacagcgccatcaagatattaagagagagagtgatttcacgaaaaagtgaccttactcgtgctttccaacttcaagaccacagaaaatcaggaaaactttctgtgagccagtgggctttttgcatggagaacattttggggctgaacttaccatggagatccctcagttcgaatctggtaaacatagaccaaaatggaaacgttgaatacatgtccagcttccagaatatccgcattgaaaaacctgtacaagaggctcattctactctagttgaaactctgtacagatacagatctgacctggaaatcatatttaatgccattgacactgatcactcaggcctgatctccgtggaagaatttcgtgccatgtggaaactttttagttctcactacaatgttcacattgatgattcccaagtcaataagcttgccaacataatggacttgaacaaagatggaagcattgactttaatgagtttttaaaggctttctatgtagtgcatagatatgaagacttgatgaaacctgatgtcaccaaccttggctaaacacaaatgagagcttccctcaggctccctgaaacagctaggcccaaatcacaagtacagtcctttccaacacccctgaaattcatagtcagtagcagagaaaagcagatcccaattcatcccacaaacagatgcatagtatgggttttggaagtccctagcaagctgttattggtaagattaggttaaatgtcagtaataggatttggtttcagcattagtacctacatattgccagtgagaaactgggttggacctagtggtgttgtcgtgagtgccacctaaccaggaggccagagcggtttgaaaacatcctgaaaggaactcatacagcacaagagaaaactactaagcttgacatctgtgagtgactgagggagacaggaggaataccaggttattcatggaataaagtctttccatctttaaa

SEQ ID NO: 2208 - protein, 653 aa, Homo sapiens
MGCSSSSTKTRRSDTSLRAALIIQNWYRGYKARLKARQHYALTIFQSIEYADEQGQMQLSTFFSFMLENYTHIHKEELELRNQSLESEQDMRDRWDYVDSIDVPDSYNGPRLQFPLTCTDIDLLLEAFKEQQILHAHYVLEVLFETKKVLKQMPNFTHIQTSPSKEVTICGDLHGKLDDLFLIFYKNGLPSERNPYVFNGDFVDRGKNSIEILMILCVSFLVYPNDLHLNRGNHEDFMMNLRYGFTKEILHKYKLHGKRILQILEEFYAWLPIGTIVDNEILVIHGGISETTDLNLLHRVERNKMKSVLIPPTETNRDHDTDSKHNKVGVTFNAHGRIKTNGSPTEHLTEHEWEQIIDILWSDPRGKNGCFPNTCRGGGCYFGPDVTSKILNKYQLKMLIRSHECKPEGYEICHDGKVVTIFSASNYYEEGSNRGAYIKLCSGTTPRFFQYQVTKATCFQPLRQRVDTMENSAIKILRERVISRKSDLTRAFQLQDHRKSGKLSVSQWAFCMENILGLNLPWRSLSSNLVNIDQNGNVEYMSSFQNIRIEKPVQEAHSTLVETLYRYRSDLEIIFNAIDTDHSGLISVEEFRAMWKLFSSHYNVHIDDSQVNKLANIMDLNKDGSIDFNEFLKAFYVVHRYEDLMKPDVTNLG

SEQ ID NO: 2209 - DNA, 2789 bp, Homo sapiens
tgaagattacaaatgagactgggaaaccctcttcaataagacctgtgtgatgatagattgtgtcctgagcccgcaggtcaggctgaaagagtcaacaaccagcaaagtgaagatctaggagtctgttccccttgaacctgtgtggacctgatcaaacctcgagggaaaggctgggagaacacatccctggtcagctgtaggaaagccagagagcatttgagaagaggctgaagcttgaattttgcaaacacacaagccctctgcatttccccagagagaaggtttttttctcgtcttcatttcctttgaaacacctggggtgaggaaaaacctctacattggccaagcagaagaaacagaatctatgactgaagaggatcggctaagagtggttcctcgcagcttaaagggaggcacttttcacactctgtcttaaaatcagaagttgaattcatgaacacatatgatttagatagaagtcatgggatgcagcagttcttcaacgaaaaccaggagatctgacacatcactgagagctgcgttgatcatccagaactggtaccgaggttacaaagctcgactgaaggccagacaacactatgccctcaccatcttccagtccatcgaatatgctgatgaacaaggccaaatgcagttatccaccttcttttccttcatgttggaaaactacacacatatacataaggaagagctagaattaagaaatcagtctcttgaaagcgaacaggacatgagggatagatgggattatgtggactcgatagatgtcccagactcctataatggtcctcggctacaatttcctctcacttgtacggatattgatttacttcttgaggccttcaaggaacaacagatacttcatgcccattatgtcttagaggtgctatttgaaaccaagaaagtcctgaagcaaatgccgaatttcactcacatacaaacttctccctccaaagaggtaacaatctgtggtgatttgcatgggaaactggatgatctttttttgatcttctacaagaatggtctcccctcagagaggaacccgtatgtttttaatggtgactttgtagatcgaggaaagaattccatagagatcctaatgatcctgtgtgtgagttttcttgtctaccccaatgacctgcacttgaacagagggaaccacgaagattttatgatgaatctgaggtatggcttcacgaaagaaattttgcataaatataagctacatggaaaaagaatcttacaaatcttggaagaattctatgcctggctcccaatcggtacaatcgttgacaatgaaatcctggtcatccatggtgggatatcagagaccacagacttgaatttactccaccgtgtagagaggaacaagatgaaatctgtgctgataccaccaacggaaacaaacagagaccatgacactgactcgaagcacaataaaattattgatattctgtggagtgatcccagaggcaaaaatggctgttttccaaatacgtgccgaggagggggctgctattttggaccagatgttacttccaagattcttaataaataccagttgaagatgctcatcaggtctcatgaatgtaagcccgaagggtatgaaatctgtcatgatgggaaggtggtgactatattttctgcttctaattattatgaagaaggcagcaatcgaggagcttacatcaaactatgttctggtacaactcctcgatttttccagtaccaagtaactaaagcaacgtgctttcagcctcttcgccaaagagtggatactatggaaaacagcgccatcaagatattaagagagagagtgatttcacgaaaaagtgaccttactcgtgctttccaacttcaagaccacagaaaatcaggaaaactttctgtgagccagtgggctttttgcatggagaacattttggggctgaacttaccatggagatccctcagttcgaatctggtaaacatagaccaaaatggaaacgttgaatacatgtccagcttccagaatatccgcattgaaaaacctgtacaagaggctcattctactctagttgaaactctgtacagatacagatctgacctggaaatcatatttaatgccattgacactgatcactcaggcctgatctccgtggaagaatttcgtgccatgtggaaactttttagttctcactacaatgttcacattgatgattcccaagtcaataagcttgccaacataatggacttgaacaaagatggaagcattgactttaatgagtttttaaaggctttctatgtagtgcatagatatgaagacttgatgaaacctgatgtcaccaaccttggctaaacacaaatgagagcttccctcaggctccctgaaacagctaggcccaaatcacaagtacagtcctttccaacacccctgaaattcatagtcagtagcagagaaaagcagatcccaattcatcccacaaacagatgcatagtatgggttttggaagtccctagcaagctgttattggtaagattaggttaaatgtcagtaataggatttggtttcagcattagtacctacatattgccagtgagaaactgggttggacctagtggtgttgtcgtgagtgccacctaaccaggaggccagagcggtttgaaaacatcctgaaaggaactcatacagcacaagagaaaactactaagcttgacatctgtgagtgactgagggagacaggaggaataccaggttattcatggaataaagtctttccatctttaaa

SEQ ID NO: 2210 - protein, 625 aa, Homo sapiens
MGCSSSSTKTRRSDTSLRAALIIQNWYRGYKARLKARQHYALTIFQSIEYADEQGQMQLSTFFSFMLENYTHIHKEELELRNQSLESEQDMRDRWDYVDSIDVPDSYNGPRLQFPLTCTDIDLLLEAFKEQQILHAHYVLEVLFETKKVLKQMPNFTHIQTSPSKEVTICGDLHGKLDDLFLIFYKNGLPSERNPYVFNGDFVDRGKNSIEILMILCVSFLVYPNDLHLNRGNHEDFMMNLRYGFTKEILHKYKLHGKRILQILEEFYAWLPIGTIVDNEILVIHGGISETTDLNLLHRVERNKMKSVLIPPTETNRDHDTDSKHNKIIDILWSDPRGKNGCFPNTCRGGGCYFGPDVTSKILNKYQLKMLIRSHECKPEGYEICHDGKVVTIFSASNYYEEGSNRGAYIKLCSGTTPRFFQYQVTKATCFQPLRQRVDTMENSAIKILRERVISRKSDLTRAFQLQDHRKSGKLSVSQWAFCMENILGLNLPWRSLSSNLVNIDQNGNVEYMSSFQNIRIEKPVQEAHSTLVETLYRYRSDLEIIFNAIDTDHSGLISVEEFRAMWKLFSSHYNVHIDDSQVNKLANIMDLNKDGSIDFNEFLKAFYVVHRYEDLMKPDVTNLG

SEQ ID NO: 2211 - DNA, 2687 bp, Homo sapiens
tgaagattacaaatgagactgggaaaccctcttcaataagacctgtgtgatgatagattgtgtcctgagcccgcaggtcaggctgaaagagtcaacaaccagcaaagtgaagatctaggagtctgttccccttgaacctgtgtggacctgatcaaacctcgagggaaaggctgggagaacacatccctggtcagctgtaggaaagccagagagcatttgagaagaggctgaagcttgaattttgcaaacacacaagccctctgcatttccccagagagaaggtttttttctcgtcttcatttcctttgaaacacctggggtgaggaaaaacctctacattggccaagcagaagaaacagaatctatgactgaagaggatcggctaagagtggttcctcgcagcttaaagggaggcacttttcacactctgtcttaaaatcagaagttgaattcatgaacacatatgatttagatagaagtcatgggatgcagcagttcttcaacgaaaaccaggagatctgacacatcactgagagctgcgttgatcatccagaactggtaccgaggttacaaagctcgactgaaggccagacaacactatgccctcaccatcttccagtccatcgaatatgctgatgaacaaggccaaatgcagttatccaccttcttttccttcatgttggaaaactacacacatatacataaggaagagctagaattaagaaatcagtctcttgaaagcgaacaggacatgagggatagatgggattatgtggactcgatagatgtcccagactcctataatggtcctcggctacaatttcctctcacttgtacggatattgatttacttcttgaggccttcaaggaacaacagatacttcatgcccattatgtcttagaggtgctatttgaaaccaagaaagtcctgaagcaaatgccgaatttcactcacatacaaacttctccctccaaagaggtaacaatctgtggtgatttgcatgggaaactggatgatctttttttgatcttctacaagaatggtctcccctcagagaggaacccgtatgtttttaatggtgactttgtagatcgaggaaagaattccatagagatcctaatgatcctgtgtgtgagttttcttgtctaccccaatgacctgcacttgaacagagggaaccacgaagattttatgatgaatctgaggtatggcttcacgaaagaaattttgcataaatataagctacatggaaaaagaatcttacaaatcttggaagaattctatgcctggctcccaatcggtacaatcgttgacaatgaaatcctggtcatccatggtgggatatcagagaccacagacttgaatttactccaccgtgtagagaggaacaagatgaaatctgtgctgataccaccaacggaaacaaacagagaccatgacactgactcgaagcacaataaagtaggtgtgacttttaatgcacatggaagaatcaaaacaaatggatctcctactgaacacttaacagagcatgaatgggaacaggtggtgactatattttctgcttctaattattatgaagaaggcagcaatcgaggagcttacatcaaactatgttctggtacaactcctcgatttttccagtaccaagtaactaaagcaacgtgctttcagcctcttcgccaaagagtggatactatggaaaacagcgccatcaagatattaagagagagagtgatttcacgaaaaagtgaccttactcgtgctttccaacttcaagaccacagaaaatcaggaaaactttctgtgagccagtgggctttttgcatggagaacattttggggctgaacttaccatggagatccctcagttcgaatctggtaaacatagaccaaaatggaaacgttgaatacatgtccagcttccagaatatccgcattgaaaaacctgtacaagaggctcattctactctagttgaaactctgtacagatacagatctgacctggaaatcatatttaatgccattgacactgatcactcaggcctgatctccgtggaagaatttcgtgccatgtggaaactttttagttctcactacaatgttcacattgatgattcccaagtcaataagcttgccaacataatggacttgaacaaagatggaagcattgactttaatgagtttttaaaggctttctatgtagtgcatagatatgaagacttgatgaaacctgatgtcaccaaccttggctaaacacaaatgagagcttccctcaggctccctgaaacagctaggcccaaatcacaagtacagtcctttccaacacccctgaaattcatagtcagtagcagagaaaagcagatcccaattcatcccacaaacagatgcatagtatgggttttggaagtccctagcaagctgttattggtaagattaggttaaatgtcagtaataggatttggtttcagcattagtacctacatattgccagtgagaaactgggttggacctagtggtgttgtcgtgagtgccacctaaccaggaggccagagcggtttgaaaacatcctgaaaggaactcatacagcacaagagaaaactactaagcttgacatctgtgagtgactgagggagacaggaggaataccaggttattcatggaataaagtctttccatctttaaa

SEQ ID NO: 2212 - protein, 591 aa, Homo sapiens
MGCSSSSTKTRRSDTSLRAALIIQNWYRGYKARLKARQHYALTIFQSIEYADEQGQMQLSTFFSFMLENYTHIHKEELELRNQSLESEQDMRDRWDYVDSIDVPDSYNGPRLQFPLTCTDIDLLLEAFKEQQILHAHYVLEVLFETKKVLKQMPNFTHIQTSPSKEVTICGDLHGKLDDLFLIFYKNGLPSERNPYVFNGDFVDRGKNSIEILMILCVSFLVYPNDLHLNRGNHEDFMMNLRYGFTKEILHKYKLHGKRILQILEEFYAWLPIGTIVDNEILVIHGGISETTDLNLLHRVERNKMKSVLIPPTETNRDHDTDSKHNKVGVTFNAHGRIKTNGSPTEHLTEHEWEQVVTIFSASNYYEEGSNRGAYIKLCSGTTPRFFQYQVTKATCFQPLRQRVDTMENSAIKILRERVISRKSDLTRAFQLQDHRKSGKLSVSQWAFCMENILGLNLPWRSLSSNLVNIDQNGNVEYMSSFQNIRIEKPVQEAHSTLVETLYRYRSDLEIIFNAIDTDHSGLISVEEFRAMWKLFSSHYNVHIDDSQVNKLANIMDLNKDGSIDFNEFLKAFYVVHRYEDLMKPDVTNLG

SEQ ID NO: 2213 - DNA, 14069 bp, Homo sapiens
cgttaaatgcaaacgctgctctggctcatgtgtttgctccgaggtataggttttgttcgactgacgtatcagatagtcagagtggttaccacaccgacgttgtagcagctgcataataaatgactgaaagaatcatgttaggcatgcccacctaacctaacttgaatcatgcgaaaggggagctgttggaattcaaatagactttctggttcccagcagtcggcagtaatagaatgctttcaggaagatgacagaatcaggagaaagatgctgttttgcactatcttgatttgttacagcagccaacttattggcatgatggagtgacaggaaaaacagctggcatggaagatgaaagagaagatgttcaaaagaaaacattcacaaaatgggtaaatgcacaattttctaagtttgggaagcagcatattgagaacctcttcagtgacctacaggatgggaggcgcctcctagacctcctcgaaggcctgacagggcaaaaactgccaaaagaaaaaggatccacaagagttcatgccctgaacaatgtcaacaaggcactgcgggttttgcagaacaataatgttgatttagtgaatattggaagtactgacatcgtagatggaaatcataaactgactcttggtttgatttggaatataatcctccactggcaggtcaaaaatgtaatgaaaaatatcatggctggattgcaacaaaccaacagtgaaaagattctcctgagctgggtccgacaatcaactcgtaattatccacaggttaatgtaatcaacttcaccaccagctggtctgatggcctggctttgaatgctctcatccatagtcataggccagacctatttgactggaatagtgtggtttgccagcagtcagccacacaacgactggaacatgcattcaacatcgccagatatcaattaggcatagagaaactactcgatcctgaagatgttgataccacctatccagataagaagtccatcttaatgtacatcacatcactcttccaagttttgcctcaacaagtgagcattgaagccatccaggaagtggaaatgttgccaaggccacctaaagtgactaaagaagaacattttcagttacatcatcaaatgcactattctcaacagatcacggtcagtctagcacagggatatgagagaacttcttcccctaagcctcgattcaagagctatgcctacacacaggctgcttatgtcaccacctctgaccctacacggagcccatttccttcacagcatttggaagctcctgaagacaagtcatttggcagttcattgatggagagtgaagtaaacctggaccgttatcaaacagctttagaagaagtattatcgtggcttctttctgctgaggacacattgcaagcacaaggagagatttctaatgatgtggaagtggtgaaagaccagtttcatactcatgaggggtacatgatggatttgacagcccatcagggccgggttggtaatattctacaattgggaagtaagctgattggaacaggaaaattatcagaagatgaagaaactgaagtacaagagcagatgaatctcctaaattcaagatgggaatgcctcagggtagctagcatggaaaaacaaagcaatttacatagagttttaatggatctccagaatcagaaactgaaagagttgaatgactggctaacaaaaacagaagaaagaacaaggaaaatggaggaagagcctcttggacctgatcttgaagacctaaaacgccaagtacaacaacataaggtgcttcaagaagatctagaacaagaacaagtcagggtcaattctctcactcacatggtggtggtagttgatgaatctagtggagatcacgcaactgctgctttggaagaacaacttaaggtattgggagatcgatgggcaaacatctgtagatggacagaagaccgctgggttcttttacaagacatccttctcaaatggcaacgtcttactgaagaacagtgcctttttagtgcatggctttcagaaaaagaagatgcagtgaacaagattcacacaactggctttaaagatcaaaatgaaatgttatcaagtcttcaaaaactggccgttttaaaagcggatctagaaaagaaaaagcaatccatgggcaaactgtattcactcaaacaagatcttctttcaacactgaagaataagtcagtgacccagaagacggaagcatggctggataactttgcccggtgttgggataatttagtccaaaaacttgaaaagagtacagcacagatttcacaggctgtcaccaccactcagccatcactaacacagacaactgtaatggaaacagtaactacggtgaccacaagggaacagatcctggtaaagcatgctcaagaggaacttccaccaccacctccccaaaagaagaggcagattactgtggattctgaaattaggaaaaggttggatgttgatataactgaacttcacagctggattactcgctcagaagctgtgttgcagagtcctgaatttgcaatctttcggaaggaaggcaacttctcagacttaaaagaaaaagtcaatgccatagagcgagaaaaagctgagaagttcagaaaactgcaagatgccagcagatcagctcaggccctggtggaacagatggtgaatgagggtgttaatgcagatagcatcaaacaagcctcagaacaactgaacagccggtggatcgaattctgccagttgctaagtgagagacttaactggctggagtatcagaacaacatcatcgctttctataatcagctacaacaattggagcagatgacaactactgctgaaaactggttgaaaatccaacccaccaccccatcagagccaacagcaattaaaagtcagttaaaaatttgtaaggatgaagtcaaccggctatcaggtcttcaacctcaaattgaacgattaaaaattcaaagcatagccctgaaagagaaaggacaaggacccatgttcctggatgcagactttgtggcctttacaaatcattttaagcaagtcttttctgatgtgcaggccagagagaaagagctacagacaatttttgacactttgccaccaatgcgctatcaggagaccatgagtgccatcaggacatgggtccagcagtcagaaaccaaactctccatacctcaacttagtgtcaccgactatgaaatcatggagcagagactcggggaattgcaggctttacaaagttctctgcaagagcaacaaagtggcctatactatctcagcaccactgtgaaagagatgtcgaagaaagcgccctctgaaattagccggaaatatcaatcagaatttgaagaaattgagggacgctggaagaagctctcctcccagctggttgagcattgtcaaaagctagaggagcaaatgaataaactccgaaaaattcagaatcacatacaaaccctgaagaaatggatggctgaagttgatgtttttctgaaggaggaatggcctgcccttggggattcagaaattctaaaaaagcagctgaaacagtgcagacttttagtcagtgatattcagacaattcagcccagtctaaacagtgtcaatgaaggtgggcagaagataaagaatgaagcagagccagagtttgcttcgagacttgagacagaactcaaagaacttaacactcagtgggatcacatgtgccaacaggtctatgccagaaaggaggccttgaagggaggtttggagaaaactgtaagcctccagaaagatctatcagagatgcacgaatggatgacacaagctgaagaagagtatcttgagagagattttgaatataaaactccagatgaattacagaaagcagttgaagagatgaagagagctaaagaagaggcccaacaaaaagaagcgaaagtgaaactccttactgagtctgtaaatagtgtcatagctcaagctccacctgtagcacaagaggccttaaaaaaggaacttgaaactctaaccaccaactaccagtggctctgcactaggctgaatgggaaatgcaagactttggaagaagtttgggcatgttggcatgagttattgtcatacttggagaaagcaaacaagtggctaaatgaagtagaatttaaacttaaaaccactgaaaacattcctggcggagctgaggaaatctctgaggtgctagattcacttgaaaatttgatgcgacattcagaggataacccaaatcagattcgcatattggcacagaccctaacagatggcggagtcatggatgagctaatcaatgaggaacttgagacatttaattctcgttggagggaactacatgaagaggctgtaaggaggcaaaagttgcttgaacagagcatccagtctgcccaggagactgaaaaatccttacacttaatccaggagtccctcacattcattgacaagcagttggcagcttatattgcagacaaggtggacgcagctcaaatgcctcaggaagcccagaaaatccaatctgatttgacaagtcatgagatcagtttagaagaaatgaagaaacataatcaggggaaggaggctgcccaaagagtcctgtctcagattgatgttgcacagaaaaaattacaagatgtctccatgaagtttcgattattccagaaaccagccaattttgagcagcgtctacaagaaagtaagatgattttagatgaagtgaagatgcacttgcctgcattggaaacaaagagtgtggaacaggaagtagtacagtcacagctaaatcattgtgtgaacttgtataaaagtctgagtgaagtgaagtctgaagtggaaatggtgataaagactggacgtcagattgtacagaaaaagcagacggaaaatcccaaagaacttgatgaaagagtaacagctttgaaattgcattataatgagctgggagcaaaggtaacagaaagaaagcaacagttggagaaatgcttgaaattgtcccgtaagatgcgaaaggaaatgaatgtcttgacagaatggctggcagctacagatatggaattgacaaagagatcagcagttgaaggaatgcctagtaatttggattctgaagttgcctggggaaaggctactcaaaaagagattgagaaacagaaggtgcacctgaagagtatcacagaggtaggagaggccttgaaaacagttttgggcaagaaggagacgttggtggaagataaactcagtcttctgaatagtaactggatagctgtcacctcccgagcagaagagtggttaaatcttttgttggaataccagaaacacatggaaacttttgaccagaatgtggaccacatcacaaagtggatcattcaggctgacacacttttggatgaatcagagaaaaagaaaccccagcaaaaagaagacgtgcttaagcgtttaaaggcagaactgaatgacatacgcccaaaggtggactctacacgtgaccaagcagcaaacttgatggcaaaccgcggtgaccactgcaggaaattagtagagccccaaatctcagagctcaaccatcgatttgcagccatttcacacagaattaagactggaaaggcctccattcctttgaaggaattggagcagtttaactcagatatacaaaaattgcttgaaccactggaggctgaaattcagcagggggtgaatctgaaagaggaagacttcaataaagatatgaatgaagacaatgagggtactgtaaaagaattgttgcaaagaggagacaacttacaacaaagaatcacagatgagagaaagcgagaggaaataaagataaaacagcagctgttacagacaaaacataatgctctcaaggatttgaggtctcaaagaagaaaaaaggctctagaaatttctcatcagtggtatcagtacaagaggcaggctgatgatctcctgaaatgcttggatgacattgaaaaaaaattagccagcctacctgagcccagagatgaaaggaaaataaaggaaattgatcgggaattgcagaagaagaaagaggagctgaatgcagtgcgtaggcaagctgagggcttgtctgaggatggggccgcaatggcagtggagccaactcagatccagctcagcaagcgctggcgggaaattgagagcaaatttgctcagtttcgaagactcaactttgcacaaattcacactgtccgtgaagaaacgatgatggtgatgactgaagacatgcctttggaaatttcttatgtgccttctacttatttgactgaaatcactcatgtctcacaagccctattagaagtggaacaacttctcaatgctcctgacctctgtgctaaggactttgaagatctctttaagcaagaggagtctctgaagaatataaaagatagtctacaacaaagctcaggtcggattgacattattcatagcaagaagacagcagcattgcaaagtgcaacgcctgtggaaagggtgaagctacaggaagctctctcccagcttgatttccaatgggaaaaagttaacaaaatgtacaaggaccgacaagggcgatttgacagatctgttgagaaatggcggcgttttcattatgatataaagatatttaatcagtggctaacagaagctgaacagtttctcagaaagacacaaattcctgagaattgggaacatgctaaatacaaatggtatcttaaggaactccaggatggcattgggcagcggcaaactgttgtcagaacattgaatgcaactggggaagaaataattcagcaatcctcaaaaacagatgccagtattctacaggaaaaattgggaagcctgaatctgcggtggcaggaggtctgcaaacagctgtcagacagaaaaaagaggctagaagaacaaaagaatatcttgtcagaatttcaaagagatttaaatgaatttgttttatggttggaggaagcagataacattgctagtatcccacttgaacctggaaaagagcagcaactaaaagaaaagcttgagcaagtcaagttactggtggaagagttgcccctgcgccagggaattctcaaacaattaaatgaaactggaggacccgtgcttgtaagtgctcccataagcccagaagagcaagataaacttgaaaataagctcaagcagacaaatctccagtggataaaggtttccagagctttacctgagaaacaaggagaaattgaagctcaaataaaagaccttgggcagcttgaaaaaaagcttgaagaccttgaagagcagttaaatcatctgctgctgtggttatctcctattaggaatcagttggaaatttataaccaaccaaaccaagaaggaccatttgacgttcaggaaactgaaatagcagttcaagctaaacaaccggatgtggaagagattttgtctaaagggcagcatttgtacaaggaaaaaccagccactcagccagtgaagaggaagttagaagatctgagctctgagtggaaggcggtaaaccgtttacttcaagagctgagggcaaagcagcctgacctagctcctggactgaccactattggagcctctcctactcagactgttactctggtgacacaacctgtggttactaaggaaactgccatctccaaactagaaatgccatcttccttgatgttggaggtacctgctctggcagatttcaaccgggcttggacagaacttaccgactggctttctctgcttgatcaagttataaaatcacagagggtgatggtgggtgaccttgaggatatcaacgagatgatcatcaagcagaaggcaacaatgcaggatttggaacagaggcgtccccagttggaagaactcattaccgctgcccaaaatttgaaaaacaagaccagcaatcaagaggctagaacaatcattacggatcgaattgaaagaattcagaatcagtgggatgaagtacaagaacaccttcagaaccggaggcaacagttgaatgaaatgttaaaggattcaacacaatggctggaagctaaggaagaagctgagcaggtcttaggacaggccagagccaagcttgagtcatggaaggagggtccctatacagtagatgcaatccaaaagaaaatcacagaaaccaagcagttggccaaagacctccgccagtggcagacaaatgtagatgtggcaaatgacttggccctgaaacttctccgggattattctgcagatgataccagaaaagtccacatgataacagagaatatcaatgcctcttggagaagcattcataaaagggtgagtgagcgagaggctgctttggaagaaactcatagattactgcaacagttccccctggacctggaaaagtttcttgcctggcttacagaagctgaaacaactgccaatgtcctacaggatgctacccgtaaggaaaggctcctagaagactccaagggagtaaaagagctgatgaaacaatggcaagacctccaaggtgaaattgaagctcacacagatgtttatcacaacctggatgaaaacagccaaaaaatcctgagatccctggaaggttccgatgatgcagtcctgttacaaagacgtttggataacatgaacttcaagtggagtgaacttcggaaaaagtctctcaacattaggtcccatttggaagccagttctgaccagtggaagcgtctgcacctttctctgcaggaacttctggtgtggctacagctgaaagatgatgaattaagccggcaggcacctattggaggcgactttccagcagttcagaagcagaacgatgtacatagggccttcaagagggaattgaaaactaaagaacctgtaatcatgagtactcttgagactgtacgaatatttctgacagagcagcctttggaaggactagagaaactctaccaggagcccagagagctgcctcctgaggagagagcccagaatgtcactcggcttctacgaaagcaggctgaggaggtcaatactgagtgggaaaaattgaacctgcactccgctgactggcagagaaaaatagatgagacccttgaaagactccaggaacttcaagaggccacggatgagctggacctcaagctgcgccaagctgaggtgatcaagggatcctggcagcccgtgggcgatctcctcattgactctctccaagatcacctcgagaaagtcaaggcacttcgaggagaaattgcgcctctgaaagagaacgtgagccacgtcaatgaccttgctcgccagcttaccactttgggcattcagctctcaccgtataacctcagcactctggaagacctgaacaccagatggaagcttctgcaggtggccgtcgaggaccgagtcaggcagctgcatgaagcccacagggactttggtccagcatctcagcactttctttccacgtctgtccagggtccctgggagagagccatctcgccaaacaaagtgccctactatatcaaccacgagactcaaacaacttgctgggaccatcccaaaatgacagagctctaccagtctttagctgacctgaataatgtcagattctcagcttataggactgccatgaaactccgaagactgcagaaggccctttgcttggatctcttgagcctgtcagctgcatgtgatgccttggaccagcacaacctcaagcaaaatgaccagcccatggatatcctgcagattattaattgtttgaccactatttatgaccgcctggagcaagagcacaacaatttggtcaacgtccctctctgcgtggatatgtgtctgaactggctgctgaatgtttatgatacgggacgaacagggaggatccgtgtcctgtcttttaaaactggcatcatttccctgtgtaaagcacatttggaagacaagtacagataccttttcaagcaagtggcaagttcaacaggattttgtgaccagcgcaggctgggcctccttctgcatgattctatccaaattccaagacagttgggtgaagttgcatcctttgggggcagtaacattgagccaagtgtccggagctgcttccaatttgctaataataagccagagatcgaagcggccctcttcctagactggatgagactggaaccccagtccatggtgtggctgcccgtcctgcacagagtggctgctgcagaaactgccaagcatcaggccaaatgtaacatctgcaaagagtgtccaatcattggattcaggtacaggagtctaaagcactttaattatgacatctgccaaagctgctttttttctggtcgagttgcaaaaggccataaaatgcactatcccatggtggaatattgcactccgactacatcaggagaagatgttcgagactttgccaaggtactaaaaaacaaatttcgaaccaaaaggtattttgcgaagcatccccgaatgggctacctgccagtgcagactgtcttagagggggacaacatggaaactcccgttactctgatcaacttctggccagtagattctgcgcctgcctcgtcccctcagctttcacacgatgatactcattcacgcattgaacattatgctagcaggctagcagaaatggaaaacagcaatggatcttatctaaatgatagcatctctcctaatgagagcatagatgatgaacatttgttaatccagcattactgccaaagtttgaaccaggactcccccctgagccagcctcgtagtcctgcccagatcttgatttccttagagagtgaggaaagaggggagctagagagaatcctagcagatcttgaggaagaaaacaggaatctgcaagcagaatatgaccgtctaaagcagcagcacgaacataaaggcctgtccccactgccgtcccctcctgaaatgatgcccacctctccccagagtccccgggatgctgagctcattgctgaggccaagctactgcgtcaacacaaaggccgcctggaagccaggatgcaaatcctggaagaccacaataaacagctggagtcacagttacacaggctaaggcagctgctggagcaaccccaggcagaggccaaagtgaatggcacaacggtgtcctctccttctacctctctacagaggtccgacagcagtcagcctatgctgctccgagtggttggcagtcaaacttcggactccatgggtgaggaagatcttctcagtcctccccaggacacaagcacagggttagaggaggtgatggagcaactcaacaactccttccctagttcaagaggaagaaatacccctggaaagccaatgagagaggacacaatgtaggaagtcttttccacatggcagatgatttgggcagagcgatggagtccttagtatcagtcatgacagatgaagaaggagcagaataaatgttttacaactcctgattcccgcatggtttttataatattcatacaacaaagaggattagacagtaagagtttacaagaaataaatctatatttttgtgaagggtagtggtattatactgtagatttcagtagtttctaagtctgttattgttttgttaacaatggcaggttttacacgtctatgcaattgtacaaaaaagttataagaaaactacatgtaaaatcttgatagctaaataacttgccatttctttatatggaacgcattttgggttgtttaaaaatttataacagttataaagaaagattgtaaactaaagtgtgctttataaaaaaaagttgtttataaaaacccctaaaaacaaaacaaacacacacacacacacatacacacacacacacaaaactttgaggcagcgcattgttttgcatccttttggcgtgatatccatatgaaattcatggctttttctttttttgcatattaaagataagacttcctctaccaccacaccaaatgactactacacactgctcatttgagaactgtcagctgagtggggcaggcttgagttttcatttcatatatctatatgtctataagtatataaatactatagttatatagataaagagatacgaatttctatagactgactttttccattttttaaatgttcatgtcacatcctaatagaaagaaattacttctagtcagtcatccaggcttacctgcttggtctagaatggatttttcccggagccggaagccaggaggaaactacaccacactaaaacattgtctacagctccagatgtttctcattttaaacaactttccactgacaacgaaagtaaagtaaagtattggatttttttaaagggaacatgtgaatgaatacacaggacttattatatcagagtgagtaatcggttggttggttgattgattgattgattgatacattcagcttcctgctgctagcaatgccacgatttagatttaatgatgcttcagtggaaatcaatcagaaggtattctgaccttgtgaacatcagaaggtattttttaactcccaagcagtagcaggacgatgatagggctggagggctatggattcccagcccatccctgtgaaggagtaggccactctttaagtgaaggattggatgattgttcataatacataaagttctctgtaattacaactaaattattatgccctcttctcacagtcaaaaggaactgggtggtttggtttttgttgcttttttagatttattgtcccatgtgggatgagtttttaaatgccacaagacataatttaaaataaataaactttgggaaaaggtgtaagacagtagccccatcacatttgtgatactgacaggtatcaacccagaagcccatgaactgtgtttccatcctttgcatttctctgcgagtagttccacacaggtttgtaagtaagtaagaaagaaggcaaattgattcaaatgttacaaaaaaacccttcttggtggattagacaggttaaatatataaacaaacaaacaaaaattgctcaaaaaagaggagaaaagctcaagaggaaaagctaaggactggtaggaaaaagctttactctttcatgccattttatttctttttgatttttaaatcattcattcaatagataccaccgtgtgacctataattttgcaaatctgttacctctgacatcaagtgtaattagcttttggagagtgggctgacatcaagtgtaattagcttttggagagtgggttttgtccattattaataattaattaattaacatcaaacacggcttctcatgctatttctacctcactttggttttggggtgttcctgataattgtgcacacctgagttcacagcttcaccacttgtccattgcgttattttctttttcctttataattctttctttttccttcataattttcaaaagaaaacccaaagctctaaggtaacaaattaccaaattacatgaagatttggtttttgtcttgcatttttttcctttatgtgacgctggaccttttctttacccaaggatttttaaaactcagatttaaaacaaggggttactttacatcctactaagaagtttaagtaagtaagtttcattctaaaatcagaggtaaatagagtgcataaataattttgttttaatctttttgtttttcttttagacacattagctctggagtgagtctgtcataatatttgaacaaaaattgagagctttattgctgcattttaagcataattaatttggacattatttcgtgttgtgttctttataaccaccgagtattaaactgtaaatcataatgtaactgaagcataaacatcacatggcatgttttgtcattgttttcaggtactgagttcttacttgagtatcataatatattgtgttttaacaccaacactgtaacatttacgaattatttttttaaacttcagttttactgcattttcacaacatatcagacttcaccaaatatatgccttactattgtattatagtactgctttactgtgtatctcaataaagcacgcagttatgttac

SEQ ID NO: 2214 - protein, 3677 aa, Homo sapiens
MEDEREDVQKKTFTKWVNAQFSKFGKQHIENLFSDLQDGRRLLDLLEGLTGQKLPKEKGSTRVHALNNVNKALRVLQNNNVDLVNIGSTDIVDGNHKLTLGLIWNIILHWQVKNVMKNIMAGLQQTNSEKILLSWVRQSTRNYPQVNVINFTTSWSDGLALNALIHSHRPDLFDWNSVVCQQSATQRLEHAFNIARYQLGIEKLLDPEDVDTTYPDKKSILMYITSLFQVLPQQVSIEAIQEVEMLPRPPKVTKEEHFQLHHQMHYSQQITVSLAQGYERTSSPKPRFKSYAYTQAAYVTTSDPTRSPFPSQHLEAPEDKSFGSSLMESEVNLDRYQTALEEVLSWLLSAEDTLQAQGEISNDVEVVKDQFHTHEGYMMDLTAHQGRVGNILQLGSKLIGTGKLSEDEETEVQEQMNLLNSRWECLRVASMEKQSNLHRVLMDLQNQKLKELNDWLTKTEERTRKMEEEPLGPDLEDLKRQVQQHKVLQEDLEQEQVRVNSLTHMVVVVDESSGDHATAALEEQLKVLGDRWANICRWTEDRWVLLQDILLKWQRLTEEQCLFSAWLSEKEDAVNKIHTTGFKDQNEMLSSLQKLAVLKADLEKKKQSMGKLYSLKQDLLSTLKNKSVTQKTEAWLDNFARCWDNLVQKLEKSTAQISQAVTTTQPSLTQTTVMETVTTVTTREQILVKHAQEELPPPPPQKKRQITVDSEIRKRLDVDITELHSWITRSEAVLQSPEFAIFRKEGNFSDLKEKVNAIEREKAEKFRKLQDASRSAQALVEQMVNEGVNADSIKQASEQLNSRWIEFCQLLSERLNWLEYQNNIIAFYNQLQQLEQMTTTAENWLKIQPTTPSEPTAIKSQLKICKDEVNRLSGLQPQIERLKIQSIALKEKGQGPMFLDADFVAFTNHFKQVFSDVQAREKELQTIFDTLPPMRYQETMSAIRTWVQQSETKLSIPQLSVTDYEIMEQRLGELQALQSSLQEQQSGLYYLSTTVKEMSKKAPSEISRKYQSEFEEIEGRWKKLSSQLVEHCQKLEEQMNKLRKIQNHIQTLKKWMAEVDVFLKEEWPALGDSEILKKQLKQCRLLVSDIQTIQPSLNSVNEGGQKIKNEAEPEFASRLETELKELNTQWDHMCQQVYARKEALKGGLEKTVSLQKDLSEMHEWMTQAEEEYLERDFEYKTPDELQKAVEEMKRAKEEAQQKEAKVKLLTESVNSVIAQAPPVAQEALKKELETLTTNYQWLCTRLNGKCKTLEEVWACWHELLSYLEKANKWLNEVEFKLKTTENIPGGAEEISEVLDSLENLMRHSEDNPNQIRILAQTLTDGGVMDELINEELETFNSRWRELHEEAVRRQKLLEQSIQSAQETEKSLHLIQESLTFIDKQLAAYIADKVDAAQMPQEAQKIQSDLTSHEISLEEMKKHNQGKEAAQRVLSQIDVAQKKLQDVSMKFRLFQKPANFEQRLQESKMILDEVKMHLPALETKSVEQEVVQSQLNHCVNLYKSLSEVKSEVEMVIKTGRQIVQKKQTENPKELDERVTALKLHYNELGAKVTERKQQLEKCLKLSRKMRKEMNVLTEWLAATDMELTKRSAVEGMPSNLDSEVAWGKATQKEIEKQKVHLKSITEVGEALKTVLGKKETLVEDKLSLLNSNWIAVTSRAEEWLNLLLEYQKHMETFDQNVDHITKWIIQADTLLDESEKKKPQQKEDVLKRLKAELNDIRPKVDSTRDQAANLMANRGDHCRKLVEPQISELNHRFAAISHRIKTGKASIPLKELEQFNSDIQKLLEPLEAEIQQGVNLKEEDFNKDMNEDNEGTVKELLQRGDNLQQRITDERKREEIKIKQQLLQTKHNALKDLRSQRRKKALEISHQWYQYKRQADDLLKCLDDIEKKLASLPEPRDERKIKEIDRELQKKKEELNAVRRQAEGLSEDGAAMAVEPTQIQLSKRWREIESKFAQFRRLNFAQIHTVREETMMVMTEDMPLEISYVPSTYLTEITHVSQALLEVEQLLNAPDLCAKDFEDLFKQEESLKNIKDSLQQSSGRIDIIHSKKTAALQSATPVERVKLQEALSQLDFQWEKVNKMYKDRQGRFDRSVEKWRRFHYDIKIFNQWLTEAEQFLRKTQIPENWEHAKYKWYLKELQDGIGQRQTVVRTLNATGEEIIQQSSKTDASILQEKLGSLNLRWQEVCKQLSDRKKRLEEQKNILSEFQRDLNEFVLWLEEADNIASIPLEPGKEQQLKEKLEQVKLLVEELPLRQGILKQLNETGGPVLVSAPISPEEQDKLENKLKQTNLQWIKVSRALPEKQGEIEAQIKDLGQLEKKLEDLEEQLNHLLLWLSPIRNQLEIYNQPNQEGPFDVQETEIAVQAKQPDVEEILSKGQHLYKEKPATQPVKRKLEDLSSEWKAVNRLLQELRAKQPDLAPGLTTIGASPTQTVTLVTQPVVTKETAISKLEMPSSLMLEVPALADFNRAWTELTDWLSLLDQVIKSQRVMVGDLEDINEMIIKQKATMQDLEQRRPQLEELITAAQNLKNKTSNQEARTIITDRIERIQNQWDEVQEHLQNRRQQLNEMLKDSTQWLEAKEEAEQVLGQARAKLESWKEGPYTVDAIQKKITETKQLAKDLRQWQTNVDVANDLALKLLRDYSADDTRKVHMITENINASWRSIHKRVSEREAALEETHRLLQQFPLDLEKFLAWLTEAETTANVLQDATRKERLLEDSKGVKELMKQWQDLQGEIEAHTDVYHNLDENSQKILRSLEGSDDAVLLQRRLDNMNFKWSELRKKSLNIRSHLEASSDQWKRLHLSLQELLVWLQLKDDELSRQAPIGGDFPAVQKQNDVHRAFKRELKTKEPVIMSTLETVRIFLTEQPLEGLEKLYQEPRELPPEERAQNVTRLLRKQAEEVNTEWEKLNLHSADWQRKIDETLERLQELQEATDELDLKLRQAEVIKGSWQPVGDLLIDSLQDHLEKVKALRGEIAPLKENVSHVNDLARQLTTLGIQLSPYNLSTLEDLNTRWKLLQVAVEDRVRQLHEAHRDFGPASQHFLSTSVQGPWERAISPNKVPYYINHETQTTCWDHPKMTELYQSLADLNNVRFSAYRTAMKLRRLQKALCLDLLSLSAACDALDQHNLKQNDQPMDILQIINCLTTIYDRLEQEHNNLVNVPLCVDMCLNWLLNVYDTGRTGRIRVLSFKTGIISLCKAHLEDKYRYLFKQVASSTGFCDQRRLGLLLHDSIQIPRQLGEVASFGGSNIEPSVRSCFQFANNKPEIEAALFLDWMRLEPQSMVWLPVLHRVAAAETAKHQAKCNICKECPIIGFRYRSLKHFNYDICQSCFFSGRVAKGHKMHYPMVEYCTPTTSGEDVRDFAKVLKNKFRTKRYFAKHPRMGYLPVQTVLEGDNMETPVTLINFWPVDSAPASSPQLSHDDTHSRIEHYASRLAEMENSNGSYLNDSISPNESIDDEHLLIQHYCQSLNQDSPLSQPRSPAQILISLESEERGELERILADLEEENRNLQAEYDRLKQQHEHKGLSPLPSPPEMMPTSPQSPRDAELIAEAKLLRQHKGRLEARMQILEDHNKQLESQLHRLRQLLEQPQAEAKVNGTTVSSPSTSLQRSDSSQPMLLRVVGSQTSDSMGEEDLLSPPQDTSTGLEEVMEQLNNSFPSSRGRNTPGKPMREDTM

SEQ ID NO: 2215 - DNA, 13993 bp, Homo sapiens
tcctggcatcagttactgtgttgactcactcagtgttgggatcactcactttccccctacaggactcagatctgggaggcaattaccttcggagaaaaacgaataggaaaaactgaagtgttactttttttaaagctgctgaagtttgttggtttctcattgtttttaagcctactggagcaataaagtttgaagaacttttaccaggttttttttatcgctgccttgatatacacttttcaaaatgctttggtgggaagaagtagaggactgttatgaaagagaagatgttcaaaagaaaacattcacaaaatgggtaaatgcacaattttctaagtttgggaagcagcatattgagaacctcttcagtgacctacaggatgggaggcgcctcctagacctcctcgaaggcctgacagggcaaaaactgccaaaagaaaaaggatccacaagagttcatgccctgaacaatgtcaacaaggcactgcgggttttgcagaacaataatgttgatttagtgaatattggaagtactgacatcgtagatggaaatcataaactgactcttggtttgatttggaatataatcctccactggcaggtcaaaaatgtaatgaaaaatatcatggctggattgcaacaaaccaacagtgaaaagattctcctgagctgggtccgacaatcaactcgtaattatccacaggttaatgtaatcaacttcaccaccagctggtctgatggcctggctttgaatgctctcatccatagtcataggccagacctatttgactggaatagtgtggtttgccagcagtcagccacacaacgactggaacatgcattcaacatcgccagatatcaattaggcatagagaaactactcgatcctgaagatgttgataccacctatccagataagaagtccatcttaatgtacatcacatcactcttccaagttttgcctcaacaagtgagcattgaagccatccaggaagtggaaatgttgccaaggccacctaaagtgactaaagaagaacattttcagttacatcatcaaatgcactattctcaacagatcacggtcagtctagcacagggatatgagagaacttcttcccctaagcctcgattcaagagctatgcctacacacaggctgcttatgtcaccacctctgaccctacacggagcccatttccttcacagcatttggaagctcctgaagacaagtcatttggcagttcattgatggagagtgaagtaaacctggaccgttatcaaacagctttagaagaagtattatcgtggcttctttctgctgaggacacattgcaagcacaaggagagatttctaatgatgtggaagtggtgaaagaccagtttcatactcatgaggggtacatgatggatttgacagcccatcagggccgggttggtaatattctacaattgggaagtaagctgattggaacaggaaaattatcagaagatgaagaaactgaagtacaagagcagatgaatctcctaaattcaagatgggaatgcctcagggtagctagcatggaaaaacaaagcaatttacatagagttttaatggatctccagaatcagaaactgaaagagttgaatgactggctaacaaaaacagaagaaagaacaaggaaaatggaggaagagcctcttggacctgatcttgaagacctaaaacgccaagtacaacaacataaggtgcttcaagaagatctagaacaagaacaagtcagggtcaattctctcactcacatggtggtggtagttgatgaatctagtggagatcacgcaactgctgctttggaagaacaacttaaggtattgggagatcgatgggcaaacatctgtagatggacagaagaccgctgggttcttttacaagacatccttctcaaatggcaacgtcttactgaagaacagtgcctttttagtgcatggctttcagaaaaagaagatgcagtgaacaagattcacacaactggctttaaagatcaaaatgaaatgttatcaagtcttcaaaaactggccgttttaaaagcggatctagaaaagaaaaagcaatccatgggcaaactgtattcactcaaacaagatcttctttcaacactgaagaataagtcagtgacccagaagacggaagcatggctggataactttgcccggtgttgggataatttagtccaaaaacttgaaaagagtacagcacagatttcacaggctgtcaccaccactcagccatcactaacacagacaactgtaatggaaacagtaactacggtgaccacaagggaacagatcctggtaaagcatgctcaagaggaacttccaccaccacctccccaaaagaagaggcagattactgtggattctgaaattaggaaaaggttggatgttgatataactgaacttcacagctggattactcgctcagaagctgtgttgcagagtcctgaatttgcaatctttcggaaggaaggcaacttctcagacttaaaagaaaaagtcaatgccatagagcgagaaaaagctgagaagttcagaaaactgcaagatgccagcagatcagctcaggccctggtggaacagatggtgaatgagggtgttaatgcagatagcatcaaacaagcctcagaacaactgaacagccggtggatcgaattctgccagttgctaagtgagagacttaactggctggagtatcagaacaacatcatcgctttctataatcagctacaacaattggagcagatgacaactactgctgaaaactggttgaaaatccaacccaccaccccatcagagccaacagcaattaaaagtcagttaaaaatttgtaaggatgaagtcaaccggctatcaggtcttcaacctcaaattgaacgattaaaaattcaaagcatagccctgaaagagaaaggacaaggacccatgttcctggatgcagactttgtggcctttacaaatcattttaagcaagtcttttctgatgtgcaggccagagagaaagagctacagacaatttttgacactttgccaccaatgcgctatcaggagaccatgagtgccatcaggacatgggtccagcagtcagaaaccaaactctccatacctcaacttagtgtcaccgactatgaaatcatggagcagagactcggggaattgcaggctttacaaagttctctgcaagagcaacaaagtggcctatactatctcagcaccactgtgaaagagatgtcgaagaaagcgccctctgaaattagccggaaatatcaatcagaatttgaagaaattgagggacgctggaagaagctctcctcccagctggttgagcattgtcaaaagctagaggagcaaatgaataaactccgaaaaattcagaatcacatacaaaccctgaagaaatggatggctgaagttgatgtttttctgaaggaggaatggcctgcccttggggattcagaaattctaaaaaagcagctgaaacagtgcagacttttagtcagtgatattcagacaattcagcccagtctaaacagtgtcaatgaaggtgggcagaagataaagaatgaagcagagccagagtttgcttcgagacttgagacagaactcaaagaacttaacactcagtgggatcacatgtgccaacaggtctatgccagaaaggaggccttgaagggaggtttggagaaaactgtaagcctccagaaagatctatcagagatgcacgaatggatgacacaagctgaagaagagtatcttgagagagattttgaatataaaactccagatgaattacagaaagcagttgaagagatgaagagagctaaagaagaggcccaacaaaaagaagcgaaagtgaaactccttactgagtctgtaaatagtgtcatagctcaagctccacctgtagcacaagaggccttaaaaaaggaacttgaaactctaaccaccaactaccagtggctctgcactaggctgaatgggaaatgcaagactttggaagaagtttgggcatgttggcatgagttattgtcatacttggagaaagcaaacaagtggctaaatgaagtagaatttaaacttaaaaccactgaaaacattcctggcggagctgaggaaatctctgaggtgctagattcacttgaaaatttgatgcgacattcagaggataacccaaatcagattcgcatattggcacagaccctaacagatggcggagtcatggatgagctaatcaatgaggaacttgagacatttaattctcgttggagggaactacatgaagaggctgtaaggaggcaaaagttgcttgaacagagcatccagtctgcccaggagactgaaaaatccttacacttaatccaggagtccctcacattcattgacaagcagttggcagcttatattgcagacaaggtggacgcagctcaaatgcctcaggaagcccagaaaatccaatctgatttgacaagtcatgagatcagtttagaagaaatgaagaaacataatcaggggaaggaggctgcccaaagagtcctgtctcagattgatgttgcacagaaaaaattacaagatgtctccatgaagtttcgattattccagaaaccagccaattttgagcagcgtctacaagaaagtaagatgattttagatgaagtgaagatgcacttgcctgcattggaaacaaagagtgtggaacaggaagtagtacagtcacagctaaatcattgtgtgaacttgtataaaagtctgagtgaagtgaagtctgaagtggaaatggtgataaagactggacgtcagattgtacagaaaaagcagacggaaaatcccaaagaacttgatgaaagagtaacagctttgaaattgcattataatgagctgggagcaaaggtaacagaaagaaagcaacagttggagaaatgcttgaaattgtcccgtaagatgcgaaaggaaatgaatgtcttgacagaatggctggcagctacagatatggaattgacaaagagatcagcagttgaaggaatgcctagtaatttggattctgaagttgcctggggaaaggctactcaaaaagagattgagaaacagaaggtgcacctgaagagtatcacagaggtaggagaggccttgaaaacagttttgggcaagaaggagacgttggtggaagataaactcagtcttctgaatagtaactggatagctgtcacctcccgagcagaagagtggttaaatcttttgttggaataccagaaacacatggaaacttttgaccagaatgtggaccacatcacaaagtggatcattcaggctgacacacttttggatgaatcagagaaaaagaaaccccagcaaaaagaagacgtgcttaagcgtttaaaggcagaactgaatgacatacgcccaaaggtggactctacacgtgaccaagcagcaaacttgatggcaaaccgcggtgaccactgcaggaaattagtagagccccaaatctcagagctcaaccatcgatttgcagccatttcacacagaattaagactggaaaggcctccattcctttgaaggaattggagcagtttaactcagatatacaaaaattgcttgaaccactggaggctgaaattcagcagggggtgaatctgaaagaggaagacttcaataaagatatgaatgaagacaatgagggtactgtaaaagaattgttgcaaagaggagacaacttacaacaaagaatcacagatgagagaaagcgagaggaaataaagataaaacagcagctgttacagacaaaacataatgctctcaaggatttgaggtctcaaagaagaaaaaaggctctagaaatttctcatcagtggtatcagtacaagaggcaggctgatgatctcctgaaatgcttggatgacattgaaaaaaaattagccagcctacctgagcccagagatgaaaggaaaataaaggaaattgatcgggaattgcagaagaagaaagaggagctgaatgcagtgcgtaggcaagctgagggcttgtctgaggatggggccgcaatggcagtggagccaactcagatccagctcagcaagcgctggcgggaaattgagagcaaatttgctcagtttcgaagactcaactttgcacaaattcacactgtccgtgaagaaacgatgatggtgatgactgaagacatgcctttggaaatttcttatgtgccttctacttatttgactgaaatcactcatgtctcacaagccctattagaagtggaacaacttctcaatgctcctgacctctgtgctaaggactttgaagatctctttaagcaagaggagtctctgaagaatataaaagatagtctacaacaaagctcaggtcggattgacattattcatagcaagaagacagcagcattgcaaagtgcaacgcctgtggaaagggtgaagctacaggaagctctctcccagcttgatttccaatgggaaaaagttaacaaaatgtacaaggaccgacaagggcgatttgacagatctgttgagaaatggcggcgttttcattatgatataaagatatttaatcagtggctaacagaagctgaacagtttctcagaaagacacaaattcctgagaattgggaacatgctaaatacaaatggtatcttaaggaactccaggatggcattgggcagcggcaaactgttgtcagaacattgaatgcaactggggaagaaataattcagcaatcctcaaaaacagatgccagtattctacaggaaaaattgggaagcctgaatctgcggtggcaggaggtctgcaaacagctgtcagacagaaaaaagaggctagaagaacaaaagaatatcttgtcagaatttcaaagagatttaaatgaatttgttttatggttggaggaagcagataacattgctagtatcccacttgaacctggaaaagagcagcaactaaaagaaaagcttgagcaagtcaagttactggtggaagagttgcccctgcgccagggaattctcaaacaattaaatgaaactggaggacccgtgcttgtaagtgctcccataagcccagaagagcaagataaacttgaaaataagctcaagcagacaaatctccagtggataaaggtttccagagctttacctgagaaacaaggagaaattgaagctcaaataaaagaccttgggcagcttgaaaaaaagcttgaagaccttgaagagcagttaaatcatctgctgctgtggttatctcctattaggaatcagttggaaatttataaccaaccaaaccaagaaggaccatttgacgttcaggaaactgaaatagcagttcaagctaaacaaccggatgtggaagagattttgtctaaagggcagcatttgtacaaggaaaaaccagccactcagccagtgaagaggaagttagaagatctgagctctgagtggaaggcggtaaaccgtttacttcaagagctgagggcaaagcagcctgacctagctcctggactgaccactattggagcctctcctactcagactgttactctggtgacacaacctgtggttactaaggaaactgccatctccaaactagaaatgccatcttccttgatgttggaggtacctgctctggcagatttcaaccgggcttggacagaacttaccgactggctttctctgcttgatcaagttataaaatcacagagggtgatggtgggtgaccttgaggatatcaacgagatgatcatcaagcagaaggcaacaatgcaggatttggaacagaggcgtccccagttggaagaactcattaccgctgcccaaaatttgaaaaacaagaccagcaatcaagaggctagaacaatcattacggatcgaattgaaagaattcagaatcagtgggatgaagtacaagaacaccttcagaaccggaggcaacagttgaatgaaatgttaaaggattcaacacaatggctggaagctaaggaagaagctgagcaggtcttaggacaggccagagccaagcttgagtcatggaaggagggtccctatacagtagatgcaatccaaaagaaaatcacagaaaccaagcagttggccaaagacctccgccagtggcagacaaatgtagatgtggcaaatgacttggccctgaaacttctccgggattattctgcagatgataccagaaaagtccacatgataacagagaatatcaatgcctcttggagaagcattcataaaagggtgagtgagcgagaggctgctttggaagaaactcatagattactgcaacagttccccctggacctggaaaagtttcttgcctggcttacagaagctgaaacaactgccaatgtcctacaggatgctacccgtaaggaaaggctcctagaagactccaagggagtaaaagagctgatgaaacaatggcaagacctccaaggtgaaattgaagctcacacagatgtttatcacaacctggatgaaaacagccaaaaaatcctgagatccctggaaggttccgatgatgcagtcctgttacaaagacgtttggataacatgaacttcaagtggagtgaacttcggaaaaagtctctcaacattaggtcccatttggaagccagttctgaccagtggaagcgtctgcacctttctctgcaggaacttctggtgtggctacagctgaaagatgatgaattaagccggcaggcacctattggaggcgactttccagcagttcagaagcagaacgatgtacatagggccttcaagagggaattgaaaactaaagaacctgtaatcatgagtactcttgagactgtacgaatatttctgacagagcagcctttggaaggactagagaaactctaccaggagcccagagagctgcctcctgaggagagagcccagaatgtcactcggcttctacgaaagcaggctgaggaggtcaatactgagtgggaaaaattgaacctgcactccgctgactggcagagaaaaatagatgagacccttgaaagactccaggaacttcaagaggccacggatgagctggacctcaagctgcgccaagctgaggtgatcaagggatcctggcagcccgtgggcgatctcctcattgactctctccaagatcacctcgagaaagtcaaggcacttcgaggagaaattgcgcctctgaaagagaacgtgagccacgtcaatgaccttgctcgccagcttaccactttgggcattcagctctcaccgtataacctcagcactctggaagacctgaacaccagatggaagcttctgcaggtggccgtcgaggaccgagtcaggcagctgcatgaagcccacagggactttggtccagcatctcagcactttctttccacgtctgtccagggtccctgggagagagccatctcgccaaacaaagtgccctactatatcaaccacgagactcaaacaacttgctgggaccatcccaaaatgacagagctctaccagtctttagctgacctgaataatgtcagattctcagcttataggactgccatgaaactccgaagactgcagaaggccctttgcttggatctcttgagcctgtcagctgcatgtgatgccttggaccagcacaacctcaagcaaaatgaccagcccatggatatcctgcagattattaattgtttgaccactatttatgaccgcctggagcaagagcacaacaatttggtcaacgtccctctctgcgtggatatgtgtctgaactggctgctgaatgtttatgatacgggacgaacagggaggatccgtgtcctgtcttttaaaactggcatcatttccctgtgtaaagcacatttggaagacaagtacagataccttttcaagcaagtggcaagttcaacaggattttgtgaccagcgcaggctgggcctccttctgcatgattctatccaaattccaagacagttgggtgaagttgcatcctttgggggcagtaacattgagccaagtgtccggagctgcttccaatttgctaataataagccagagatcgaagcggccctcttcctagactggatgagactggaaccccagtccatggtgtggctgcccgtcctgcacagagtggctgctgcagaaactgccaagcatcaggccaaatgtaacatctgcaaagagtgtccaatcattggattcaggtacaggagtctaaagcactttaattatgacatctgccaaagctgctttttttctggtcgagttgcaaaaggccataaaatgcactatcccatggtggaatattgcactccgactacatcaggagaagatgttcgagactttgccaaggtactaaaaaacaaatttcgaaccaaaaggtattttgcgaagcatccccgaatgggctacctgccagtgcagactgtcttagagggggacaacatggaaactcccgttactctgatcaacttctggccagtagattctgcgcctgcctcgtcccctcagctttcacacgatgatactcattcacgcattgaacattatgctagcaggctagcagaaatggaaaacagcaatggatcttatctaaatgatagcatctctcctaatgagagcatagatgatgaacatttgttaatccagcattactgccaaagtttgaaccaggactcccccctgagccagcctcgtagtcctgcccagatcttgatttccttagagagtgaggaaagaggggagctagagagaatcctagcagatcttgaggaagaaaacaggaatctgcaagcagaatatgaccgtctaaagcagcagcacgaacataaaggcctgtccccactgccgtcccctcctgaaatgatgcccacctctccccagagtccccgggatgctgagctcattgctgaggccaagctactgcgtcaacacaaaggccgcctggaagccaggatgcaaatcctggaagaccacaataaacagctggagtcacagttacacaggctaaggcagctgctggagcaaccccaggcagaggccaaagtgaatggcacaacggtgtcctctccttctacctctctacagaggtccgacagcagtcagcctatgctgctccgagtggttggcagtcaaacttcggactccatgggtgaggaagatcttctcagtcctccccaggacacaagcacagggttagaggaggtgatggagcaactcaacaactccttccctagttcaagaggaagaaatacccctggaaagccaatgagagaggacacaatgtaggaagtcttttccacatggcagatgatttgggcagagcgatggagtccttagtatcagtcatgacagatgaagaaggagcagaataaatgttttacaactcctgattcccgcatggtttttataatattcatacaacaaagaggattagacagtaagagtttacaagaaataaatctatatttttgtgaagggtagtggtattatactgtagatttcagtagtttctaagtctgttattgttttgttaacaatggcaggttttacacgtctatgcaattgtacaaaaaagttataagaaaactacatgtaaaatcttgatagctaaataacttgccatttctttatatggaacgcattttgggttgtttaaaaatttataacagttataaagaaagattgtaaactaaagtgtgctttataaaaaaaagttgtttataaaaacccctaaaaacaaaacaaacacacacacacacacatacacacacacacacaaaactttgaggcagcgcattgttttgcatccttttggcgtgatatccatatgaaattcatggctttttctttttttgcatattaaagataagacttcctctaccaccacaccaaatgactactacacactgctcatttgagaactgtcagctgagtggggcaggcttgagttttcatttcatatatctatatgtctataagtatataaatactatagttatatagataaagagatacgaatttctatagactgactttttccattttttaaatgttcatgtcacatcctaatagaaagaaattacttctagtcagtcatccaggcttacctgcttggtctagaatggatttttcccggagccggaagccaggaggaaactacaccacactaaaacattgtctacagctccagatgtttctcattttaaacaactttccactgacaacgaaagtaaagtaaagtattggatttttttaaagggaacatgtgaatgaatacacaggacttattatatcagagtgagtaatcggttggttggttgattgattgattgattgatacattcagcttcctgctgctagcaatgccacgatttagatttaatgatgcttcagtggaaatcaatcagaaggtattctgaccttgtgaacatcagaaggtattttttaactcccaagcagtagcaggacgatgatagggctggagggctatggattcccagcccatccctgtgaaggagtaggccactctttaagtgaaggattggatgattgttcataatacataaagttctctgtaattacaactaaattattatgccctcttctcacagtcaaaaggaactgggtggtttggtttttgttgcttttttagatttattgtcccatgtgggatgagtttttaaatgccacaagacataatttaaaataaataaactttgggaaaaggtgtaagacagtagccccatcacatttgtgatactgacaggtatcaacccagaagcccatgaactgtgtttccatcctttgcatttctctgcgagtagttccacacaggtttgtaagtaagtaagaaagaaggcaaattgattcaaatgttacaaaaaaacccttcttggtggattagacaggttaaatatataaacaaacaaacaaaaattgctcaaaaaagaggagaaaagctcaagaggaaaagctaaggactggtaggaaaaagctttactctttcatgccattttatttctttttgatttttaaatcattcattcaatagataccaccgtgtgacctataattttgcaaatctgttacctctgacatcaagtgtaattagcttttggagagtgggctgacatcaagtgtaattagcttttggagagtgggttttgtccattattaataattaattaattaacatcaaacacggcttctcatgctatttctacctcactttggttttggggtgttcctgataattgtgcacacctgagttcacagcttcaccacttgtccattgcgttattttctttttcctttataattctttctttttccttcataattttcaaaagaaaacccaaagctctaaggtaacaaattaccaaattacatgaagatttggtttttgtcttgcatttttttcctttatgtgacgctggaccttttctttacccaaggatttttaaaactcagatttaaaacaaggggttactttacatcctactaagaagtttaagtaagtaagtttcattctaaaatcagaggtaaatagagtgcataaataattttgttttaatctttttgtttttcttttagacacattagctctggagtgagtctgtcataatatttgaacaaaaattgagagctttattgctgcattttaagcataattaatttggacattatttcgtgttgtgttctttataaccaccgagtattaaactgtaaatcataatgtaactgaagcataaacatcacatggcatgttttgtcattgttttcaggtactgagttcttacttgagtatcataatatattgtgttttaacaccaacactgtaacatttacgaattatttttttaaacttcagttttactgcattttcacaacatatcagacttcaccaaatatatgccttactattgtattatagtactgctttactgtgtatctcaataaagcacgcagttatgttac

SEQ ID NO: 2216 - protein, 3685 aa, Homo sapiens
MLWWEEVEDCYEREDVQKKTFTKWVNAQFSKFGKQHIENLFSDLQDGRRLLDLLEGLTGQKLPKEKGSTRVHALNNVNKALRVLQNNNVDLVNIGSTDIVDGNHKLTLGLIWNIILHWQVKNVMKNIMAGLQQTNSEKILLSWVRQSTRNYPQVNVINFTTSWSDGLALNALIHSHRPDLFDWNSVVCQQSATQRLEHAFNIARYQLGIEKLLDPEDVDTTYPDKKSILMYITSLFQVLPQQVSIEAIQEVEMLPRPPKVTKEEHFQLHHQMHYSQQITVSLAQGYERTSSPKPRFKSYAYTQAAYVTTSDPTRSPFPSQHLEAPEDKSFGSSLMESEVNLDRYQTALEEVLSWLLSAEDTLQAQGEISNDVEVVKDQFHTHEGYMMDLTAHQGRVGNILQLGSKLIGTGKLSEDEETEVQEQMNLLNSRWECLRVASMEKQSNLHRVLMDLQNQKLKELNDWLTKTEERTRKMEEEPLGPDLEDLKRQVQQHKVLQEDLEQEQVRVNSLTHMVVVVDESSGDHATAALEEQLKVLGDRWANICRWTEDRWVLLQDILLKWQRLTEEQCLFSAWLSEKEDAVNKIHTTGFKDQNEMLSSLQKLAVLKADLEKKKQSMGKLYSLKQDLLSTLKNKSVTQKTEAWLDNFARCWDNLVQKLEKSTAQISQAVTTTQPSLTQTTVMETVTTVTTREQILVKHAQEELPPPPPQKKRQITVDSEIRKRLDVDITELHSWITRSEAVLQSPEFAIFRKEGNFSDLKEKVNAIEREKAEKFRKLQDASRSAQALVEQMVNEGVNADSIKQASEQLNSRWIEFCQLLSERLNWLEYQNNIIAFYNQLQQLEQMTTTAENWLKIQPTTPSEPTAIKSQLKICKDEVNRLSGLQPQIERLKIQSIALKEKGQGPMFLDADFVAFTNHFKQVFSDVQAREKELQTIFDTLPPMRYQETMSAIRTWVQQSETKLSIPQLSVTDYEIMEQRLGELQALQSSLQEQQSGLYYLSTTVKEMSKKAPSEISRKYQSEFEEIEGRWKKLSSQLVEHCQKLEEQMNKLRKIQNHIQTLKKWMAEVDVFLKEEWPALGDSEILKKQLKQCRLLVSDIQTIQPSLNSVNEGGQKIKNEAEPEFASRLETELKELNTQWDHMCQQVYARKEALKGGLEKTVSLQKDLSEMHEWMTQAEEEYLERDFEYKTPDELQKAVEEMKRAKEEAQQKEAKVKLLTESVNSVIAQAPPVAQEALKKELETLTTNYQWLCTRLNGKCKTLEEVWACWHELLSYLEKANKWLNEVEFKLKTTENIPGGAEEISEVLDSLENLMRHSEDNPNQIRILAQTLTDGGVMDELINEELETFNSRWRELHEEAVRRQKLLEQSIQSAQETEKSLHLIQESLTFIDKQLAAYIADKVDAAQMPQEAQKIQSDLTSHEISLEEMKKHNQGKEAAQRVLSQIDVAQKKLQDVSMKFRLFQKPANFEQRLQESKMILDEVKMHLPALETKSVEQEVVQSQLNHCVNLYKSLSEVKSEVEMVIKTGRQIVQKKQTENPKELDERVTALKLHYNELGAKVTERKQQLEKCLKLSRKMRKEMNVLTEWLAATDMELTKRSAVEGMPSNLDSEVAWGKATQKEIEKQKVHLKSITEVGEALKTVLGKKETLVEDKLSLLNSNWIAVTSRAEEWLNLLLEYQKHMETFDQNVDHITKWIIQADTLLDESEKKKPQQKEDVLKRLKAELNDIRPKVDSTRDQAANLMANRGDHCRKLVEPQISELNHRFAAISHRIKTGKASIPLKELEQFNSDIQKLLEPLEAEIQQGVNLKEEDFNKDMNEDNEGTVKELLQRGDNLQQRITDERKREEIKIKQQLLQTKHNALKDLRSQRRKKALEISHQWYQYKRQADDLLKCLDDIEKKLASLPEPRDERKIKEIDRELQKKKEELNAVRRQAEGLSEDGAAMAVEPTQIQLSKRWREIESKFAQFRRLNFAQIHTVREETMMVMTEDMPLEISYVPSTYLTEITHVSQALLEVEQLLNAPDLCAKDFEDLFKQEESLKNIKDSLQQSSGRIDIIHSKKTAALQSATPVERVKLQEALSQLDFQWEKVNKMYKDRQGRFDRSVEKWRRFHYDIKIFNQWLTEAEQFLRKTQIPENWEHAKYKWYLKELQDGIGQRQTVVRTLNATGEEIIQQSSKTDASILQEKLGSLNLRWQEVCKQLSDRKKRLEEQKNILSEFQRDLNEFVLWLEEADNIASIPLEPGKEQQLKEKLEQVKLLVEELPLRQGILKQLNETGGPVLVSAPISPEEQDKLENKLKQTNLQWIKVSRALPEKQGEIEAQIKDLGQLEKKLEDLEEQLNHLLLWLSPIRNQLEIYNQPNQEGPFDVQETEIAVQAKQPDVEEILSKGQHLYKEKPATQPVKRKLEDLSSEWKAVNRLLQELRAKQPDLAPGLTTIGASPTQTVTLVTQPVVTKETAISKLEMPSSLMLEVPALADFNRAWTELTDWLSLLDQVIKSQRVMVGDLEDINEMIIKQKATMQDLEQRRPQLEELITAAQNLKNKTSNQEARTIITDRIERIQNQWDEVQEHLQNRRQQLNEMLKDSTQWLEAKEEAEQVLGQARAKLESWKEGPYTVDAIQKKITETKQLAKDLRQWQTNVDVANDLALKLLRDYSADDTRKVHMITENINASWRSIHKRVSEREAALEETHRLLQQFPLDLEKFLAWLTEAETTANVLQDATRKERLLEDSKGVKELMKQWQDLQGEIEAHTDVYHNLDENSQKILRSLEGSDDAVLLQRRLDNMNFKWSELRKKSLNIRSHLEASSDQWKRLHLSLQELLVWLQLKDDELSRQAPIGGDFPAVQKQNDVHRAFKRELKTKEPVIMSTLETVRIFLTEQPLEGLEKLYQEPRELPPEERAQNVTRLLRKQAEEVNTEWEKLNLHSADWQRKIDETLERLQELQEATDELDLKLRQAEVIKGSWQPVGDLLIDSLQDHLEKVKALRGEIAPLKENVSHVNDLARQLTTLGIQLSPYNLSTLEDLNTRWKLLQVAVEDRVRQLHEAHRDFGPASQHFLSTSVQGPWERAISPNKVPYYINHETQTTCWDHPKMTELYQSLADLNNVRFSAYRTAMKLRRLQKALCLDLLSLSAACDALDQHNLKQNDQPMDILQIINCLTTIYDRLEQEHNNLVNVPLCVDMCLNWLLNVYDTGRTGRIRVLSFKTGIISLCKAHLEDKYRYLFKQVASSTGFCDQRRLGLLLHDSIQIPRQLGEVASFGGSNIEPSVRSCFQFANNKPEIEAALFLDWMRLEPQSMVWLPVLHRVAAAETAKHQAKCNICKECPIIGFRYRSLKHFNYDICQSCFFSGRVAKGHKMHYPMVEYCTPTTSGEDVRDFAKVLKNKFRTKRYFAKHPRMGYLPVQTVLEGDNMETPVTLINFWPVDSAPASSPQLSHDDTHSRIEHYASRLAEMENSNGSYLNDSISPNESIDDEHLLIQHYCQSLNQDSPLSQPRSPAQILISLESEERGELERILADLEEENRNLQAEYDRLKQQHEHKGLSPLPSPPEMMPTSPQSPRDAELIAEAKLLRQHKGRLEARMQILEDHNKQLESQLHRLRQLLEQPQAEAKVNGTTVSSPSTSLQRSDSSQPMLLRVVGSQTSDSMGEEDLLSPPQDTSTGLEEVMEQLNNSFPSSRGRNTPGKPMREDTM

SEQ ID NO: 2217 - DNA, 13764 bp, Homo sapiens
tcactgacacatagagtaacttctagttctccaagctctactcatgatgaaagagaagatgttcaaaagaaaacattcacaaaatgggtaaatgcacaattttctaagtttgggaagcagcatattgagaacctcttcagtgacctacaggatgggaggcgcctcctagacctcctcgaaggcctgacagggcaaaaactgccaaaagaaaaaggatccacaagagttcatgccctgaacaatgtcaacaaggcactgcgggttttgcagaacaataatgttgatttagtgaatattggaagtactgacatcgtagatggaaatcataaactgactcttggtttgatttggaatataatcctccactggcaggtcaaaaatgtaatgaaaaatatcatggctggattgcaacaaaccaacagtgaaaagattctcctgagctgggtccgacaatcaactcgtaattatccacaggttaatgtaatcaacttcaccaccagctggtctgatggcctggctttgaatgctctcatccatagtcataggccagacctatttgactggaatagtgtggtttgccagcagtcagccacacaacgactggaacatgcattcaacatcgccagatatcaattaggcatagagaaactactcgatcctgaagatgttgataccacctatccagataagaagtccatcttaatgtacatcacatcactcttccaagttttgcctcaacaagtgagcattgaagccatccaggaagtggaaatgttgccaaggccacctaaagtgactaaagaagaacattttcagttacatcatcaaatgcactattctcaacagatcacggtcagtctagcacagggatatgagagaacttcttcccctaagcctcgattcaagagctatgcctacacacaggctgcttatgtcaccacctctgaccctacacggagcccatttccttcacagcatttggaagctcctgaagacaagtcatttggcagttcattgatggagagtgaagtaaacctggaccgttatcaaacagctttagaagaagtattatcgtggcttctttctgctgaggacacattgcaagcacaaggagagatttctaatgatgtggaagtggtgaaagaccagtttcatactcatgaggggtacatgatggatttgacagcccatcagggccgggttggtaatattctacaattgggaagtaagctgattggaacaggaaaattatcagaagatgaagaaactgaagtacaagagcagatgaatctcctaaattcaagatgggaatgcctcagggtagctagcatggaaaaacaaagcaatttacatagagttttaatggatctccagaatcagaaactgaaagagttgaatgactggctaacaaaaacagaagaaagaacaaggaaaatggaggaagagcctcttggacctgatcttgaagacctaaaacgccaagtacaacaacataaggtgcttcaagaagatctagaacaagaacaagtcagggtcaattctctcactcacatggtggtggtagttgatgaatctagtggagatcacgcaactgctgctttggaagaacaacttaaggtattgggagatcgatgggcaaacatctgtagatggacagaagaccgctgggttcttttacaagacatccttctcaaatggcaacgtcttactgaagaacagtgcctttttagtgcatggctttcagaaaaagaagatgcagtgaacaagattcacacaactggctttaaagatcaaaatgaaatgttatcaagtcttcaaaaactggccgttttaaaagcggatctagaaaagaaaaagcaatccatgggcaaactgtattcactcaaacaagatcttctttcaacactgaagaataagtcagtgacccagaagacggaagcatggctggataactttgcccggtgttgggataatttagtccaaaaacttgaaaagagtacagcacagatttcacaggctgtcaccaccactcagccatcactaacacagacaactgtaatggaaacagtaactacggtgaccacaagggaacagatcctggtaaagcatgctcaagaggaacttccaccaccacctccccaaaagaagaggcagattactgtggattctgaaattaggaaaaggttggatgttgatataactgaacttcacagctggattactcgctcagaagctgtgttgcagagtcctgaatttgcaatctttcggaaggaaggcaacttctcagacttaaaagaaaaagtcaatgccatagagcgagaaaaagctgagaagttcagaaaactgcaagatgccagcagatcagctcaggccctggtggaacagatggtgaatgagggtgttaatgcagatagcatcaaacaagcctcagaacaactgaacagccggtggatcgaattctgccagttgctaagtgagagacttaactggctggagtatcagaacaacatcatcgctttctataatcagctacaacaattggagcagatgacaactactgctgaaaactggttgaaaatccaacccaccaccccatcagagccaacagcaattaaaagtcagttaaaaatttgtaaggatgaagtcaaccggctatcaggtcttcaacctcaaattgaacgattaaaaattcaaagcatagccctgaaagagaaaggacaaggacccatgttcctggatgcagactttgtggcctttacaaatcattttaagcaagtcttttctgatgtgcaggccagagagaaagagctacagacaatttttgacactttgccaccaatgcgctatcaggagaccatgagtgccatcaggacatgggtccagcagtcagaaaccaaactctccatacctcaacttagtgtcaccgactatgaaatcatggagcagagactcggggaattgcaggctttacaaagttctctgcaagagcaacaaagtggcctatactatctcagcaccactgtgaaagagatgtcgaagaaagcgccctctgaaattagccggaaatatcaatcagaatttgaagaaattgagggacgctggaagaagctctcctcccagctggttgagcattgtcaaaagctagaggagcaaatgaataaactccgaaaaattcagaatcacatacaaaccctgaagaaatggatggctgaagttgatgtttttctgaaggaggaatggcctgcccttggggattcagaaattctaaaaaagcagctgaaacagtgcagacttttagtcagtgatattcagacaattcagcccagtctaaacagtgtcaatgaaggtgggcagaagataaagaatgaagcagagccagagtttgcttcgagacttgagacagaactcaaagaacttaacactcagtgggatcacatgtgccaacaggtctatgccagaaaggaggccttgaagggaggtttggagaaaactgtaagcctccagaaagatctatcagagatgcacgaatggatgacacaagctgaagaagagtatcttgagagagattttgaatataaaactccagatgaattacagaaagcagttgaagagatgaagagagctaaagaagaggcccaacaaaaagaagcgaaagtgaaactccttactgagtctgtaaatagtgtcatagctcaagctccacctgtagcacaagaggccttaaaaaaggaacttgaaactctaaccaccaactaccagtggctctgcactaggctgaatgggaaatgcaagactttggaagaagtttgggcatgttggcatgagttattgtcatacttggagaaagcaaacaagtggctaaatgaagtagaatttaaacttaaaaccactgaaaacattcctggcggagctgaggaaatctctgaggtgctagattcacttgaaaatttgatgcgacattcagaggataacccaaatcagattcgcatattggcacagaccctaacagatggcggagtcatggatgagctaatcaatgaggaacttgagacatttaattctcgttggagggaactacatgaagaggctgtaaggaggcaaaagttgcttgaacagagcatccagtctgcccaggagactgaaaaatccttacacttaatccaggagtccctcacattcattgacaagcagttggcagcttatattgcagacaaggtggacgcagctcaaatgcctcaggaagcccagaaaatccaatctgatttgacaagtcatgagatcagtttagaagaaatgaagaaacataatcaggggaaggaggctgcccaaagagtcctgtctcagattgatgttgcacagaaaaaattacaagatgtctccatgaagtttcgattattccagaaaccagccaattttgagcagcgtctacaagaaagtaagatgattttagatgaagtgaagatgcacttgcctgcattggaaacaaagagtgtggaacaggaagtagtacagtcacagctaaatcattgtgtgaacttgtataaaagtctgagtgaagtgaagtctgaagtggaaatggtgataaagactggacgtcagattgtacagaaaaagcagacggaaaatcccaaagaacttgatgaaagagtaacagctttgaaattgcattataatgagctgggagcaaaggtaacagaaagaaagcaacagttggagaaatgcttgaaattgtcccgtaagatgcgaaaggaaatgaatgtcttgacagaatggctggcagctacagatatggaattgacaaagagatcagcagttgaaggaatgcctagtaatttggattctgaagttgcctggggaaaggctactcaaaaagagattgagaaacagaaggtgcacctgaagagtatcacagaggtaggagaggccttgaaaacagttttgggcaagaaggagacgttggtggaagataaactcagtcttctgaatagtaactggatagctgtcacctcccgagcagaagagtggttaaatcttttgttggaataccagaaacacatggaaacttttgaccagaatgtggaccacatcacaaagtggatcattcaggctgacacacttttggatgaatcagagaaaaagaaaccccagcaaaaagaagacgtgcttaagcgtttaaaggcagaactgaatgacatacgcccaaaggtggactctacacgtgaccaagcagcaaacttgatggcaaaccgcggtgaccactgcaggaaattagtagagccccaaatctcagagctcaaccatcgatttgcagccatttcacacagaattaagactggaaaggcctccattcctttgaaggaattggagcagtttaactcagatatacaaaaattgcttgaaccactggaggctgaaattcagcagggggtgaatctgaaagaggaagacttcaataaagatatgaatgaagacaatgagggtactgtaaaagaattgttgcaaagaggagacaacttacaacaaagaatcacagatgagagaaagcgagaggaaataaagataaaacagcagctgttacagacaaaacataatgctctcaaggatttgaggtctcaaagaagaaaaaaggctctagaaatttctcatcagtggtatcagtacaagaggcaggctgatgatctcctgaaatgcttggatgacattgaaaaaaaattagccagcctacctgagcccagagatgaaaggaaaataaaggaaattgatcgggaattgcagaagaagaaagaggagctgaatgcagtgcgtaggcaagctgagggcttgtctgaggatggggccgcaatggcagtggagccaactcagatccagctcagcaagcgctggcgggaaattgagagcaaatttgctcagtttcgaagactcaactttgcacaaattcacactgtccgtgaagaaacgatgatggtgatgactgaagacatgcctttggaaatttcttatgtgccttctacttatttgactgaaatcactcatgtctcacaagccctattagaagtggaacaacttctcaatgctcctgacctctgtgctaaggactttgaagatctctttaagcaagaggagtctctgaagaatataaaagatagtctacaacaaagctcaggtcggattgacattattcatagcaagaagacagcagcattgcaaagtgcaacgcctgtggaaagggtgaagctacaggaagctctctcccagcttgatttccaatgggaaaaagttaacaaaatgtacaaggaccgacaagggcgatttgacagatctgttgagaaatggcggcgttttcattatgatataaagatatttaatcagtggctaacagaagctgaacagtttctcagaaagacacaaattcctgagaattgggaacatgctaaatacaaatggtatcttaaggaactccaggatggcattgggcagcggcaaactgttgtcagaacattgaatgcaactggggaagaaataattcagcaatcctcaaaaacagatgccagtattctacaggaaaaattgggaagcctgaatctgcggtggcaggaggtctgcaaacagctgtcagacagaaaaaagaggctagaagaacaaaagaatatcttgtcagaatttcaaagagatttaaatgaatttgttttatggttggaggaagcagataacattgctagtatcccacttgaacctggaaaagagcagcaactaaaagaaaagcttgagcaagtcaagttactggtggaagagttgcccctgcgccagggaattctcaaacaattaaatgaaactggaggacccgtgcttgtaagtgctcccataagcccagaagagcaagataaacttgaaaataagctcaagcagacaaatctccagtggataaaggtttccagagctttacctgagaaacaaggagaaattgaagctcaaataaaagaccttgggcagcttgaaaaaaagcttgaagaccttgaagagcagttaaatcatctgctgctgtggttatctcctattaggaatcagttggaaatttataaccaaccaaaccaagaaggaccatttgacgttcaggaaactgaaatagcagttcaagctaaacaaccggatgtggaagagattttgtctaaagggcagcatttgtacaaggaaaaaccagccactcagccagtgaagaggaagttagaagatctgagctctgagtggaaggcggtaaaccgtttacttcaagagctgagggcaaagcagcctgacctagctcctggactgaccactattggagcctctcctactcagactgttactctggtgacacaacctgtggttactaaggaaactgccatctccaaactagaaatgccatcttccttgatgttggaggtacctgctctggcagatttcaaccgggcttggacagaacttaccgactggctttctctgcttgatcaagttataaaatcacagagggtgatggtgggtgaccttgaggatatcaacgagatgatcatcaagcagaaggcaacaatgcaggatttggaacagaggcgtccccagttggaagaactcattaccgctgcccaaaatttgaaaaacaagaccagcaatcaagaggctagaacaatcattacggatcgaattgaaagaattcagaatcagtgggatgaagtacaagaacaccttcagaaccggaggcaacagttgaatgaaatgttaaaggattcaacacaatggctggaagctaaggaagaagctgagcaggtcttaggacaggccagagccaagcttgagtcatggaaggagggtccctatacagtagatgcaatccaaaagaaaatcacagaaaccaagcagttggccaaagacctccgccagtggcagacaaatgtagatgtggcaaatgacttggccctgaaacttctccgggattattctgcagatgataccagaaaagtccacatgataacagagaatatcaatgcctcttggagaagcattcataaaagggtgagtgagcgagaggctgctttggaagaaactcatagattactgcaacagttccccctggacctggaaaagtttcttgcctggcttacagaagctgaaacaactgccaatgtcctacaggatgctacccgtaaggaaaggctcctagaagactccaagggagtaaaagagctgatgaaacaatggcaagacctccaaggtgaaattgaagctcacacagatgtttatcacaacctggatgaaaacagccaaaaaatcctgagatccctggaaggttccgatgatgcagtcctgttacaaagacgtttggataacatgaacttcaagtggagtgaacttcggaaaaagtctctcaacattaggtcccatttggaagccagttctgaccagtggaagcgtctgcacctttctctgcaggaacttctggtgtggctacagctgaaagatgatgaattaagccggcaggcacctattggaggcgactttccagcagttcagaagcagaacgatgtacatagggccttcaagagggaattgaaaactaaagaacctgtaatcatgagtactcttgagactgtacgaatatttctgacagagcagcctttggaaggactagagaaactctaccaggagcccagagagctgcctcctgaggagagagcccagaatgtcactcggcttctacgaaagcaggctgaggaggtcaatactgagtgggaaaaattgaacctgcactccgctgactggcagagaaaaatagatgagacccttgaaagactccaggaacttcaagaggccacggatgagctggacctcaagctgcgccaagctgaggtgatcaagggatcctggcagcccgtgggcgatctcctcattgactctctccaagatcacctcgagaaagtcaaggcacttcgaggagaaattgcgcctctgaaagagaacgtgagccacgtcaatgaccttgctcgccagcttaccactttgggcattcagctctcaccgtataacctcagcactctggaagacctgaacaccagatggaagcttctgcaggtggccgtcgaggaccgagtcaggcagctgcatgaagcccacagggactttggtccagcatctcagcactttctttccacgtctgtccagggtccctgggagagagccatctcgccaaacaaagtgccctactatatcaaccacgagactcaaacaacttgctgggaccatcccaaaatgacagagctctaccagtctttagctgacctgaataatgtcagattctcagcttataggactgccatgaaactccgaagactgcagaaggccctttgcttggatctcttgagcctgtcagctgcatgtgatgccttggaccagcacaacctcaagcaaaatgaccagcccatggatatcctgcagattattaattgtttgaccactatttatgaccgcctggagcaagagcacaacaatttggtcaacgtccctctctgcgtggatatgtgtctgaactggctgctgaatgtttatgatacgggacgaacagggaggatccgtgtcctgtcttttaaaactggcatcatttccctgtgtaaagcacatttggaagacaagtacagataccttttcaagcaagtggcaagttcaacaggattttgtgaccagcgcaggctgggcctccttctgcatgattctatccaaattccaagacagttgggtgaagttgcatcctttgggggcagtaacattgagccaagtgtccggagctgcttccaatttgctaataataagccagagatcgaagcggccctcttcctagactggatgagactggaaccccagtccatggtgtggctgcccgtcctgcacagagtggctgctgcagaaactgccaagcatcaggccaaatgtaacatctgcaaagagtgtccaatcattggattcaggtacaggagtctaaagcactttaattatgacatctgccaaagctgctttttttctggtcgagttgcaaaaggccataaaatgcactatcccatggtggaatattgcactccgactacatcaggagaagatgttcgagactttgccaaggtactaaaaaacaaatttcgaaccaaaaggtattttgcgaagcatccccgaatgggctacctgccagtgcagactgtcttagagggggacaacatggaaactcccgttactctgatcaacttctggccagtagattctgcgcctgcctcgtcccctcagctttcacacgatgatactcattcacgcattgaacattatgctagcaggctagcagaaatggaaaacagcaatggatcttatctaaatgatagcatctctcctaatgagagcatagatgatgaacatttgttaatccagcattactgccaaagtttgaaccaggactcccccctgagccagcctcgtagtcctgcccagatcttgatttccttagagagtgaggaaagaggggagctagagagaatcctagcagatcttgaggaagaaaacaggaatctgcaagcagaatatgaccgtctaaagcagcagcacgaacataaaggcctgtccccactgccgtcccctcctgaaatgatgcccacctctccccagagtccccgggatgctgagctcattgctgaggccaagctactgcgtcaacacaaaggccgcctggaagccaggatgcaaatcctggaagaccacaataaacagctggagtcacagttacacaggctaaggcagctgctggagcaaccccaggcagaggccaaagtgaatggcacaacggtgtcctctccttctacctctctacagaggtccgacagcagtcagcctatgctgctccgagtggttggcagtcaaacttcggactccatgggtgaggaagatcttctcagtcctccccaggacacaagcacagggttagaggaggtgatggagcaactcaacaactccttccctagttcaagaggaagaaatacccctggaaagccaatgagagaggacacaatgtaggaagtcttttccacatggcagatgatttgggcagagcgatggagtccttagtatcagtcatgacagatgaagaaggagcagaataaatgttttacaactcctgattcccgcatggtttttataatattcatacaacaaagaggattagacagtaagagtttacaagaaataaatctatatttttgtgaagggtagtggtattatactgtagatttcagtagtttctaagtctgttattgttttgttaacaatggcaggttttacacgtctatgcaattgtacaaaaaagttataagaaaactacatgtaaaatcttgatagctaaataacttgccatttctttatatggaacgcattttgggttgtttaaaaatttataacagttataaagaaagattgtaaactaaagtgtgctttataaaaaaaagttgtttataaaaacccctaaaaacaaaacaaacacacacacacacacatacacacacacacacaaaactttgaggcagcgcattgttttgcatccttttggcgtgatatccatatgaaattcatggctttttctttttttgcatattaaagataagacttcctctaccaccacaccaaatgactactacacactgctcatttgagaactgtcagctgagtggggcaggcttgagttttcatttcatatatctatatgtctataagtatataaatactatagttatatagataaagagatacgaatttctatagactgactttttccattttttaaatgttcatgtcacatcctaatagaaagaaattacttctagtcagtcatccaggcttacctgcttggtctagaatggatttttcccggagccggaagccaggaggaaactacaccacactaaaacattgtctacagctccagatgtttctcattttaaacaactttccactgacaacgaaagtaaagtaaagtattggatttttttaaagggaacatgtgaatgaatacacaggacttattatatcagagtgagtaatcggttggttggttgattgattgattgattgatacattcagcttcctgctgctagcaatgccacgatttagatttaatgatgcttcagtggaaatcaatcagaaggtattctgaccttgtgaacatcagaaggtattttttaactcccaagcagtagcaggacgatgatagggctggagggctatggattcccagcccatccctgtgaaggagtaggccactctttaagtgaaggattggatgattgttcataatacataaagttctctgtaattacaactaaattattatgccctcttctcacagtcaaaaggaactgggtggtttggtttttgttgcttttttagatttattgtcccatgtgggatgagtttttaaatgccacaagacataatttaaaataaataaactttgggaaaaggtgtaagacagtagccccatcacatttgtgatactgacaggtatcaacccagaagcccatgaactgtgtttccatcctttgcatttctctgcgagtagttccacacaggtttgtaagtaagtaagaaagaaggcaaattgattcaaatgttacaaaaaaacccttcttggtggattagacaggttaaatatataaacaaacaaacaaaaattgctcaaaaaagaggagaaaagctcaagaggaaaagctaaggactggtaggaaaaagctttactctttcatgccattttatttctttttgatttttaaatcattcattcaatagataccaccgtgtgacctataattttgcaaatctgttacctctgacatcaagtgtaattagcttttggagagtgggctgacatcaagtgtaattagcttttggagagtgggttttgtccattattaataattaattaattaacatcaaacacggcttctcatgctatttctacctcactttggttttggggtgttcctgataattgtgcacacctgagttcacagcttcaccacttgtccattgcgttattttctttttcctttataattctttctttttccttcataattttcaaaagaaaacccaaagctctaaggtaacaaattaccaaattacatgaagatttggtttttgtcttgcatttttttcctttatgtgacgctggaccttttctttacccaaggatttttaaaactcagatttaaaacaaggggttactttacatcctactaagaagtttaagtaagtaagtttcattctaaaatcagaggtaaatagagtgcataaataattttgttttaatctttttgtttttcttttagacacattagctctggagtgagtctgtcataatatttgaacaaaaattgagagctttattgctgcattttaagcataattaatttggacattatttcgtgttgtgttctttataaccaccgagtattaaactgtaaatcataatgtaactgaagcataaacatcacatggcatgttttgtcattgttttcaggtactgagttcttacttgagtatcataatatattgtgttttaacaccaacactgtaacatttacgaattatttttttaaacttcagttttactgcattttcacaacatatcagacttcaccaaatatatgccttactattgtattatagtactgctttactgtgtatctcaataaagcacgcagttatgttac

SEQ ID NO: 2218 - protein, 3562 aa, Homo sapiens
MKNIMAGLQQTNSEKILLSWVRQSTRNYPQVNVINFTTSWSDGLALNALIHSHRPDLFDWNSVVCQQSATQRLEHAFNIARYQLGIEKLLDPEDVDTTYPDKKSILMYITSLFQVLPQQVSIEAIQEVEMLPRPPKVTKEEHFQLHHQMHYSQQITVSLAQGYERTSSPKPRFKSYAYTQAAYVTTSDPTRSPFPSQHLEAPEDKSFGSSLMESEVNLDRYQTALEEVLSWLLSAEDTLQAQGEISNDVEVVKDQFHTHEGYMMDLTAHQGRVGNILQLGSKLIGTGKLSEDEETEVQEQMNLLNSRWECLRVASMEKQSNLHRVLMDLQNQKLKELNDWLTKTEERTRKMEEEPLGPDLEDLKRQVQQHKVLQEDLEQEQVRVNSLTHMVVVVDESSGDHATAALEEQLKVLGDRWANICRWTEDRWVLLQDILLKWQRLTEEQCLFSAWLSEKEDAVNKIHTTGFKDQNEMLSSLQKLAVLKADLEKKKQSMGKLYSLKQDLLSTLKNKSVTQKTEAWLDNFARCWDNLVQKLEKSTAQISQAVTTTQPSLTQTTVMETVTTVTTREQILVKHAQEELPPPPPQKKRQITVDSEIRKRLDVDITELHSWITRSEAVLQSPEFAIFRKEGNFSDLKEKVNAIEREKAEKFRKLQDASRSAQALVEQMVNEGVNADSIKQASEQLNSRWIEFCQLLSERLNWLEYQNNIIAFYNQLQQLEQMTTTAENWLKIQPTTPSEPTAIKSQLKICKDEVNRLSGLQPQIERLKIQSIALKEKGQGPMFLDADFVAFTNHFKQVFSDVQAREKELQTIFDTLPPMRYQETMSAIRTWVQQSETKLSIPQLSVTDYEIMEQRLGELQALQSSLQEQQSGLYYLSTTVKEMSKKAPSEISRKYQSEFEEIEGRWKKLSSQLVEHCQKLEEQMNKLRKIQNHIQTLKKWMAEVDVFLKEEWPALGDSEILKKQLKQCRLLVSDIQTIQPSLNSVNEGGQKIKNEAEPEFASRLETELKELNTQWDHMCQQVYARKEALKGGLEKTVSLQKDLSEMHEWMTQAEEEYLERDFEYKTPDELQKAVEEMKRAKEEAQQKEAKVKLLTESVNSVIAQAPPVAQEALKKELETLTTNYQWLCTRLNGKCKTLEEVWACWHELLSYLEKANKWLNEVEFKLKTTENIPGGAEEISEVLDSLENLMRHSEDNPNQIRILAQTLTDGGVMDELINEELETFNSRWRELHEEAVRRQKLLEQSIQSAQETEKSLHLIQESLTFIDKQLAAYIADKVDAAQMPQEAQKIQSDLTSHEISLEEMKKHNQGKEAAQRVLSQIDVAQKKLQDVSMKFRLFQKPANFEQRLQESKMILDEVKMHLPALETKSVEQEVVQSQLNHCVNLYKSLSEVKSEVEMVIKTGRQIVQKKQTENPKELDERVTALKLHYNELGAKVTERKQQLEKCLKLSRKMRKEMNVLTEWLAATDMELTKRSAVEGMPSNLDSEVAWGKATQKEIEKQKVHLKSITEVGEALKTVLGKKETLVEDKLSLLNSNWIAVTSRAEEWLNLLLEYQKHMETFDQNVDHITKWIIQADTLLDESEKKKPQQKEDVLKRLKAELNDIRPKVDSTRDQAANLMANRGDHCRKLVEPQISELNHRFAAISHRIKTGKASIPLKELEQFNSDIQKLLEPLEAEIQQGVNLKEEDFNKDMNEDNEGTVKELLQRGDNLQQRITDERKREEIKIKQQLLQTKHNALKDLRSQRRKKALEISHQWYQYKRQADDLLKCLDDIEKKLASLPEPRDERKIKEIDRELQKKKEELNAVRRQAEGLSEDGAAMAVEPTQIQLSKRWREIESKFAQFRRLNFAQIHTVREETMMVMTEDMPLEISYVPSTYLTEITHVSQALLEVEQLLNAPDLCAKDFEDLFKQEESLKNIKDSLQQSSGRIDIIHSKKTAALQSATPVERVKLQEALSQLDFQWEKVNKMYKDRQGRFDRSVEKWRRFHYDIKIFNQWLTEAEQFLRKTQIPENWEHAKYKWYLKELQDGIGQRQTVVRTLNATGEEIIQQSSKTDASILQEKLGSLNLRWQEVCKQLSDRKKRLEEQKNILSEFQRDLNEFVLWLEEADNIASIPLEPGKEQQLKEKLEQVKLLVEELPLRQGILKQLNETGGPVLVSAPISPEEQDKLENKLKQTNLQWIKVSRALPEKQGEIEAQIKDLGQLEKKLEDLEEQLNHLLLWLSPIRNQLEIYNQPNQEGPFDVQETEIAVQAKQPDVEEILSKGQHLYKEKPATQPVKRKLEDLSSEWKAVNRLLQELRAKQPDLAPGLTTIGASPTQTVTLVTQPVVTKETAISKLEMPSSLMLEVPALADFNRAWTELTDWLSLLDQVIKSQRVMVGDLEDINEMIIKQKATMQDLEQRRPQLEELITAAQNLKNKTSNQEARTIITDRIERIQNQWDEVQEHLQNRRQQLNEMLKDSTQWLEAKEEAEQVLGQARAKLESWKEGPYTVDAIQKKITETKQLAKDLRQWQTNVDVANDLALKLLRDYSADDTRKVHMITENINASWRSIHKRVSEREAALEETHRLLQQFPLDLEKFLAWLTEAETTANVLQDATRKERLLEDSKGVKELMKQWQDLQGEIEAHTDVYHNLDENSQKILRSLEGSDDAVLLQRRLDNMNFKWSELRKKSLNIRSHLEASSDQWKRLHLSLQELLVWLQLKDDELSRQAPIGGDFPAVQKQNDVHRAFKRELKTKEPVIMSTLETVRIFLTEQPLEGLEKLYQEPRELPPEERAQNVTRLLRKQAEEVNTEWEKLNLHSADWQRKIDETLERLQELQEATDELDLKLRQAEVIKGSWQPVGDLLIDSLQDHLEKVKALRGEIAPLKENVSHVNDLARQLTTLGIQLSPYNLSTLEDLNTRWKLLQVAVEDRVRQLHEAHRDFGPASQHFLSTSVQGPWERAISPNKVPYYINHETQTTCWDHPKMTELYQSLADLNNVRFSAYRTAMKLRRLQKALCLDLLSLSAACDALDQHNLKQNDQPMDILQIINCLTTIYDRLEQEHNNLVNVPLCVDMCLNWLLNVYDTGRTGRIRVLSFKTGIISLCKAHLEDKYRYLFKQVASSTGFCDQRRLGLLLHDSIQIPRQLGEVASFGGSNIEPSVRSCFQFANNKPEIEAALFLDWMRLEPQSMVWLPVLHRVAAAETAKHQAKCNICKECPIIGFRYRSLKHFNYDICQSCFFSGRVAKGHKMHYPMVEYCTPTTSGEDVRDFAKVLKNKFRTKRYFAKHPRMGYLPVQTVLEGDNMETPVTLINFWPVDSAPASSPQLSHDDTHSRIEHYASRLAEMENSNGSYLNDSISPNESIDDEHLLIQHYCQSLNQDSPLSQPRSPAQILISLESEERGELERILADLEEENRNLQAEYDRLKQQHEHKGLSPLPSPPEMMPTSPQSPRDAELIAEAKLLRQHKGRLEARMQILEDHNKQLESQLHRLRQLLEQPQAEAKVNGTTVSSPSTSLQRSDSSQPMLLRVVGSQTSDSMGEEDLLSPPQDTSTGLEEVMEQLNNSFPSSRGRNTPGKPMREDTM

SEQ ID NO: 2219 - DNA, 14000 bp, Homo sapiens
atgctgtctgtgaagctgaatctgtgagaacacctcactattcacggcaaccggagtggaagaaacaggtgcaaaaagattgtgtgtttgtctgcttttgtgaggctggtcagagattctgtgcctgctttatctgtgcttggctatgactctacctccaggtttaccataccccatagaatgtgtaagagaaaagtaccaacagggaaatcagcaaaaagctttcctatgaaggtgtgtagccagcctccgcagaatttgaaatgtctgaggtttcttctgatgaaagagaagatgttcaaaagaaaacattcacaaaatgggtaaatgcacaattttctaagtttgggaagcagcatattgagaacctcttcagtgacctacaggatgggaggcgcctcctagacctcctcgaaggcctgacagggcaaaaactgccaaaagaaaaaggatccacaagagttcatgccctgaacaatgtcaacaaggcactgcgggttttgcagaacaataatgttgatttagtgaatattggaagtactgacatcgtagatggaaatcataaactgactcttggtttgatttggaatataatcctccactggcaggtcaaaaatgtaatgaaaaatatcatggctggattgcaacaaaccaacagtgaaaagattctcctgagctgggtccgacaatcaactcgtaattatccacaggttaatgtaatcaacttcaccaccagctggtctgatggcctggctttgaatgctctcatccatagtcataggccagacctatttgactggaatagtgtggtttgccagcagtcagccacacaacgactggaacatgcattcaacatcgccagatatcaattaggcatagagaaactactcgatcctgaagatgttgataccacctatccagataagaagtccatcttaatgtacatcacatcactcttccaagttttgcctcaacaagtgagcattgaagccatccaggaagtggaaatgttgccaaggccacctaaagtgactaaagaagaacattttcagttacatcatcaaatgcactattctcaacagatcacggtcagtctagcacagggatatgagagaacttcttcccctaagcctcgattcaagagctatgcctacacacaggctgcttatgtcaccacctctgaccctacacggagcccatttccttcacagcatttggaagctcctgaagacaagtcatttggcagttcattgatggagagtgaagtaaacctggaccgttatcaaacagctttagaagaagtattatcgtggcttctttctgctgaggacacattgcaagcacaaggagagatttctaatgatgtggaagtggtgaaagaccagtttcatactcatgaggggtacatgatggatttgacagcccatcagggccgggttggtaatattctacaattgggaagtaagctgattggaacaggaaaattatcagaagatgaagaaactgaagtacaagagcagatgaatctcctaaattcaagatgggaatgcctcagggtagctagcatggaaaaacaaagcaatttacatagagttttaatggatctccagaatcagaaactgaaagagttgaatgactggctaacaaaaacagaagaaagaacaaggaaaatggaggaagagcctcttggacctgatcttgaagacctaaaacgccaagtacaacaacataaggtgcttcaagaagatctagaacaagaacaagtcagggtcaattctctcactcacatggtggtggtagttgatgaatctagtggagatcacgcaactgctgctttggaagaacaacttaaggtattgggagatcgatgggcaaacatctgtagatggacagaagaccgctgggttcttttacaagacatccttctcaaatggcaacgtcttactgaagaacagtgcctttttagtgcatggctttcagaaaaagaagatgcagtgaacaagattcacacaactggctttaaagatcaaaatgaaatgttatcaagtcttcaaaaactggccgttttaaaagcggatctagaaaagaaaaagcaatccatgggcaaactgtattcactcaaacaagatcttctttcaacactgaagaataagtcagtgacccagaagacggaagcatggctggataactttgcccggtgttgggataatttagtccaaaaacttgaaaagagtacagcacagatttcacaggctgtcaccaccactcagccatcactaacacagacaactgtaatggaaacagtaactacggtgaccacaagggaacagatcctggtaaagcatgctcaagaggaacttccaccaccacctccccaaaagaagaggcagattactgtggattctgaaattaggaaaaggttggatgttgatataactgaacttcacagctggattactcgctcagaagctgtgttgcagagtcctgaatttgcaatctttcggaaggaaggcaacttctcagacttaaaagaaaaagtcaatgccatagagcgagaaaaagctgagaagttcagaaaactgcaagatgccagcagatcagctcaggccctggtggaacagatggtgaatgagggtgttaatgcagatagcatcaaacaagcctcagaacaactgaacagccggtggatcgaattctgccagttgctaagtgagagacttaactggctggagtatcagaacaacatcatcgctttctataatcagctacaacaattggagcagatgacaactactgctgaaaactggttgaaaatccaacccaccaccccatcagagccaacagcaattaaaagtcagttaaaaatttgtaaggatgaagtcaaccggctatcaggtcttcaacctcaaattgaacgattaaaaattcaaagcatagccctgaaagagaaaggacaaggacccatgttcctggatgcagactttgtggcctttacaaatcattttaagcaagtcttttctgatgtgcaggccagagagaaagagctacagacaatttttgacactttgccaccaatgcgctatcaggagaccatgagtgccatcaggacatgggtccagcagtcagaaaccaaactctccatacctcaacttagtgtcaccgactatgaaatcatggagcagagactcggggaattgcaggctttacaaagttctctgcaagagcaacaaagtggcctatactatctcagcaccactgtgaaagagatgtcgaagaaagcgccctctgaaattagccggaaatatcaatcagaatttgaagaaattgagggacgctggaagaagctctcctcccagctggttgagcattgtcaaaagctagaggagcaaatgaataaactccgaaaaattcagaatcacatacaaaccctgaagaaatggatggctgaagttgatgtttttctgaaggaggaatggcctgcccttggggattcagaaattctaaaaaagcagctgaaacagtgcagacttttagtcagtgatattcagacaattcagcccagtctaaacagtgtcaatgaaggtgggcagaagataaagaatgaagcagagccagagtttgcttcgagacttgagacagaactcaaagaacttaacactcagtgggatcacatgtgccaacaggtctatgccagaaaggaggccttgaagggaggtttggagaaaactgtaagcctccagaaagatctatcagagatgcacgaatggatgacacaagctgaagaagagtatcttgagagagattttgaatataaaactccagatgaattacagaaagcagttgaagagatgaagagagctaaagaagaggcccaacaaaaagaagcgaaagtgaaactccttactgagtctgtaaatagtgtcatagctcaagctccacctgtagcacaagaggccttaaaaaaggaacttgaaactctaaccaccaactaccagtggctctgcactaggctgaatgggaaatgcaagactttggaagaagtttgggcatgttggcatgagttattgtcatacttggagaaagcaaacaagtggctaaatgaagtagaatttaaacttaaaaccactgaaaacattcctggcggagctgaggaaatctctgaggtgctagattcacttgaaaatttgatgcgacattcagaggataacccaaatcagattcgcatattggcacagaccctaacagatggcggagtcatggatgagctaatcaatgaggaacttgagacatttaattctcgttggagggaactacatgaagaggctgtaaggaggcaaaagttgcttgaacagagcatccagtctgcccaggagactgaaaaatccttacacttaatccaggagtccctcacattcattgacaagcagttggcagcttatattgcagacaaggtggacgcagctcaaatgcctcaggaagcccagaaaatccaatctgatttgacaagtcatgagatcagtttagaagaaatgaagaaacataatcaggggaaggaggctgcccaaagagtcctgtctcagattgatgttgcacagaaaaaattacaagatgtctccatgaagtttcgattattccagaaaccagccaattttgagcagcgtctacaagaaagtaagatgattttagatgaagtgaagatgcacttgcctgcattggaaacaaagagtgtggaacaggaagtagtacagtcacagctaaatcattgtgtgaacttgtataaaagtctgagtgaagtgaagtctgaagtggaaatggtgataaagactggacgtcagattgtacagaaaaagcagacggaaaatcccaaagaacttgatgaaagagtaacagctttgaaattgcattataatgagctgggagcaaaggtaacagaaagaaagcaacagttggagaaatgcttgaaattgtcccgtaagatgcgaaaggaaatgaatgtcttgacagaatggctggcagctacagatatggaattgacaaagagatcagcagttgaaggaatgcctagtaatttggattctgaagttgcctggggaaaggctactcaaaaagagattgagaaacagaaggtgcacctgaagagtatcacagaggtaggagaggccttgaaaacagttttgggcaagaaggagacgttggtggaagataaactcagtcttctgaatagtaactggatagctgtcacctcccgagcagaagagtggttaaatcttttgttggaataccagaaacacatggaaacttttgaccagaatgtggaccacatcacaaagtggatcattcaggctgacacacttttggatgaatcagagaaaaagaaaccccagcaaaaagaagacgtgcttaagcgtttaaaggcagaactgaatgacatacgcccaaaggtggactctacacgtgaccaagcagcaaacttgatggcaaaccgcggtgaccactgcaggaaattagtagagccccaaatctcagagctcaaccatcgatttgcagccatttcacacagaattaagactggaaaggcctccattcctttgaaggaattggagcagtttaactcagatatacaaaaattgcttgaaccactggaggctgaaattcagcagggggtgaatctgaaagaggaagacttcaataaagatatgaatgaagacaatgagggtactgtaaaagaattgttgcaaagaggagacaacttacaacaaagaatcacagatgagagaaagcgagaggaaataaagataaaacagcagctgttacagacaaaacataatgctctcaaggatttgaggtctcaaagaagaaaaaaggctctagaaatttctcatcagtggtatcagtacaagaggcaggctgatgatctcctgaaatgcttggatgacattgaaaaaaaattagccagcctacctgagcccagagatgaaaggaaaataaaggaaattgatcgggaattgcagaagaagaaagaggagctgaatgcagtgcgtaggcaagctgagggcttgtctgaggatggggccgcaatggcagtggagccaactcagatccagctcagcaagcgctggcgggaaattgagagcaaatttgctcagtttcgaagactcaactttgcacaaattcacactgtccgtgaagaaacgatgatggtgatgactgaagacatgcctttggaaatttcttatgtgccttctacttatttgactgaaatcactcatgtctcacaagccctattagaagtggaacaacttctcaatgctcctgacctctgtgctaaggactttgaagatctctttaagcaagaggagtctctgaagaatataaaagatagtctacaacaaagctcaggtcggattgacattattcatagcaagaagacagcagcattgcaaagtgcaacgcctgtggaaagggtgaagctacaggaagctctctcccagcttgatttccaatgggaaaaagttaacaaaatgtacaaggaccgacaagggcgatttgacagatctgttgagaaatggcggcgttttcattatgatataaagatatttaatcagtggctaacagaagctgaacagtttctcagaaagacacaaattcctgagaattgggaacatgctaaatacaaatggtatcttaaggaactccaggatggcattgggcagcggcaaactgttgtcagaacattgaatgcaactggggaagaaataattcagcaatcctcaaaaacagatgccagtattctacaggaaaaattgggaagcctgaatctgcggtggcaggaggtctgcaaacagctgtcagacagaaaaaagaggctagaagaacaaaagaatatcttgtcagaatttcaaagagatttaaatgaatttgttttatggttggaggaagcagataacattgctagtatcccacttgaacctggaaaagagcagcaactaaaagaaaagcttgagcaagtcaagttactggtggaagagttgcccctgcgccagggaattctcaaacaattaaatgaaactggaggacccgtgcttgtaagtgctcccataagcccagaagagcaagataaacttgaaaataagctcaagcagacaaatctccagtggataaaggtttccagagctttacctgagaaacaaggagaaattgaagctcaaataaaagaccttgggcagcttgaaaaaaagcttgaagaccttgaagagcagttaaatcatctgctgctgtggttatctcctattaggaatcagttggaaatttataaccaaccaaaccaagaaggaccatttgacgttcaggaaactgaaatagcagttcaagctaaacaaccggatgtggaagagattttgtctaaagggcagcatttgtacaaggaaaaaccagccactcagccagtgaagaggaagttagaagatctgagctctgagtggaaggcggtaaaccgtttacttcaagagctgagggcaaagcagcctgacctagctcctggactgaccactattggagcctctcctactcagactgttactctggtgacacaacctgtggttactaaggaaactgccatctccaaactagaaatgccatcttccttgatgttggaggtacctgctctggcagatttcaaccgggcttggacagaacttaccgactggctttctctgcttgatcaagttataaaatcacagagggtgatggtgggtgaccttgaggatatcaacgagatgatcatcaagcagaaggcaacaatgcaggatttggaacagaggcgtccccagttggaagaactcattaccgctgcccaaaatttgaaaaacaagaccagcaatcaagaggctagaacaatcattacggatcgaattgaaagaattcagaatcagtgggatgaagtacaagaacaccttcagaaccggaggcaacagttgaatgaaatgttaaaggattcaacacaatggctggaagctaaggaagaagctgagcaggtcttaggacaggccagagccaagcttgagtcatggaaggagggtccctatacagtagatgcaatccaaaagaaaatcacagaaaccaagcagttggccaaagacctccgccagtggcagacaaatgtagatgtggcaaatgacttggccctgaaacttctccgggattattctgcagatgataccagaaaagtccacatgataacagagaatatcaatgcctcttggagaagcattcataaaagggtgagtgagcgagaggctgctttggaagaaactcatagattactgcaacagttccccctggacctggaaaagtttcttgcctggcttacagaagctgaaacaactgccaatgtcctacaggatgctacccgtaaggaaaggctcctagaagactccaagggagtaaaagagctgatgaaacaatggcaagacctccaaggtgaaattgaagctcacacagatgtttatcacaacctggatgaaaacagccaaaaaatcctgagatccctggaaggttccgatgatgcagtcctgttacaaagacgtttggataacatgaacttcaagtggagtgaacttcggaaaaagtctctcaacattaggtcccatttggaagccagttctgaccagtggaagcgtctgcacctttctctgcaggaacttctggtgtggctacagctgaaagatgatgaattaagccggcaggcacctattggaggcgactttccagcagttcagaagcagaacgatgtacatagggccttcaagagggaattgaaaactaaagaacctgtaatcatgagtactcttgagactgtacgaatatttctgacagagcagcctttggaaggactagagaaactctaccaggagcccagagagctgcctcctgaggagagagcccagaatgtcactcggcttctacgaaagcaggctgaggaggtcaatactgagtgggaaaaattgaacctgcactccgctgactggcagagaaaaatagatgagacccttgaaagactccaggaacttcaagaggccacggatgagctggacctcaagctgcgccaagctgaggtgatcaagggatcctggcagcccgtgggcgatctcctcattgactctctccaagatcacctcgagaaagtcaaggcacttcgaggagaaattgcgcctctgaaagagaacgtgagccacgtcaatgaccttgctcgccagcttaccactttgggcattcagctctcaccgtataacctcagcactctggaagacctgaacaccagatggaagcttctgcaggtggccgtcgaggaccgagtcaggcagctgcatgaagcccacagggactttggtccagcatctcagcactttctttccacgtctgtccagggtccctgggagagagccatctcgccaaacaaagtgccctactatatcaaccacgagactcaaacaacttgctgggaccatcccaaaatgacagagctctaccagtctttagctgacctgaataatgtcagattctcagcttataggactgccatgaaactccgaagactgcagaaggccctttgcttggatctcttgagcctgtcagctgcatgtgatgccttggaccagcacaacctcaagcaaaatgaccagcccatggatatcctgcagattattaattgtttgaccactatttatgaccgcctggagcaagagcacaacaatttggtcaacgtccctctctgcgtggatatgtgtctgaactggctgctgaatgtttatgatacgggacgaacagggaggatccgtgtcctgtcttttaaaactggcatcatttccctgtgtaaagcacatttggaagacaagtacagataccttttcaagcaagtggcaagttcaacaggattttgtgaccagcgcaggctgggcctccttctgcatgattctatccaaattccaagacagttgggtgaagttgcatcctttgggggcagtaacattgagccaagtgtccggagctgcttccaatttgctaataataagccagagatcgaagcggccctcttcctagactggatgagactggaaccccagtccatggtgtggctgcccgtcctgcacagagtggctgctgcagaaactgccaagcatcaggccaaatgtaacatctgcaaagagtgtccaatcattggattcaggtacaggagtctaaagcactttaattatgacatctgccaaagctgctttttttctggtcgagttgcaaaaggccataaaatgcactatcccatggtggaatattgcactccgactacatcaggagaagatgttcgagactttgccaaggtactaaaaaacaaatttcgaaccaaaaggtattttgcgaagcatccccgaatgggctacctgccagtgcagactgtcttagagggggacaacatggaaactcccgttactctgatcaacttctggccagtagattctgcgcctgcctcgtcccctcagctttcacacgatgatactcattcacgcattgaacattatgctagcaggctagcagaaatggaaaacagcaatggatcttatctaaatgatagcatctctcctaatgagagcatagatgatgaacatttgttaatccagcattactgccaaagtttgaaccaggactcccccctgagccagcctcgtagtcctgcccagatcttgatttccttagagagtgaggaaagaggggagctagagagaatcctagcagatcttgaggaagaaaacaggaatctgcaagcagaatatgaccgtctaaagcagcagcacgaacataaaggcctgtccccactgccgtcccctcctgaaatgatgcccacctctccccagagtccccgggatgctgagctcattgctgaggccaagctactgcgtcaacacaaaggccgcctggaagccaggatgcaaatcctggaagaccacaataaacagctggagtcacagttacacaggctaaggcagctgctggagcaaccccaggcagaggccaaagtgaatggcacaacggtgtcctctccttctacctctctacagaggtccgacagcagtcagcctatgctgctccgagtggttggcagtcaaacttcggactccatgggtgaggaagatcttctcagtcctccccaggacacaagcacagggttagaggaggtgatggagcaactcaacaactccttccctagttcaagaggaagaaatacccctggaaagccaatgagagaggacacaatgtaggaagtcttttccacatggcagatgatttgggcagagcgatggagtccttagtatcagtcatgacagatgaagaaggagcagaataaatgttttacaactcctgattcccgcatggtttttataatattcatacaacaaagaggattagacagtaagagtttacaagaaataaatctatatttttgtgaagggtagtggtattatactgtagatttcagtagtttctaagtctgttattgttttgttaacaatggcaggttttacacgtctatgcaattgtacaaaaaagttataagaaaactacatgtaaaatcttgatagctaaataacttgccatttctttatatggaacgcattttgggttgtttaaaaatttataacagttataaagaaagattgtaaactaaagtgtgctttataaaaaaaagttgtttataaaaacccctaaaaacaaaacaaacacacacacacacacatacacacacacacacaaaactttgaggcagcgcattgttttgcatccttttggcgtgatatccatatgaaattcatggctttttctttttttgcatattaaagataagacttcctctaccaccacaccaaatgactactacacactgctcatttgagaactgtcagctgagtggggcaggcttgagttttcatttcatatatctatatgtctataagtatataaatactatagttatatagataaagagatacgaatttctatagactgactttttccattttttaaatgttcatgtcacatcctaatagaaagaaattacttctagtcagtcatccaggcttacctgcttggtctagaatggatttttcccggagccggaagccaggaggaaactacaccacactaaaacattgtctacagctccagatgtttctcattttaaacaactttccactgacaacgaaagtaaagtaaagtattggatttttttaaagggaacatgtgaatgaatacacaggacttattatatcagagtgagtaatcggttggttggttgattgattgattgattgatacattcagcttcctgctgctagcaatgccacgatttagatttaatgatgcttcagtggaaatcaatcagaaggtattctgaccttgtgaacatcagaaggtattttttaactcccaagcagtagcaggacgatgatagggctggagggctatggattcccagcccatccctgtgaaggagtaggccactctttaagtgaaggattggatgattgttcataatacataaagttctctgtaattacaactaaattattatgccctcttctcacagtcaaaaggaactgggtggtttggtttttgttgcttttttagatttattgtcccatgtgggatgagtttttaaatgccacaagacataatttaaaataaataaactttgggaaaaggtgtaagacagtagccccatcacatttgtgatactgacaggtatcaacccagaagcccatgaactgtgtttccatcctttgcatttctctgcgagtagttccacacaggtttgtaagtaagtaagaaagaaggcaaattgattcaaatgttacaaaaaaacccttcttggtggattagacaggttaaatatataaacaaacaaacaaaaattgctcaaaaaagaggagaaaagctcaagaggaaaagctaaggactggtaggaaaaagctttactctttcatgccattttatttctttttgatttttaaatcattcattcaatagataccaccgtgtgacctataattttgcaaatctgttacctctgacatcaagtgtaattagcttttggagagtgggctgacatcaagtgtaattagcttttggagagtgggttttgtccattattaataattaattaattaacatcaaacacggcttctcatgctatttctacctcactttggttttggggtgttcctgataattgtgcacacctgagttcacagcttcaccacttgtccattgcgttattttctttttcctttataattctttctttttccttcataattttcaaaagaaaacccaaagctctaaggtaacaaattaccaaattacatgaagatttggtttttgtcttgcatttttttcctttatgtgacgctggaccttttctttacccaaggatttttaaaactcagatttaaaacaaggggttactttacatcctactaagaagtttaagtaagtaagtttcattctaaaatcagaggtaaatagagtgcataaataattttgttttaatctttttgtttttcttttagacacattagctctggagtgagtctgtcataatatttgaacaaaaattgagagctttattgctgcattttaagcataattaatttggacattatttcgtgttgtgttctttataaccaccgagtattaaactgtaaatcataatgtaactgaagcataaacatcacatggcatgttttgtcattgttttcaggtactgagttcttacttgagtatcataatatattgtgttttaacaccaacactgtaacatttacgaattatttttttaaacttcagttttactgcattttcacaacatatcagacttcaccaaatatatgccttactattgtattatagtactgctttactgtgtatctcaataaagcacgcagttatgttac

SEQ ID NO: 2220 - protein, 3681 aa, Homo sapiens
MSEVSSDEREDVQKKTFTKWVNAQFSKFGKQHIENLFSDLQDGRRLLDLLEGLTGQKLPKEKGSTRVHALNNVNKALRVLQNNNVDLVNIGSTDIVDGNHKLTLGLIWNIILHWQVKNVMKNIMAGLQQTNSEKILLSWVRQSTRNYPQVNVINFTTSWSDGLALNALIHSHRPDLFDWNSVVCQQSATQRLEHAFNIARYQLGIEKLLDPEDVDTTYPDKKSILMYITSLFQVLPQQVSIEAIQEVEMLPRPPKVTKEEHFQLHHQMHYSQQITVSLAQGYERTSSPKPRFKSYAYTQAAYVTTSDPTRSPFPSQHLEAPEDKSFGSSLMESEVNLDRYQTALEEVLSWLLSAEDTLQAQGEISNDVEVVKDQFHTHEGYMMDLTAHQGRVGNILQLGSKLIGTGKLSEDEETEVQEQMNLLNSRWECLRVASMEKQSNLHRVLMDLQNQKLKELNDWLTKTEERTRKMEEEPLGPDLEDLKRQVQQHKVLQEDLEQEQVRVNSLTHMVVVVDESSGDHATAALEEQLKVLGDRWANICRWTEDRWVLLQDILLKWQRLTEEQCLFSAWLSEKEDAVNKIHTTGFKDQNEMLSSLQKLAVLKADLEKKKQSMGKLYSLKQDLLSTLKNKSVTQKTEAWLDNFARCWDNLVQKLEKSTAQISQAVTTTQPSLTQTTVMETVTTVTTREQILVKHAQEELPPPPPQKKRQITVDSEIRKRLDVDITELHSWITRSEAVLQSPEFAIFRKEGNFSDLKEKVNAIEREKAEKFRKLQDASRSAQALVEQMVNEGVNADSIKQASEQLNSRWIEFCQLLSERLNWLEYQNNIIAFYNQLQQLEQMTTTAENWLKIQPTTPSEPTAIKSQLKICKDEVNRLSGLQPQIERLKIQSIALKEKGQGPMFLDADFVAFTNHFKQVFSDVQAREKELQTIFDTLPPMRYQETMSAIRTWVQQSETKLSIPQLSVTDYEIMEQRLGELQALQSSLQEQQSGLYYLSTTVKEMSKKAPSEISRKYQSEFEEIEGRWKKLSSQLVEHCQKLEEQMNKLRKIQNHIQTLKKWMAEVDVFLKEEWPALGDSEILKKQLKQCRLLVSDIQTIQPSLNSVNEGGQKIKNEAEPEFASRLETELKELNTQWDHMCQQVYARKEALKGGLEKTVSLQKDLSEMHEWMTQAEEEYLERDFEYKTPDELQKAVEEMKRAKEEAQQKEAKVKLLTESVNSVIAQAPPVAQEALKKELETLTTNYQWLCTRLNGKCKTLEEVWACWHELLSYLEKANKWLNEVEFKLKTTENIPGGAEEISEVLDSLENLMRHSEDNPNQIRILAQTLTDGGVMDELINEELETFNSRWRELHEEAVRRQKLLEQSIQSAQETEKSLHLIQESLTFIDKQLAAYIADKVDAAQMPQEAQKIQSDLTSHEISLEEMKKHNQGKEAAQRVLSQIDVAQKKLQDVSMKFRLFQKPANFEQRLQESKMILDEVKMHLPALETKSVEQEVVQSQLNHCVNLYKSLSEVKSEVEMVIKTGRQIVQKKQTENPKELDERVTALKLHYNELGAKVTERKQQLEKCLKLSRKMRKEMNVLTEWLAATDMELTKRSAVEGMPSNLDSEVAWGKATQKEIEKQKVHLKSITEVGEALKTVLGKKETLVEDKLSLLNSNWIAVTSRAEEWLNLLLEYQKHMETFDQNVDHITKWIIQADTLLDESEKKKPQQKEDVLKRLKAELNDIRPKVDSTRDQAANLMANRGDHCRKLVEPQISELNHRFAAISHRIKTGKASIPLKELEQFNSDIQKLLEPLEAEIQQGVNLKEEDFNKDMNEDNEGTVKELLQRGDNLQQRITDERKREEIKIKQQLLQTKHNALKDLRSQRRKKALEISHQWYQYKRQADDLLKCLDDIEKKLASLPEPRDERKIKEIDRELQKKKEELNAVRRQAEGLSEDGAAMAVEPTQIQLSKRWREIESKFAQFRRLNFAQIHTVREETMMVMTEDMPLEISYVPSTYLTEITHVSQALLEVEQLLNAPDLCAKDFEDLFKQEESLKNIKDSLQQSSGRIDIIHSKKTAALQSATPVERVKLQEALSQLDFQWEKVNKMYKDRQGRFDRSVEKWRRFHYDIKIFNQWLTEAEQFLRKTQIPENWEHAKYKWYLKELQDGIGQRQTVVRTLNATGEEIIQQSSKTDASILQEKLGSLNLRWQEVCKQLSDRKKRLEEQKNILSEFQRDLNEFVLWLEEADNIASIPLEPGKEQQLKEKLEQVKLLVEELPLRQGILKQLNETGGPVLVSAPISPEEQDKLENKLKQTNLQWIKVSRALPEKQGEIEAQIKDLGQLEKKLEDLEEQLNHLLLWLSPIRNQLEIYNQPNQEGPFDVQETEIAVQAKQPDVEEILSKGQHLYKEKPATQPVKRKLEDLSSEWKAVNRLLQELRAKQPDLAPGLTTIGASPTQTVTLVTQPVVTKETAISKLEMPSSLMLEVPALADFNRAWTELTDWLSLLDQVIKSQRVMVGDLEDINEMIIKQKATMQDLEQRRPQLEELITAAQNLKNKTSNQEARTIITDRIERIQNQWDEVQEHLQNRRQQLNEMLKDSTQWLEAKEEAEQVLGQARAKLESWKEGPYTVDAIQKKITETKQLAKDLRQWQTNVDVANDLALKLLRDYSADDTRKVHMITENINASWRSIHKRVSEREAALEETHRLLQQFPLDLEKFLAWLTEAETTANVLQDATRKERLLEDSKGVKELMKQWQDLQGEIEAHTDVYHNLDENSQKILRSLEGSDDAVLLQRRLDNMNFKWSELRKKSLNIRSHLEASSDQWKRLHLSLQELLVWLQLKDDELSRQAPIGGDFPAVQKQNDVHRAFKRELKTKEPVIMSTLETVRIFLTEQPLEGLEKLYQEPRELPPEERAQNVTRLLRKQAEEVNTEWEKLNLHSADWQRKIDETLERLQELQEATDELDLKLRQAEVIKGSWQPVGDLLIDSLQDHLEKVKALRGEIAPLKENVSHVNDLARQLTTLGIQLSPYNLSTLEDLNTRWKLLQVAVEDRVRQLHEAHRDFGPASQHFLSTSVQGPWERAISPNKVPYYINHETQTTCWDHPKMTELYQSLADLNNVRFSAYRTAMKLRRLQKALCLDLLSLSAACDALDQHNLKQNDQPMDILQIINCLTTIYDRLEQEHNNLVNVPLCVDMCLNWLLNVYDTGRTGRIRVLSFKTGIISLCKAHLEDKYRYLFKQVASSTGFCDQRRLGLLLHDSIQIPRQLGEVASFGGSNIEPSVRSCFQFANNKPEIEAALFLDWMRLEPQSMVWLPVLHRVAAAETAKHQAKCNICKECPIIGFRYRSLKHFNYDICQSCFFSGRVAKGHKMHYPMVEYCTPTTSGEDVRDFAKVLKNKFRTKRYFAKHPRMGYLPVQTVLEGDNMETPVTLINFWPVDSAPASSPQLSHDDTHSRIEHYASRLAEMENSNGSYLNDSISPNESIDDEHLLIQHYCQSLNQDSPLSQPRSPAQILISLESEERGELERILADLEEENRNLQAEYDRLKQQHEHKGLSPLPSPPEMMPTSPQSPRDAELIAEAKLLRQHKGRLEARMQILEDHNKQLESQLHRLRQLLEQPQAEAKVNGTTVSSPSTSLQRSDSSQPMLLRVVGSQTSDSMGEEDLLSPPQDTSTGLEEVMEQLNNSFPSSRGRNTPGKPMREDTM

SEQ ID NO: 2221 - DNA, 14082 bp, Homo sapiens
atgctgtctgtgaagctgaatctgtgagaacacctcactattcacggcaaccggagtggaagaaacaggtgcaaaaagattgtgtgtttgtctgcttttgtgaggctggtcagagattctgtgcctgctttatctgtgcttggctatgactctacctccaggtttaccataccccatagaatgtgtaagagaaaagtaccaacagggaaatcagcaaaaagctttcctatgaaggtgtgtagccagcctccgcagaatttgaaatgtctgaggtttcttctggtgagtaaaagctgcagataatcaacagccattcagaagaatgataaatgccacaagcatttggaaacaggcttccctaaagatgaaagagaagatgttcaaaagaaaacattcacaaaatgggtaaatgcacaattttctaagtttgggaagcagcatattgagaacctcttcagtgacctacaggatgggaggcgcctcctagacctcctcgaaggcctgacagggcaaaaactgccaaaagaaaaaggatccacaagagttcatgccctgaacaatgtcaacaaggcactgcgggttttgcagaacaataatgttgatttagtgaatattggaagtactgacatcgtagatggaaatcataaactgactcttggtttgatttggaatataatcctccactggcaggtcaaaaatgtaatgaaaaatatcatggctggattgcaacaaaccaacagtgaaaagattctcctgagctgggtccgacaatcaactcgtaattatccacaggttaatgtaatcaacttcaccaccagctggtctgatggcctggctttgaatgctctcatccatagtcataggccagacctatttgactggaatagtgtggtttgccagcagtcagccacacaacgactggaacatgcattcaacatcgccagatatcaattaggcatagagaaactactcgatcctgaagatgttgataccacctatccagataagaagtccatcttaatgtacatcacatcactcttccaagttttgcctcaacaagtgagcattgaagccatccaggaagtggaaatgttgccaaggccacctaaagtgactaaagaagaacattttcagttacatcatcaaatgcactattctcaacagatcacggtcagtctagcacagggatatgagagaacttcttcccctaagcctcgattcaagagctatgcctacacacaggctgcttatgtcaccacctctgaccctacacggagcccatttccttcacagcatttggaagctcctgaagacaagtcatttggcagttcattgatggagagtgaagtaaacctggaccgttatcaaacagctttagaagaagtattatcgtggcttctttctgctgaggacacattgcaagcacaaggagagatttctaatgatgtggaagtggtgaaagaccagtttcatactcatgaggggtacatgatggatttgacagcccatcagggccgggttggtaatattctacaattgggaagtaagctgattggaacaggaaaattatcagaagatgaagaaactgaagtacaagagcagatgaatctcctaaattcaagatgggaatgcctcagggtagctagcatggaaaaacaaagcaatttacatagagttttaatggatctccagaatcagaaactgaaagagttgaatgactggctaacaaaaacagaagaaagaacaaggaaaatggaggaagagcctcttggacctgatcttgaagacctaaaacgccaagtacaacaacataaggtgcttcaagaagatctagaacaagaacaagtcagggtcaattctctcactcacatggtggtggtagttgatgaatctagtggagatcacgcaactgctgctttggaagaacaacttaaggtattgggagatcgatgggcaaacatctgtagatggacagaagaccgctgggttcttttacaagacatccttctcaaatggcaacgtcttactgaagaacagtgcctttttagtgcatggctttcagaaaaagaagatgcagtgaacaagattcacacaactggctttaaagatcaaaatgaaatgttatcaagtcttcaaaaactggccgttttaaaagcggatctagaaaagaaaaagcaatccatgggcaaactgtattcactcaaacaagatcttctttcaacactgaagaataagtcagtgacccagaagacggaagcatggctggataactttgcccggtgttgggataatttagtccaaaaacttgaaaagagtacagcacagatttcacaggctgtcaccaccactcagccatcactaacacagacaactgtaatggaaacagtaactacggtgaccacaagggaacagatcctggtaaagcatgctcaagaggaacttccaccaccacctccccaaaagaagaggcagattactgtggattctgaaattaggaaaaggttggatgttgatataactgaacttcacagctggattactcgctcagaagctgtgttgcagagtcctgaatttgcaatctttcggaaggaaggcaacttctcagacttaaaagaaaaagtcaatgccatagagcgagaaaaagctgagaagttcagaaaactgcaagatgccagcagatcagctcaggccctggtggaacagatggtgaatgagggtgttaatgcagatagcatcaaacaagcctcagaacaactgaacagccggtggatcgaattctgccagttgctaagtgagagacttaactggctggagtatcagaacaacatcatcgctttctataatcagctacaacaattggagcagatgacaactactgctgaaaactggttgaaaatccaacccaccaccccatcagagccaacagcaattaaaagtcagttaaaaatttgtaaggatgaagtcaaccggctatcaggtcttcaacctcaaattgaacgattaaaaattcaaagcatagccctgaaagagaaaggacaaggacccatgttcctggatgcagactttgtggcctttacaaatcattttaagcaagtcttttctgatgtgcaggccagagagaaagagctacagacaatttttgacactttgccaccaatgcgctatcaggagaccatgagtgccatcaggacatgggtccagcagtcagaaaccaaactctccatacctcaacttagtgtcaccgactatgaaatcatggagcagagactcggggaattgcaggctttacaaagttctctgcaagagcaacaaagtggcctatactatctcagcaccactgtgaaagagatgtcgaagaaagcgccctctgaaattagccggaaatatcaatcagaatttgaagaaattgagggacgctggaagaagctctcctcccagctggttgagcattgtcaaaagctagaggagcaaatgaataaactccgaaaaattcagaatcacatacaaaccctgaagaaatggatggctgaagttgatgtttttctgaaggaggaatggcctgcccttggggattcagaaattctaaaaaagcagctgaaacagtgcagacttttagtcagtgatattcagacaattcagcccagtctaaacagtgtcaatgaaggtgggcagaagataaagaatgaagcagagccagagtttgcttcgagacttgagacagaactcaaagaacttaacactcagtgggatcacatgtgccaacaggtctatgccagaaaggaggccttgaagggaggtttggagaaaactgtaagcctccagaaagatctatcagagatgcacgaatggatgacacaagctgaagaagagtatcttgagagagattttgaatataaaactccagatgaattacagaaagcagttgaagagatgaagagagctaaagaagaggcccaacaaaaagaagcgaaagtgaaactccttactgagtctgtaaatagtgtcatagctcaagctccacctgtagcacaagaggccttaaaaaaggaacttgaaactctaaccaccaactaccagtggctctgcactaggctgaatgggaaatgcaagactttggaagaagtttgggcatgttggcatgagttattgtcatacttggagaaagcaaacaagtggctaaatgaagtagaatttaaacttaaaaccactgaaaacattcctggcggagctgaggaaatctctgaggtgctagattcacttgaaaatttgatgcgacattcagaggataacccaaatcagattcgcatattggcacagaccctaacagatggcggagtcatggatgagctaatcaatgaggaacttgagacatttaattctcgttggagggaactacatgaagaggctgtaaggaggcaaaagttgcttgaacagagcatccagtctgcccaggagactgaaaaatccttacacttaatccaggagtccctcacattcattgacaagcagttggcagcttatattgcagacaaggtggacgcagctcaaatgcctcaggaagcccagaaaatccaatctgatttgacaagtcatgagatcagtttagaagaaatgaagaaacataatcaggggaaggaggctgcccaaagagtcctgtctcagattgatgttgcacagaaaaaattacaagatgtctccatgaagtttcgattattccagaaaccagccaattttgagcagcgtctacaagaaagtaagatgattttagatgaagtgaagatgcacttgcctgcattggaaacaaagagtgtggaacaggaagtagtacagtcacagctaaatcattgtgtgaacttgtataaaagtctgagtgaagtgaagtctgaagtggaaatggtgataaagactggacgtcagattgtacagaaaaagcagacggaaaatcccaaagaacttgatgaaagagtaacagctttgaaattgcattataatgagctgggagcaaaggtaacagaaagaaagcaacagttggagaaatgcttgaaattgtcccgtaagatgcgaaaggaaatgaatgtcttgacagaatggctggcagctacagatatggaattgacaaagagatcagcagttgaaggaatgcctagtaatttggattctgaagttgcctggggaaaggctactcaaaaagagattgagaaacagaaggtgcacctgaagagtatcacagaggtaggagaggccttgaaaacagttttgggcaagaaggagacgttggtggaagataaactcagtcttctgaatagtaactggatagctgtcacctcccgagcagaagagtggttaaatcttttgttggaataccagaaacacatggaaacttttgaccagaatgtggaccacatcacaaagtggatcattcaggctgacacacttttggatgaatcagagaaaaagaaaccccagcaaaaagaagacgtgcttaagcgtttaaaggcagaactgaatgacatacgcccaaaggtggactctacacgtgaccaagcagcaaacttgatggcaaaccgcggtgaccactgcaggaaattagtagagccccaaatctcagagctcaaccatcgatttgcagccatttcacacagaattaagactggaaaggcctccattcctttgaaggaattggagcagtttaactcagatatacaaaaattgcttgaaccactggaggctgaaattcagcagggggtgaatctgaaagaggaagacttcaataaagatatgaatgaagacaatgagggtactgtaaaagaattgttgcaaagaggagacaacttacaacaaagaatcacagatgagagaaagcgagaggaaataaagataaaacagcagctgttacagacaaaacataatgctctcaaggatttgaggtctcaaagaagaaaaaaggctctagaaatttctcatcagtggtatcagtacaagaggcaggctgatgatctcctgaaatgcttggatgacattgaaaaaaaattagccagcctacctgagcccagagatgaaaggaaaataaaggaaattgatcgggaattgcagaagaagaaagaggagctgaatgcagtgcgtaggcaagctgagggcttgtctgaggatggggccgcaatggcagtggagccaactcagatccagctcagcaagcgctggcgggaaattgagagcaaatttgctcagtttcgaagactcaactttgcacaaattcacactgtccgtgaagaaacgatgatggtgatgactgaagacatgcctttggaaatttcttatgtgccttctacttatttgactgaaatcactcatgtctcacaagccctattagaagtggaacaacttctcaatgctcctgacctctgtgctaaggactttgaagatctctttaagcaagaggagtctctgaagaatataaaagatagtctacaacaaagctcaggtcggattgacattattcatagcaagaagacagcagcattgcaaagtgcaacgcctgtggaaagggtgaagctacaggaagctctctcccagcttgatttccaatgggaaaaagttaacaaaatgtacaaggaccgacaagggcgatttgacagatctgttgagaaatggcggcgttttcattatgatataaagatatttaatcagtggctaacagaagctgaacagtttctcagaaagacacaaattcctgagaattgggaacatgctaaatacaaatggtatcttaaggaactccaggatggcattgggcagcggcaaactgttgtcagaacattgaatgcaactggggaagaaataattcagcaatcctcaaaaacagatgccagtattctacaggaaaaattgggaagcctgaatctgcggtggcaggaggtctgcaaacagctgtcagacagaaaaaagaggctagaagaacaaaagaatatcttgtcagaatttcaaagagatttaaatgaatttgttttatggttggaggaagcagataacattgctagtatcccacttgaacctggaaaagagcagcaactaaaagaaaagcttgagcaagtcaagttactggtggaagagttgcccctgcgccagggaattctcaaacaattaaatgaaactggaggacccgtgcttgtaagtgctcccataagcccagaagagcaagataaacttgaaaataagctcaagcagacaaatctccagtggataaaggtttccagagctttacctgagaaacaaggagaaattgaagctcaaataaaagaccttgggcagcttgaaaaaaagcttgaagaccttgaagagcagttaaatcatctgctgctgtggttatctcctattaggaatcagttggaaatttataaccaaccaaaccaagaaggaccatttgacgttcaggaaactgaaatagcagttcaagctaaacaaccggatgtggaagagattttgtctaaagggcagcatttgtacaaggaaaaaccagccactcagccagtgaagaggaagttagaagatctgagctctgagtggaaggcggtaaaccgtttacttcaagagctgagggcaaagcagcctgacctagctcctggactgaccactattggagcctctcctactcagactgttactctggtgacacaacctgtggttactaaggaaactgccatctccaaactagaaatgccatcttccttgatgttggaggtacctgctctggcagatttcaaccgggcttggacagaacttaccgactggctttctctgcttgatcaagttataaaatcacagagggtgatggtgggtgaccttgaggatatcaacgagatgatcatcaagcagaaggcaacaatgcaggatttggaacagaggcgtccccagttggaagaactcattaccgctgcccaaaatttgaaaaacaagaccagcaatcaagaggctagaacaatcattacggatcgaattgaaagaattcagaatcagtgggatgaagtacaagaacaccttcagaaccggaggcaacagttgaatgaaatgttaaaggattcaacacaatggctggaagctaaggaagaagctgagcaggtcttaggacaggccagagccaagcttgagtcatggaaggagggtccctatacagtagatgcaatccaaaagaaaatcacagaaaccaagcagttggccaaagacctccgccagtggcagacaaatgtagatgtggcaaatgacttggccctgaaacttctccgggattattctgcagatgataccagaaaagtccacatgataacagagaatatcaatgcctcttggagaagcattcataaaagggtgagtgagcgagaggctgctttggaagaaactcatagattactgcaacagttccccctggacctggaaaagtttcttgcctggcttacagaagctgaaacaactgccaatgtcctacaggatgctacccgtaaggaaaggctcctagaagactccaagggagtaaaagagctgatgaaacaatggcaagacctccaaggtgaaattgaagctcacacagatgtttatcacaacctggatgaaaacagccaaaaaatcctgagatccctggaaggttccgatgatgcagtcctgttacaaagacgtttggataacatgaacttcaagtggagtgaacttcggaaaaagtctctcaacattaggtcccatttggaagccagttctgaccagtggaagcgtctgcacctttctctgcaggaacttctggtgtggctacagctgaaagatgatgaattaagccggcaggcacctattggaggcgactttccagcagttcagaagcagaacgatgtacatagggccttcaagagggaattgaaaactaaagaacctgtaatcatgagtactcttgagactgtacgaatatttctgacagagcagcctttggaaggactagagaaactctaccaggagcccagagagctgcctcctgaggagagagcccagaatgtcactcggcttctacgaaagcaggctgaggaggtcaatactgagtgggaaaaattgaacctgcactccgctgactggcagagaaaaatagatgagacccttgaaagactccaggaacttcaagaggccacggatgagctggacctcaagctgcgccaagctgaggtgatcaagggatcctggcagcccgtgggcgatctcctcattgactctctccaagatcacctcgagaaagtcaaggcacttcgaggagaaattgcgcctctgaaagagaacgtgagccacgtcaatgaccttgctcgccagcttaccactttgggcattcagctctcaccgtataacctcagcactctggaagacctgaacaccagatggaagcttctgcaggtggccgtcgaggaccgagtcaggcagctgcatgaagcccacagggactttggtccagcatctcagcactttctttccacgtctgtccagggtccctgggagagagccatctcgccaaacaaagtgccctactatatcaaccacgagactcaaacaacttgctgggaccatcccaaaatgacagagctctaccagtctttagctgacctgaataatgtcagattctcagcttataggactgccatgaaactccgaagactgcagaaggccctttgcttggatctcttgagcctgtcagctgcatgtgatgccttggaccagcacaacctcaagcaaaatgaccagcccatggatatcctgcagattattaattgtttgaccactatttatgaccgcctggagcaagagcacaacaatttggtcaacgtccctctctgcgtggatatgtgtctgaactggctgctgaatgtttatgatacgggacgaacagggaggatccgtgtcctgtcttttaaaactggcatcatttccctgtgtaaagcacatttggaagacaagtacagataccttttcaagcaagtggcaagttcaacaggattttgtgaccagcgcaggctgggcctccttctgcatgattctatccaaattccaagacagttgggtgaagttgcatcctttgggggcagtaacattgagccaagtgtccggagctgcttccaatttgctaataataagccagagatcgaagcggccctcttcctagactggatgagactggaaccccagtccatggtgtggctgcccgtcctgcacagagtggctgctgcagaaactgccaagcatcaggccaaatgtaacatctgcaaagagtgtccaatcattggattcaggtacaggagtctaaagcactttaattatgacatctgccaaagctgctttttttctggtcgagttgcaaaaggccataaaatgcactatcccatggtggaatattgcactccgactacatcaggagaagatgttcgagactttgccaaggtactaaaaaacaaatttcgaaccaaaaggtattttgcgaagcatccccgaatgggctacctgccagtgcagactgtcttagagggggacaacatggaaactcccgttactctgatcaacttctggccagtagattctgcgcctgcctcgtcccctcagctttcacacgatgatactcattcacgcattgaacattatgctagcaggctagcagaaatggaaaacagcaatggatcttatctaaatgatagcatctctcctaatgagagcatagatgatgaacatttgttaatccagcattactgccaaagtttgaaccaggactcccccctgagccagcctcgtagtcctgcccagatcttgatttccttagagagtgaggaaagaggggagctagagagaatcctagcagatcttgaggaagaaaacaggaatctgcaagcagaatatgaccgtctaaagcagcagcacgaacataaaggcctgtccccactgccgtcccctcctgaaatgatgcccacctctccccagagtccccgggatgctgagctcattgctgaggccaagctactgcgtcaacacaaaggccgcctggaagccaggatgcaaatcctggaagaccacaataaacagctggagtcacagttacacaggctaaggcagctgctggagcaaccccaggcagaggccaaagtgaatggcacaacggtgtcctctccttctacctctctacagaggtccgacagcagtcagcctatgctgctccgagtggttggcagtcaaacttcggactccatgggtgaggaagatcttctcagtcctccccaggacacaagcacagggttagaggaggtgatggagcaactcaacaactccttccctagttcaagaggaagaaatacccctggaaagccaatgagagaggacacaatgtaggaagtcttttccacatggcagatgatttgggcagagcgatggagtccttagtatcagtcatgacagatgaagaaggagcagaataaatgttttacaactcctgattcccgcatggtttttataatattcatacaacaaagaggattagacagtaagagtttacaagaaataaatctatatttttgtgaagggtagtggtattatactgtagatttcagtagtttctaagtctgttattgttttgttaacaatggcaggttttacacgtctatgcaattgtacaaaaaagttataagaaaactacatgtaaaatcttgatagctaaataacttgccatttctttatatggaacgcattttgggttgtttaaaaatttataacagttataaagaaagattgtaaactaaagtgtgctttataaaaaaaagttgtttataaaaacccctaaaaacaaaacaaacacacacacacacacatacacacacacacacaaaactttgaggcagcgcattgttttgcatccttttggcgtgatatccatatgaaattcatggctttttctttttttgcatattaaagataagacttcctctaccaccacaccaaatgactactacacactgctcatttgagaactgtcagctgagtggggcaggcttgagttttcatttcatatatctatatgtctataagtatataaatactatagttatatagataaagagatacgaatttctatagactgactttttccattttttaaatgttcatgtcacatcctaatagaaagaaattacttctagtcagtcatccaggcttacctgcttggtctagaatggatttttcccggagccggaagccaggaggaaactacaccacactaaaacattgtctacagctccagatgtttctcattttaaacaactttccactgacaacgaaagtaaagtaaagtattggatttttttaaagggaacatgtgaatgaatacacaggacttattatatcagagtgagtaatcggttggttggttgattgattgattgattgatacattcagcttcctgctgctagcaatgccacgatttagatttaatgatgcttcagtggaaatcaatcagaaggtattctgaccttgtgaacatcagaaggtattttttaactcccaagcagtagcaggacgatgatagggctggagggctatggattcccagcccatccctgtgaaggagtaggccactctttaagtgaaggattggatgattgttcataatacataaagttctctgtaattacaactaaattattatgccctcttctcacagtcaaaaggaactgggtggtttggtttttgttgcttttttagatttattgtcccatgtgggatgagtttttaaatgccacaagacataatttaaaataaataaactttgggaaaaggtgtaagacagtagccccatcacatttgtgatactgacaggtatcaacccagaagcccatgaactgtgtttccatcctttgcatttctctgcgagtagttccacacaggtttgtaagtaagtaagaaagaaggcaaattgattcaaatgttacaaaaaaacccttcttggtggattagacaggttaaatatataaacaaacaaacaaaaattgctcaaaaaagaggagaaaagctcaagaggaaaagctaaggactggtaggaaaaagctttactctttcatgccattttatttctttttgatttttaaatcattcattcaatagataccaccgtgtgacctataattttgcaaatctgttacctctgacatcaagtgtaattagcttttggagagtgggctgacatcaagtgtaattagcttttggagagtgggttttgtccattattaataattaattaattaacatcaaacacggcttctcatgctatttctacctcactttggttttggggtgttcctgataattgtgcacacctgagttcacagcttcaccacttgtccattgcgttattttctttttcctttataattctttctttttccttcataattttcaaaagaaaacccaaagctctaaggtaacaaattaccaaattacatgaagatttggtttttgtcttgcatttttttcctttatgtgacgctggaccttttctttacccaaggatttttaaaactcagatttaaaacaaggggttactttacatcctactaagaagtttaagtaagtaagtttcattctaaaatcagaggtaaatagagtgcataaataattttgttttaatctttttgtttttcttttagacacattagctctggagtgagtctgtcataatatttgaacaaaaattgagagctttattgctgcattttaagcataattaatttggacattatttcgtgttgtgttctttataaccaccgagtattaaactgtaaatcataatgtaactgaagcataaacatcacatggcatgttttgtcattgttttcaggtactgagttcttacttgagtatcataatatattgtgttttaacaccaacactgtaacatttacgaattatttttttaaacttcagttttactgcattttcacaacatatcagacttcaccaaatatatgccttactattgtattatagtactgctttactgtgtatctcaataaagcacgcagttatgttac

SEQ ID NO: 2222 - protein, 3562 aa, Homo sapiens; identical to SEQ ID NO: 2218

SEQ ID NO: 2223 - DNA, 9773 bp, Homo sapiens
gttcaagagatcaggaggaacattcgacctgagaaagacagattgcaatgactgagattattttgctaattttttttccagcctatttccttaatgctgtaaggaggcaaaagttgcttgaacagagcatccagtctgcccaggagactgaaaaatccttacacttaatccaggagtccctcacattcattgacaagcagttggcagcttatattgcagacaaggtggacgcagctcaaatgcctcaggaagcccagaaaatccaatctgatttgacaagtcatgagatcagtttagaagaaatgaagaaacataatcaggggaaggaggctgcccaaagagtcctgtctcagattgatgttgcacagaaaaaattacaagatgtctccatgaagtttcgattattccagaaaccagccaattttgagcagcgtctacaagaaagtaagatgattttagatgaagtgaagatgcacttgcctgcattggaaacaaagagtgtggaacaggaagtagtacagtcacagctaaatcattgtgtgaacttgtataaaagtctgagtgaagtgaagtctgaagtggaaatggtgataaagactggacgtcagattgtacagaaaaagcagacggaaaatcccaaagaacttgatgaaagagtaacagctttgaaattgcattataatgagctgggagcaaaggtaacagaaagaaagcaacagttggagaaatgcttgaaattgtcccgtaagatgcgaaaggaaatgaatgtcttgacagaatggctggcagctacagatatggaattgacaaagagatcagcagttgaaggaatgcctagtaatttggattctgaagttgcctggggaaaggctactcaaaaagagattgagaaacagaaggtgcacctgaagagtatcacagaggtaggagaggccttgaaaacagttttgggcaagaaggagacgttggtggaagataaactcagtcttctgaatagtaactggatagctgtcacctcccgagcagaagagtggttaaatcttttgttggaataccagaaacacatggaaacttttgaccagaatgtggaccacatcacaaagtggatcattcaggctgacacacttttggatgaatcagagaaaaagaaaccccagcaaaaagaagacgtgcttaagcgtttaaaggcagaactgaatgacatacgcccaaaggtggactctacacgtgaccaagcagcaaacttgatggcaaaccgcggtgaccactgcaggaaattagtagagccccaaatctcagagctcaaccatcgatttgcagccatttcacacagaattaagactggaaaggcctccattcctttgaaggaattggagcagtttaactcagatatacaaaaattgcttgaaccactggaggctgaaattcagcagggggtgaatctgaaagaggaagacttcaataaagatatgaatgaagacaatgagggtactgtaaaagaattgttgcaaagaggagacaacttacaacaaagaatcacagatgagagaaagcgagaggaaataaagataaaacagcagctgttacagacaaaacataatgctctcaaggatttgaggtctcaaagaagaaaaaaggctctagaaatttctcatcagtggtatcagtacaagaggcaggctgatgatctcctgaaatgcttggatgacattgaaaaaaaattagccagcctacctgagcccagagatgaaaggaaaataaaggaaattgatcgggaattgcagaagaagaaagaggagctgaatgcagtgcgtaggcaagctgagggcttgtctgaggatggggccgcaatggcagtggagccaactcagatccagctcagcaagcgctggcgggaaattgagagcaaatttgctcagtttcgaagactcaactttgcacaaattcacactgtccgtgaagaaacgatgatggtgatgactgaagacatgcctttggaaatttcttatgtgccttctacttatttgactgaaatcactcatgtctcacaagccctattagaagtggaacaacttctcaatgctcctgacctctgtgctaaggactttgaagatctctttaagcaagaggagtctctgaagaatataaaagatagtctacaacaaagctcaggtcggattgacattattcatagcaagaagacagcagcattgcaaagtgcaacgcctgtggaaagggtgaagctacaggaagctctctcccagcttgatttccaatgggaaaaagttaacaaaatgtacaaggaccgacaagggcgatttgacagatctgttgagaaatggcggcgttttcattatgatataaagatatttaatcagtggctaacagaagctgaacagtttctcagaaagacacaaattcctgagaattgggaacatgctaaatacaaatggtatcttaaggaactccaggatggcattgggcagcggcaaactgttgtcagaacattgaatgcaactggggaagaaataattcagcaatcctcaaaaacagatgccagtattctacaggaaaaattgggaagcctgaatctgcggtggcaggaggtctgcaaacagctgtcagacagaaaaaagaggctagaagaacaaaagaatatcttgtcagaatttcaaagagatttaaatgaatttgttttatggttggaggaagcagataacattgctagtatcccacttgaacctggaaaagagcagcaactaaaagaaaagcttgagcaagtcaagttactggtggaagagttgcccctgcgccagggaattctcaaacaattaaatgaaactggaggacccgtgcttgtaagtgctcccataagcccagaagagcaagataaacttgaaaataagctcaagcagacaaatctccagtggataaaggtttccagagctttacctgagaaacaaggagaaattgaagctcaaataaaagaccttgggcagcttgaaaaaaagcttgaagaccttgaagagcagttaaatcatctgctgctgtggttatctcctattaggaatcagttggaaatttataaccaaccaaaccaagaaggaccatttgacgttcaggaaactgaaatagcagttcaagctaaacaaccggatgtggaagagattttgtctaaagggcagcatttgtacaaggaaaaaccagccactcagccagtgaagaggaagttagaagatctgagctctgagtggaaggcggtaaaccgtttacttcaagagctgagggcaaagcagcctgacctagctcctggactgaccactattggagcctctcctactcagactgttactctggtgacacaacctgtggttactaaggaaactgccatctccaaactagaaatgccatcttccttgatgttggaggtacctgctctggcagatttcaaccgggcttggacagaacttaccgactggctttctctgcttgatcaagttataaaatcacagagggtgatggtgggtgaccttgaggatatcaacgagatgatcatcaagcagaaggcaacaatgcaggatttggaacagaggcgtccccagttggaagaactcattaccgctgcccaaaatttgaaaaacaagaccagcaatcaagaggctagaacaatcattacggatcgaattgaaagaattcagaatcagtgggatgaagtacaagaacaccttcagaaccggaggcaacagttgaatgaaatgttaaaggattcaacacaatggctggaagctaaggaagaagctgagcaggtcttaggacaggccagagccaagcttgagtcatggaaggagggtccctatacagtagatgcaatccaaaagaaaatcacagaaaccaagcagttggccaaagacctccgccagtggcagacaaatgtagatgtggcaaatgacttggccctgaaacttctccgggattattctgcagatgataccagaaaagtccacatgataacagagaatatcaatgcctcttggagaagcattcataaaagggtgagtgagcgagaggctgctttggaagaaactcatagattactgcaacagttccccctggacctggaaaagtttcttgcctggcttacagaagctgaaacaactgccaatgtcctacaggatgctacccgtaaggaaaggctcctagaagactccaagggagtaaaagagctgatgaaacaatggcaagacctccaaggtgaaattgaagctcacacagatgtttatcacaacctggatgaaaacagccaaaaaatcctgagatccctggaaggttccgatgatgcagtcctgttacaaagacgtttggataacatgaacttcaagtggagtgaacttcggaaaaagtctctcaacattaggtcccatttggaagccagttctgaccagtggaagcgtctgcacctttctctgcaggaacttctggtgtggctacagctgaaagatgatgaattaagccggcaggcacctattggaggcgactttccagcagttcagaagcagaacgatgtacatagggccttcaagagggaattgaaaactaaagaacctgtaatcatgagtactcttgagactgtacgaatatttctgacagagcagcctttggaaggactagagaaactctaccaggagcccagagagctgcctcctgaggagagagcccagaatgtcactcggcttctacgaaagcaggctgaggaggtcaatactgagtgggaaaaattgaacctgcactccgctgactggcagagaaaaatagatgagacccttgaaagactccaggaacttcaagaggccacggatgagctggacctcaagctgcgccaagctgaggtgatcaagggatcctggcagcccgtgggcgatctcctcattgactctctccaagatcacctcgagaaagtcaaggcacttcgaggagaaattgcgcctctgaaagagaacgtgagccacgtcaatgaccttgctcgccagcttaccactttgggcattcagctctcaccgtataacctcagcactctggaagacctgaacaccagatggaagcttctgcaggtggccgtcgaggaccgagtcaggcagctgcatgaagcccacagggactttggtccagcatctcagcactttctttccacgtctgtccagggtccctgggagagagccatctcgccaaacaaagtgccctactatatcaaccacgagactcaaacaacttgctgggaccatcccaaaatgacagagctctaccagtctttagctgacctgaataatgtcagattctcagcttataggactgccatgaaactccgaagactgcagaaggccctttgcttggatctcttgagcctgtcagctgcatgtgatgccttggaccagcacaacctcaagcaaaatgaccagcccatggatatcctgcagattattaattgtttgaccactatttatgaccgcctggagcaagagcacaacaatttggtcaacgtccctctctgcgtggatatgtgtctgaactggctgctgaatgtttatgatacgggacgaacagggaggatccgtgtcctgtcttttaaaactggcatcatttccctgtgtaaagcacatttggaagacaagtacagataccttttcaagcaagtggcaagttcaacaggattttgtgaccagcgcaggctgggcctccttctgcatgattctatccaaattccaagacagttgggtgaagttgcatcctttgggggcagtaacattgagccaagtgtccggagctgcttccaatttgctaataataagccagagatcgaagcggccctcttcctagactggatgagactggaaccccagtccatggtgtggctgcccgtcctgcacagagtggctgctgcagaaactgccaagcatcaggccaaatgtaacatctgcaaagagtgtccaatcattggattcaggtacaggagtctaaagcactttaattatgacatctgccaaagctgctttttttctggtcgagttgcaaaaggccataaaatgcactatcccatggtggaatattgcactccgactacatcaggagaagatgttcgagactttgccaaggtactaaaaaacaaatttcgaaccaaaaggtattttgcgaagcatccccgaatgggctacctgccagtgcagactgtcttagagggggacaacatggaaactcccgttactctgatcaacttctggccagtagattctgcgcctgcctcgtcccctcagctttcacacgatgatactcattcacgcattgaacattatgctagcaggctagcagaaatggaaaacagcaatggatcttatctaaatgatagcatctctcctaatgagagcatagatgatgaacatttgttaatccagcattactgccaaagtttgaaccaggactcccccctgagccagcctcgtagtcctgcccagatcttgatttccttagagagtgaggaaagaggggagctagagagaatcctagcagatcttgaggaagaaaacaggaatctgcaagcagaatatgaccgtctaaagcagcagcacgaacataaaggcctgtccccactgccgtcccctcctgaaatgatgcccacctctccccagagtccccgggatgctgagctcattgctgaggccaagctactgcgtcaacacaaaggccgcctggaagccaggatgcaaatcctggaagaccacaataaacagctggagtcacagttacacaggctaaggcagctgctggagcaaccccaggcagaggccaaagtgaatggcacaacggtgtcctctccttctacctctctacagaggtccgacagcagtcagcctatgctgctccgagtggttggcagtcaaacttcggactccatgggtgaggaagatcttctcagtcctccccaggacacaagcacagggttagaggaggtgatggagcaactcaacaactccttccctagttcaagaggaagaaatacccctggaaagccaatgagagaggacacaatgtaggaagtcttttccacatggcagatgatttgggcagagcgatggagtccttagtatcagtcatgacagatgaagaaggagcagaataaatgttttacaactcctgattcccgcatggtttttataatattcatacaacaaagaggattagacagtaagagtttacaagaaataaatctatatttttgtgaagggtagtggtattatactgtagatttcagtagtttctaagtctgttattgttttgttaacaatggcaggttttacacgtctatgcaattgtacaaaaaagttataagaaaactacatgtaaaatcttgatagctaaataacttgccatttctttatatggaacgcattttgggttgtttaaaaatttataacagttataaagaaagattgtaaactaaagtgtgctttataaaaaaaagttgtttataaaaacccctaaaaacaaaacaaacacacacacacacacatacacacacacacacaaaactttgaggcagcgcattgttttgcatccttttggcgtgatatccatatgaaattcatggctttttctttttttgcatattaaagataagacttcctctaccaccacaccaaatgactactacacactgctcatttgagaactgtcagctgagtggggcaggcttgagttttcatttcatatatctatatgtctataagtatataaatactatagttatatagataaagagatacgaatttctatagactgactttttccattttttaaatgttcatgtcacatcctaatagaaagaaattacttctagtcagtcatccaggcttacctgcttggtctagaatggatttttcccggagccggaagccaggaggaaactacaccacactaaaacattgtctacagctccagatgtttctcattttaaacaactttccactgacaacgaaagtaaagtaaagtattggatttttttaaagggaacatgtgaatgaatacacaggacttattatatcagagtgagtaatcggttggttggttgattgattgattgattgatacattcagcttcctgctgctagcaatgccacgatttagatttaatgatgcttcagtggaaatcaatcagaaggtattctgaccttgtgaacatcagaaggtattttttaactcccaagcagtagcaggacgatgatagggctggagggctatggattcccagcccatccctgtgaaggagtaggccactctttaagtgaaggattggatgattgttcataatacataaagttctctgtaattacaactaaattattatgccctcttctcacagtcaaaaggaactgggtggtttggtttttgttgcttttttagatttattgtcccatgtgggatgagtttttaaatgccacaagacataatttaaaataaataaactttgggaaaaggtgtaagacagtagccccatcacatttgtgatactgacaggtatcaacccagaagcccatgaactgtgtttccatcctttgcatttctctgcgagtagttccacacaggtttgtaagtaagtaagaaagaaggcaaattgattcaaatgttacaaaaaaacccttcttggtggattagacaggttaaatatataaacaaacaaacaaaaattgctcaaaaaagaggagaaaagctcaagaggaaaagctaaggactggtaggaaaaagctttactctttcatgccattttatttctttttgatttttaaatcattcattcaatagataccaccgtgtgacctataattttgcaaatctgttacctctgacatcaagtgtaattagcttttggagagtgggctgacatcaagtgtaattagcttttggagagtgggttttgtccattattaataattaattaattaacatcaaacacggcttctcatgctatttctacctcactttggttttggggtgttcctgataattgtgcacacctgagttcacagcttcaccacttgtccattgcgttattttctttttcctttataattctttctttttccttcataattttcaaaagaaaacccaaagctctaaggtaacaaattaccaaattacatgaagatttggtttttgtcttgcatttttttcctttatgtgacgctggaccttttctttacccaaggatttttaaaactcagatttaaaacaaggggttactttacatcctactaagaagtttaagtaagtaagtttcattctaaaatcagaggtaaatagagtgcataaataattttgttttaatctttttgtttttcttttagacacattagctctggagtgagtctgtcataatatttgaacaaaaattgagagctttattgctgcattttaagcataattaatttggacattatttcgtgttgtgttctttataaccaccgagtattaaactgtaaatcataatgtaactgaagcataaacatcacatggcatgttttgtcattgttttcaggtactgagttcttacttgagtatcataatatattgtgttttaacaccaacactgtaacatttacgaattatttttttaaacttcagttttactgcattttcacaacatatcagacttcaccaaatatatgccttactattgtattatagtactgctttactgtgtatctcaataaagcacgcagttatgttac

SEQ ID NO: 2224 - protein, 2344 aa, Homo sapiens
MTEIILLIFFPAYFLNAVRRQKLLEQSIQSAQETEKSLHLIQESLTFIDKQLAAYIADKVDAAQMPQEAQKIQSDLTSHEISLEEMKKHNQGKEAAQRVLSQIDVAQKKLQDVSMKFRLFQKPANFEQRLQESKMILDEVKMHLPALETKSVEQEVVQSQLNHCVNLYKSLSEVKSEVEMVIKTGRQIVQKKQTENPKELDERVTALKLHYNELGAKVTERKQQLEKCLKLSRKMRKEMNVLTEWLAATDMELTKRSAVEGMPSNLDSEVAWGKATQKEIEKQKVHLKSITEVGEALKTVLGKKETLVEDKLSLLNSNWIAVTSRAEEWLNLLLEYQKHMETFDQNVDHITKWIIQADTLLDESEKKKPQQKEDVLKRLKAELNDIRPKVDSTRDQAANLMANRGDHCRKLVEPQISELNHRFAAISHRIKTGKASIPLKELEQFNSDIQKLLEPLEAEIQQGVNLKEEDFNKDMNEDNEGTVKELLQRGDNLQQRITDERKREEIKIKQQLLQTKHNALKDLRSQRRKKALEISHQWYQYKRQADDLLKCLDDIEKKLASLPEPRDERKIKEIDRELQKKKEELNAVRRQAEGLSEDGAAMAVEPTQIQLSKRWREIESKFAQFRRLNFAQIHTVREETMMVMTEDMPLEISYVPSTYLTEITHVSQALLEVEQLLNAPDLCAKDFEDLFKQEESLKNIKDSLQQSSGRIDIIHSKKTAALQSATPVERVKLQEALSQLDFQWEKVNKMYKDRQGRFDRSVEKWRRFHYDIKIFNQWLTEAEQFLRKTQIPENWEHAKYKWYLKELQDGIGQRQTVVRTLNATGEEIIQQSSKTDASILQEKLGSLNLRWQEVCKQLSDRKKRLEEQKNILSEFQRDLNEFVLWLEEADNIASIPLEPGKEQQLKEKLEQVKLLVEELPLRQGILKQLNETGGPVLVSAPISPEEQDKLENKLKQTNLQWIKVSRALPEKQGEIEAQIKDLGQLEKKLEDLEEQLNHLLLWLSPIRNQLEIYNQPNQEGPFDVQETEIAVQAKQPDVEEILSKGQHLYKEKPATQPVKRKLEDLSSEWKAVNRLLQELRAKQPDLAPGLTTIGASPTQTVTLVTQPVVTKETAISKLEMPSSLMLEVPALADFNRAWTELTDWLSLLDQVIKSQRVMVGDLEDINEMIIKQKATMQDLEQRRPQLEELITAAQNLKNKTSNQEARTIITDRIERIQNQWDEVQEHLQNRRQQLNEMLKDSTQWLEAKEEAEQVLGQARAKLESWKEGPYTVDAIQKKITETKQLAKDLRQWQTNVDVANDLALKLLRDYSADDTRKVHMITENINASWRSIHKRVSEREAALEETHRLLQQFPLDLEKFLAWLTEAETTANVLQDATRKERLLEDSKGVKELMKQWQDLQGEIEAHTDVYHNLDENSQKILRSLEGSDDAVLLQRRLDNMNFKWSELRKKSLNIRSHLEASSDQWKRLHLSLQELLVWLQLKDDELSRQAPIGGDFPAVQKQNDVHRAFKRELKTKEPVIMSTLETVRIFLTEQPLEGLEKLYQEPRELPPEERAQNVTRLLRKQAEEVNTEWEKLNLHSADWQRKIDETLERLQELQEATDELDLKLRQAEVIKGSWQPVGDLLIDSLQDHLEKVKALRGEIAPLKENVSHVNDLARQLTTLGIQLSPYNLSTLEDLNTRWKLLQVAVEDRVRQLHEAHRDFGPASQHFLSTSVQGPWERAISPNKVPYYINHETQTTCWDHPKMTELYQSLADLNNVRFSAYRTAMKLRRLQKALCLDLLSLSAACDALDQHNLKQNDQPMDILQIINCLTTIYDRLEQEHNNLVNVPLCVDMCLNWLLNVYDTGRTGRIRVLSFKTGIISLCKAHLEDKYRYLFKQVASSTGFCDQRRLGLLLHDSIQIPRQLGEVASFGGSNIEPSVRSCFQFANNKPEIEAALFLDWMRLEPQSMVWLPVLHRVAAAETAKHQAKCNICKECPIIGFRYRSLKHFNYDICQSCFFSGRVAKGHKMHYPMVEYCTPTTSGEDVRDFAKVLKNKFRTKRYFAKHPRMGYLPVQTVLEGDNMETPVTLINFWPVDSAPASSPQLSHDDTHSRIEHYASRLAEMENSNGSYLNDSISPNESIDDEHLLIQHYCQSLNQDSPLSQPRSPAQILISLESEERGELERILADLEEENRNLQAEYDRLKQQHEHKGLSPLPSPPEMMPTSPQSPRDAELIAEAKLLRQHKGRLEARMQILEDHNKQLESQLHRLRQLLEQPQAEAKVNGTTVSSPSTSLQRSDSSQPMLLRVVGSQTSDSMGEEDLLSPPQDTSTGLEEVMEQLNNSFPSSRGRNTPGKPMREDTM

SEQ ID NO: 2225 - DNA, 9916 bp, Homo sapiens
gttcaagagatcaggaggaacattcgacctgagaaagacagattgcaatgactgagattattttgctaattttttttccagcctatttccttaatgtacgtgatattgtgattgattttcatgcagagatccctgatcctatagttttgtttgctatttatttttctccttcacattttttttctatcaacagagctgaatgagtgccaggaagctgcgaaatctgtcttacaaaaaggctgtaaggaggcaaaagttgcttgaacagagcatccagtctgcccaggagactgaaaaatccttacacttaatccaggagtccctcacattcattgacaagcagttggcagcttatattgcagacaaggtggacgcagctcaaatgcctcaggaagcccagaaaatccaatctgatttgacaagtcatgagatcagtttagaagaaatgaagaaacataatcaggggaaggaggctgcccaaagagtcctgtctcagattgatgttgcacagaaaaaattacaagatgtctccatgaagtttcgattattccagaaaccagccaattttgagcagcgtctacaagaaagtaagatgattttagatgaagtgaagatgcacttgcctgcattggaaacaaagagtgtggaacaggaagtagtacagtcacagctaaatcattgtgtgaacttgtataaaagtctgagtgaagtgaagtctgaagtggaaatggtgataaagactggacgtcagattgtacagaaaaagcagacggaaaatcccaaagaacttgatgaaagagtaacagctttgaaattgcattataatgagctgggagcaaaggtaacagaaagaaagcaacagttggagaaatgcttgaaattgtcccgtaagatgcgaaaggaaatgaatgtcttgacagaatggctggcagctacagatatggaattgacaaagagatcagcagttgaaggaatgcctagtaatttggattctgaagttgcctggggaaaggctactcaaaaagagattgagaaacagaaggtgcacctgaagagtatcacagaggtaggagaggccttgaaaacagttttgggcaagaaggagacgttggtggaagataaactcagtcttctgaatagtaactggatagctgtcacctcccgagcagaagagtggttaaatcttttgttggaataccagaaacacatggaaacttttgaccagaatgtggaccacatcacaaagtggatcattcaggctgacacacttttggatgaatcagagaaaaagaaaccccagcaaaaagaagacgtgcttaagcgtttaaaggcagaactgaatgacatacgcccaaaggtggactctacacgtgaccaagcagcaaacttgatggcaaaccgcggtgaccactgcaggaaattagtagagccccaaatctcagagctcaaccatcgatttgcagccatttcacacagaattaagactggaaaggcctccattcctttgaaggaattggagcagtttaactcagatatacaaaaattgcttgaaccactggaggctgaaattcagcagggggtgaatctgaaagaggaagacttcaataaagatatgaatgaagacaatgagggtactgtaaaagaattgttgcaaagaggagacaacttacaacaaagaatcacagatgagagaaagcgagaggaaataaagataaaacagcagctgttacagacaaaacataatgctctcaaggatttgaggtctcaaagaagaaaaaaggctctagaaatttctcatcagtggtatcagtacaagaggcaggctgatgatctcctgaaatgcttggatgacattgaaaaaaaattagccagcctacctgagcccagagatgaaaggaaaataaaggaaattgatcgggaattgcagaagaagaaagaggagctgaatgcagtgcgtaggcaagctgagggcttgtctgaggatggggccgcaatggcagtggagccaactcagatccagctcagcaagcgctggcgggaaattgagagcaaatttgctcagtttcgaagactcaactttgcacaaattcacactgtccgtgaagaaacgatgatggtgatgactgaagacatgcctttggaaatttcttatgtgccttctacttatttgactgaaatcactcatgtctcacaagccctattagaagtggaacaacttctcaatgctcctgacctctgtgctaaggactttgaagatctctttaagcaagaggagtctctgaagaatataaaagatagtctacaacaaagctcaggtcggattgacattattcatagcaagaagacagcagcattgcaaagtgcaacgcctgtggaaagggtgaagctacaggaagctctctcccagcttgatttccaatgggaaaaagttaacaaaatgtacaaggaccgacaagggcgatttgacagatctgttgagaaatggcggcgttttcattatgatataaagatatttaatcagtggctaacagaagctgaacagtttctcagaaagacacaaattcctgagaattgggaacatgctaaatacaaatggtatcttaaggaactccaggatggcattgggcagcggcaaactgttgtcagaacattgaatgcaactggggaagaaataattcagcaatcctcaaaaacagatgccagtattctacaggaaaaattgggaagcctgaatctgcggtggcaggaggtctgcaaacagctgtcagacagaaaaaagaggctagaagaacaaaagaatatcttgtcagaatttcaaagagatttaaatgaatttgttttatggttggaggaagcagataacattgctagtatcccacttgaacctggaaaagagcagcaactaaaagaaaagcttgagcaagtcaagttactggtggaagagttgcccctgcgccagggaattctcaaacaattaaatgaaactggaggacccgtgcttgtaagtgctcccataagcccagaagagcaagataaacttgaaaataagctcaagcagacaaatctccagtggataaaggtttccagagctttacctgagaaacaaggagaaattgaagctcaaataaaagaccttgggcagcttgaaaaaaagcttgaagaccttgaagagcagttaaatcatctgctgctgtggttatctcctattaggaatcagttggaaatttataaccaaccaaaccaagaaggaccatttgacgttcaggaaactgaaatagcagttcaagctaaacaaccggatgtggaagagattttgtctaaagggcagcatttgtacaaggaaaaaccagccactcagccagtgaagaggaagttagaagatctgagctctgagtggaaggcggtaaaccgtttacttcaagagctgagggcaaagcagcctgacctagctcctggactgaccactattggagcctctcctactcagactgttactctggtgacacaacctgtggttactaaggaaactgccatctccaaactagaaatgccatcttccttgatgttggaggtacctgctctggcagatttcaaccgggcttggacagaacttaccgactggctttctctgcttgatcaagttataaaatcacagagggtgatggtgggtgaccttgaggatatcaacgagatgatcatcaagcagaaggcaacaatgcaggatttggaacagaggcgtccccagttggaagaactcattaccgctgcccaaaatttgaaaaacaagaccagcaatcaagaggctagaacaatcattacggatcgaattgaaagaattcagaatcagtgggatgaagtacaagaacaccttcagaaccggaggcaacagttgaatgaaatgttaaaggattcaacacaatggctggaagctaaggaagaagctgagcaggtcttaggacaggccagagccaagcttgagtcatggaaggagggtccctatacagtagatgcaatccaaaagaaaatcacagaaaccaagcagttggccaaagacctccgccagtggcagacaaatgtagatgtggcaaatgacttggccctgaaacttctccgggattattctgcagatgataccagaaaagtccacatgataacagagaatatcaatgcctcttggagaagcattcataaaagggtgagtgagcgagaggctgctttggaagaaactcatagattactgcaacagttccccctggacctggaaaagtttcttgcctggcttacagaagctgaaacaactgccaatgtcctacaggatgctacccgtaaggaaaggctcctagaagactccaagggagtaaaagagctgatgaaacaatggcaagacctccaaggtgaaattgaagctcacacagatgtttatcacaacctggatgaaaacagccaaaaaatcctgagatccctggaaggttccgatgatgcagtcctgttacaaagacgtttggataacatgaacttcaagtggagtgaacttcggaaaaagtctctcaacattaggtcccatttggaagccagttctgaccagtggaagcgtctgcacctttctctgcaggaacttctggtgtggctacagctgaaagatgatgaattaagccggcaggcacctattggaggcgactttccagcagttcagaagcagaacgatgtacatagggccttcaagagggaattgaaaactaaagaacctgtaatcatgagtactcttgagactgtacgaatatttctgacagagcagcctttggaaggactagagaaactctaccaggagcccagagagctgcctcctgaggagagagcccagaatgtcactcggcttctacgaaagcaggctgaggaggtcaatactgagtgggaaaaattgaacctgcactccgctgactggcagagaaaaatagatgagacccttgaaagactccaggaacttcaagaggccacggatgagctggacctcaagctgcgccaagctgaggtgatcaagggatcctggcagcccgtgggcgatctcctcattgactctctccaagatcacctcgagaaagtcaaggcacttcgaggagaaattgcgcctctgaaagagaacgtgagccacgtcaatgaccttgctcgccagcttaccactttgggcattcagctctcaccgtataacctcagcactctggaagacctgaacaccagatggaagcttctgcaggtggccgtcgaggaccgagtcaggcagctgcatgaagcccacagggactttggtccagcatctcagcactttctttccacgtctgtccagggtccctgggagagagccatctcgccaaacaaagtgccctactatatcaaccacgagactcaaacaacttgctgggaccatcccaaaatgacagagctctaccagtctttagctgacctgaataatgtcagattctcagcttataggactgccatgaaactccgaagactgcagaaggccctttgcttggatctcttgagcctgtcagctgcatgtgatgccttggaccagcacaacctcaagcaaaatgaccagcccatggatatcctgcagattattaattgtttgaccactatttatgaccgcctggagcaagagcacaacaatttggtcaacgtccctctctgcgtggatatgtgtctgaactggctgctgaatgtttatgatacgggacgaacagggaggatccgtgtcctgtcttttaaaactggcatcatttccctgtgtaaagcacatttggaagacaagtacagataccttttcaagcaagtggcaagttcaacaggattttgtgaccagcgcaggctgggcctccttctgcatgattctatccaaattccaagacagttgggtgaagttgcatcctttgggggcagtaacattgagccaagtgtccggagctgcttccaatttgctaataataagccagagatcgaagcggccctcttcctagactggatgagactggaaccccagtccatggtgtggctgcccgtcctgcacagagtggctgctgcagaaactgccaagcatcaggccaaatgtaacatctgcaaagagtgtccaatcattggattcaggtacaggagtctaaagcactttaattatgacatctgccaaagctgctttttttctggtcgagttgcaaaaggccataaaatgcactatcccatggtggaatattgcactccgactacatcaggagaagatgttcgagactttgccaaggtactaaaaaacaaatttcgaaccaaaaggtattttgcgaagcatccccgaatgggctacctgccagtgcagactgtcttagagggggacaacatggaaactcccgttactctgatcaacttctggccagtagattctgcgcctgcctcgtcccctcagctttcacacgatgatactcattcacgcattgaacattatgctagcaggctagcagaaatggaaaacagcaatggatcttatctaaatgatagcatctctcctaatgagagcatagatgatgaacatttgttaatccagcattactgccaaagtttgaaccaggactcccccctgagccagcctcgtagtcctgcccagatcttgatttccttagagagtgaggaaagaggggagctagagagaatcctagcagatcttgaggaagaaaacaggaatctgcaagcagaatatgaccgtctaaagcagcagcacgaacataaaggcctgtccccactgccgtcccctcctgaaatgatgcccacctctccccagagtccccgggatgctgagctcattgctgaggccaagctactgcgtcaacacaaaggccgcctggaagccaggatgcaaatcctggaagaccacaataaacagctggagtcacagttacacaggctaaggcagctgctggagcaaccccaggcagaggccaaagtgaatggcacaacggtgtcctctccttctacctctctacagaggtccgacagcagtcagcctatgctgctccgagtggttggcagtcaaacttcggactccatgggtgaggaagatcttctcagtcctccccaggacacaagcacagggttagaggaggtgatggagcaactcaacaactccttccctagttcaagaggaagaaatacccctggaaagccaatgagagaggacacaatgtaggaagtcttttccacatggcagatgatttgggcagagcgatggagtccttagtatcagtcatgacagatgaagaaggagcagaataaatgttttacaactcctgattcccgcatggtttttataatattcatacaacaaagaggattagacagtaagagtttacaagaaataaatctatatttttgtgaagggtagtggtattatactgtagatttcagtagtttctaagtctgttattgttttgttaacaatggcaggttttacacgtctatgcaattgtacaaaaaagttataagaaaactacatgtaaaatcttgatagctaaataacttgccatttctttatatggaacgcattttgggttgtttaaaaatttataacagttataaagaaagattgtaaactaaagtgtgctttataaaaaaaagttgtttataaaaacccctaaaaacaaaacaaacacacacacacacacatacacacacacacacaaaactttgaggcagcgcattgttttgcatccttttggcgtgatatccatatgaaattcatggctttttctttttttgcatattaaagataagacttcctctaccaccacaccaaatgactactacacactgctcatttgagaactgtcagctgagtggggcaggcttgagttttcatttcatatatctatatgtctataagtatataaatactatagttatatagataaagagatacgaatttctatagactgactttttccattttttaaatgttcatgtcacatcctaatagaaagaaattacttctagtcagtcatccaggcttacctgcttggtctagaatggatttttcccggagccggaagccaggaggaaactacaccacactaaaacattgtctacagctccagatgtttctcattttaaacaactttccactgacaacgaaagtaaagtaaagtattggatttttttaaagggaacatgtgaatgaatacacaggacttattatatcagagtgagtaatcggttggttggttgattgattgattgattgatacattcagcttcctgctgctagcaatgccacgatttagatttaatgatgcttcagtggaaatcaatcagaaggtattctgaccttgtgaacatcagaaggtattttttaactcccaagcagtagcaggacgatgatagggctggagggctatggattcccagcccatccctgtgaaggagtaggccactctttaagtgaaggattggatgattgttcataatacataaagttctctgtaattacaactaaattattatgccctcttctcacagtcaaaaggaactgggtggtttggtttttgttgcttttttagatttattgtcccatgtgggatgagtttttaaatgccacaagacataatttaaaataaataaactttgggaaaaggtgtaagacagtagccccatcacatttgtgatactgacaggtatcaacccagaagcccatgaactgtgtttccatcctttgcatttctctgcgagtagttccacacaggtttgtaagtaagtaagaaagaaggcaaattgattcaaatgttacaaaaaaacccttcttggtggattagacaggttaaatatataaacaaacaaacaaaaattgctcaaaaaagaggagaaaagctcaagaggaaaagctaaggactggtaggaaaaagctttactctttcatgccattttatttctttttgatttttaaatcattcattcaatagataccaccgtgtgacctataattttgcaaatctgttacctctgacatcaagtgtaattagcttttggagagtgggctgacatcaagtgtaattagcttttggagagtgggttttgtccattattaataattaattaattaacatcaaacacggcttctcatgctatttctacctcactttggttttggggtgttcctgataattgtgcacacctgagttcacagcttcaccacttgtccattgcgttattttctttttcctttataattctttctttttccttcataattttcaaaagaaaacccaaagctctaaggtaacaaattaccaaattacatgaagatttggtttttgtcttgcatttttttcctttatgtgacgctggaccttttctttacccaaggatttttaaaactcagatttaaaacaaggggttactttacatcctactaagaagtttaagtaagtaagtttcattctaaaatcagaggtaaatagagtgcataaataattttgttttaatctttttgtttttcttttagacacattagctctggagtgagtctgtcataatatttgaacaaaaattgagagctttattgctgcattttaagcataattaatttggacattatttcgtgttgtgttctttataaccaccgagtattaaactgtaaatcataatgtaactgaagcataaacatcacatggcatgttttgtcattgttttcaggtactgagttcttacttgagtatcataatatattgtgttttaacaccaacactgtaacatttacgaattatttttttaaacttcagttttactgcattttcacaacatatcagacttcaccaaatatatgccttactattgtattatagtactgctttactgtgtatctcaataaagcacgcagttatgttac

SEQ ID NO: 2226 - protein, 2341 aa, Homo sapiens
MSARKLRNLSYKKAVRRQKLLEQSIQSAQETEKSLHLIQESLTFIDKQLAAYIADKVDAAQMPQEAQKIQSDLTSHEISLEEMKKHNQGKEAAQRVLSQIDVAQKKLQDVSMKFRLFQKPANFEQRLQESKMILDEVKMHLPALETKSVEQEVVQSQLNHCVNLYKSLSEVKSEVEMVIKTGRQIVQKKQTENPKELDERVTALKLHYNELGAKVTERKQQLEKCLKLSRKMRKEMNVLTEWLAATDMELTKRSAVEGMPSNLDSEVAWGKATQKEIEKQKVHLKSITEVGEALKTVLGKKETLVEDKLSLLNSNWIAVTSRAEEWLNLLLEYQKHMETFDQNVDHITKWIIQADTLLDESEKKKPQQKEDVLKRLKAELNDIRPKVDSTRDQAANLMANRGDHCRKLVEPQISELNHRFAAISHRIKTGKASIPLKELEQFNSDIQKLLEPLEAEIQQGVNLKEEDFNKDMNEDNEGTVKELLQRGDNLQQRITDERKREEIKIKQQLLQTKHNALKDLRSQRRKKALEISHQWYQYKRQADDLLKCLDDIEKKLASLPEPRDERKIKEIDRELQKKKEELNAVRRQAEGLSEDGAAMAVEPTQIQLSKRWREIESKFAQFRRLNFAQIHTVREETMMVMTEDMPLEISYVPSTYLTEITHVSQALLEVEQLLNAPDLCAKDFEDLFKQEESLKNIKDSLQQSSGRIDIIHSKKTAALQSATPVERVKLQEALSQLDFQWEKVNKMYKDRQGRFDRSVEKWRRFHYDIKIFNQWLTEAEQFLRKTQIPENWEHAKYKWYLKELQDGIGQRQTVVRTLNATGEEIIQQSSKTDASILQEKLGSLNLRWQEVCKQLSDRKKRLEEQKNILSEFQRDLNEFVLWLEEADNIASIPLEPGKEQQLKEKLEQVKLLVEELPLRQGILKQLNETGGPVLVSAPISPEEQDKLENKLKQTNLQWIKVSRALPEKQGEIEAQIKDLGQLEKKLEDLEEQLNHLLLWLSPIRNQLEIYNQPNQEGPFDVQETEIAVQAKQPDVEEILSKGQHLYKEKPATQPVKRKLEDLSSEWKAVNRLLQELRAKQPDLAPGLTTIGASPTQTVTLVTQPVVTKETAISKLEMPSSLMLEVPALADFNRAWTELTDWLSLLDQVIKSQRVMVGDLEDINEMIIKQKATMQDLEQRRPQLEELITAAQNLKNKTSNQEARTIITDRIERIQNQWDEVQEHLQNRRQQLNEMLKDSTQWLEAKEEAEQVLGQARAKLESWKEGPYTVDAIQKKITETKQLAKDLRQWQTNVDVANDLALKLLRDYSADDTRKVHMITENINASWRSIHKRVSEREAALEETHRLLQQFPLDLEKFLAWLTEAETTANVLQDATRKERLLEDSKGVKELMKQWQDLQGEIEAHTDVYHNLDENSQKILRSLEGSDDAVLLQRRLDNMNFKWSELRKKSLNIRSHLEASSDQWKRLHLSLQELLVWLQLKDDELSRQAPIGGDFPAVQKQNDVHRAFKRELKTKEPVIMSTLETVRIFLTEQPLEGLEKLYQEPRELPPEERAQNVTRLLRKQAEEVNTEWEKLNLHSADWQRKIDETLERLQELQEATDELDLKLRQAEVIKGSWQPVGDLLIDSLQDHLEKVKALRGEIAPLKENVSHVNDLARQLTTLGIQLSPYNLSTLEDLNTRWKLLQVAVEDRVRQLHEAHRDFGPASQHFLSTSVQGPWERAISPNKVPYYINHETQTTCWDHPKMTELYQSLADLNNVRFSAYRTAMKLRRLQKALCLDLLSLSAACDALDQHNLKQNDQPMDILQIINCLTTIYDRLEQEHNNLVNVPLCVDMCLNWLLNVYDTGRTGRIRVLSFKTGIISLCKAHLEDKYRYLFKQVASSTGFCDQRRLGLLLHDSIQIPRQLGEVASFGGSNIEPSVRSCFQFANNKPEIEAALFLDWMRLEPQSMVWLPVLHRVAAAETAKHQAKCNICKECPIIGFRYRSLKHFNYDICQSCFFSGRVAKGHKMHYPMVEYCTPTTSGEDVRDFAKVLKNKFRTKRYFAKHPRMGYLPVQTVLEGDNMETPVTLINFWPVDSAPASSPQLSHDDTHSRIEHYASRLAEMENSNGSYLNDSISPNESIDDEHLLIQHYCQSLNQDSPLSQPRSPAQILISLESEERGELERILADLEEENRNLQAEYDRLKQQHEHKGLSPLPSPPEMMPTSPQSPRDAELIAEAKLLRQHKGRLEARMQILEDHNKQLESQLHRLRQLLEQPQAEAKVNGTTVSSPSTSLQRSDSSQPMLLRVVGSQTSDSMGEEDLLSPPQDTSTGLEEVMEQLNNSFPSSRGRNTPGKPMREDTM

SEQ ID NO: 2227 - DNA, 7410 bp, Homo sapiens
acactagcaatggcaaagctttgtgcggaggcattgctggctgctctgaactaaaagcatccgtggggaccgaaagaggtttttgcacaccttattaaggaactccaggatggcattgggcagcggcaaactgttgtcagaacattgaatgcaactggggaagaaataattcagcaatcctcaaaaacagatgccagtattctacaggaaaaattgggaagcctgaatctgcggtggcaggaggtctgcaaacagctgtcagacagaaaaaagaggctagaagaacaaaagaatatcttgtcagaatttcaaagagatttaaatgaatttgttttatggttggaggaagcagataacattgctagtatcccacttgaacctggaaaagagcagcaactaaaagaaaagcttgagcaagtcaagttactggtggaagagttgcccctgcgccagggaattctcaaacaattaaatgaaactggaggacccgtgcttgtaagtgctcccataagcccagaagagcaagataaacttgaaaataagctcaagcagacaaatctccagtggataaaggtttccagagctttacctgagaaacaaggagaaattgaagctcaaataaaagaccttgggcagcttgaaaaaaagcttgaagaccttgaagagcagttaaatcatctgctgctgtggttatctcctattaggaatcagttggaaatttataaccaaccaaaccaagaaggaccatttgacgttcaggaaactgaaatagcagttcaagctaaacaaccggatgtggaagagattttgtctaaagggcagcatttgtacaaggaaaaaccagccactcagccagtgaagaggaagttagaagatctgagctctgagtggaaggcggtaaaccgtttacttcaagagctgagggcaaagcagcctgacctagctcctggactgaccactattggagcctctcctactcagactgttactctggtgacacaacctgtggttactaaggaaactgccatctccaaactagaaatgccatcttccttgatgttggaggtacctgctctggcagatttcaaccgggcttggacagaacttaccgactggctttctctgcttgatcaagttataaaatcacagagggtgatggtgggtgaccttgaggatatcaacgagatgatcatcaagcagaaggcaacaatgcaggatttggaacagaggcgtccccagttggaagaactcattaccgctgcccaaaatttgaaaaacaagaccagcaatcaagaggctagaacaatcattacggatcgaattgaaagaattcagaatcagtgggatgaagtacaagaacaccttcagaaccggaggcaacagttgaatgaaatgttaaaggattcaacacaatggctggaagctaaggaagaagctgagcaggtcttaggacaggccagagccaagcttgagtcatggaaggagggtccctatacagtagatgcaatccaaaagaaaatcacagaaaccaagcagttggccaaagacctccgccagtggcagacaaatgtagatgtggcaaatgacttggccctgaaacttctccgggattattctgcagatgataccagaaaagtccacatgataacagagaatatcaatgcctcttggagaagcattcataaaagggtgagtgagcgagaggctgctttggaagaaactcatagattactgcaacagttccccctggacctggaaaagtttcttgcctggcttacagaagctgaaacaactgccaatgtcctacaggatgctacccgtaaggaaaggctcctagaagactccaagggagtaaaagagctgatgaaacaatggcaagacctccaaggtgaaattgaagctcacacagatgtttatcacaacctggatgaaaacagccaaaaaatcctgagatccctggaaggttccgatgatgcagtcctgttacaaagacgtttggataacatgaacttcaagtggagtgaacttcggaaaaagtctctcaacattaggtcccatttggaagccagttctgaccagtggaagcgtctgcacctttctctgcaggaacttctggtgtggctacagctgaaagatgatgaattaagccggcaggcacctattggaggcgactttccagcagttcagaagcagaacgatgtacatagggccttcaagagggaattgaaaactaaagaacctgtaatcatgagtactcttgagactgtacgaatatttctgacagagcagcctttggaaggactagagaaactctaccaggagcccagagagctgcctcctgaggagagagcccagaatgtcactcggcttctacgaaagcaggctgaggaggtcaatactgagtgggaaaaattgaacctgcactccgctgactggcagagaaaaatagatgagacccttgaaagactccaggaacttcaagaggccacggatgagctggacctcaagctgcgccaagctgaggtgatcaagggatcctggcagcccgtgggcgatctcctcattgactctctccaagatcacctcgagaaagtcaaggcacttcgaggagaaattgcgcctctgaaagagaacgtgagccacgtcaatgaccttgctcgccagcttaccactttgggcattcagctctcaccgtataacctcagcactctggaagacctgaacaccagatggaagcttctgcaggtggccgtcgaggaccgagtcaggcagctgcatgaagcccacagggactttggtccagcatctcagcactttctttccacgtctgtccagggtccctgggagagagccatctcgccaaacaaagtgccctactatatcaaccacgagactcaaacaacttgctgggaccatcccaaaatgacagagctctaccagtctttagctgacctgaataatgtcagattctcagcttataggactgccatgaaactccgaagactgcagaaggccctttgcttggatctcttgagcctgtcagctgcatgtgatgccttggaccagcacaacctcaagcaaaatgaccagcccatggatatcctgcagattattaattgtttgaccactatttatgaccgcctggagcaagagcacaacaatttggtcaacgtccctctctgcgtggatatgtgtctgaactggctgctgaatgtttatgatacgggacgaacagggaggatccgtgtcctgtcttttaaaactggcatcatttccctgtgtaaagcacatttggaagacaagtacagataccttttcaagcaagtggcaagttcaacaggattttgtgaccagcgcaggctgggcctccttctgcatgattctatccaaattccaagacagttgggtgaagttgcatcctttgggggcagtaacattgagccaagtgtccggagctgcttccaatttgctaataataagccagagatcgaagcggccctcttcctagactggatgagactggaaccccagtccatggtgtggctgcccgtcctgcacagagtggctgctgcagaaactgccaagcatcaggccaaatgtaacatctgcaaagagtgtccaatcattggattcaggtacaggagtctaaagcactttaattatgacatctgccaaagctgctttttttctggtcgagttgcaaaaggccataaaatgcactatcccatggtggaatattgcactccgactacatcaggagaagatgttcgagactttgccaaggtactaaaaaacaaatttcgaaccaaaaggtattttgcgaagcatccccgaatgggctacctgccagtgcagactgtcttagagggggacaacatggaaactcccgttactctgatcaacttctggccagtagattctgcgcctgcctcgtcccctcagctttcacacgatgatactcattcacgcattgaacattatgctagcaggctagcagaaatggaaaacagcaatggatcttatctaaatgatagcatctctcctaatgagagcatagatgatgaacatttgttaatccagcattactgccaaagtttgaaccaggactcccccctgagccagcctcgtagtcctgcccagatcttgatttccttagagagtgaggaaagaggggagctagagagaatcctagcagatcttgaggaagaaaacaggaatctgcaagcagaatatgaccgtctaaagcagcagcacgaacataaaggcctgtccccactgccgtcccctcctgaaatgatgcccacctctccccagagtccccgggatgctgagctcattgctgaggccaagctactgcgtcaacacaaaggccgcctggaagccaggatgcaaatcctggaagaccacaataaacagctggagtcacagttacacaggctaaggcagctgctggagcaaccccaggcagaggccaaagtgaatggcacaacggtgtcctctccttctacctctctacagaggtccgacagcagtcagcctatgctgctccgagtggttggcagtcaaacttcggactccatgggtgaggaagatcttctcagtcctccccaggacacaagcacagggttagaggaggtgatggagcaactcaacaactccttccctagttcaagaggaagaaatacccctggaaagccaatgagagaggacacaatgtaggaagtcttttccacatggcagatgatttgggcagagcgatggagtccttagtatcagtcatgacagatgaagaaggagcagaataaatgttttacaactcctgattcccgcatggtttttataatattcatacaacaaagaggattagacagtaagagtttacaagaaataaatctatatttttgtgaagggtagtggtattatactgtagatttcagtagtttctaagtctgttattgttttgttaacaatggcaggttttacacgtctatgcaattgtacaaaaaagttataagaaaactacatgtaaaatcttgatagctaaataacttgccatttctttatatggaacgcattttgggttgtttaaaaatttataacagttataaagaaagattgtaaactaaagtgtgctttataaaaaaaagttgtttataaaaacccctaaaaacaaaacaaacacacacacacacacatacacacacacacacaaaactttgaggcagcgcattgttttgcatccttttggcgtgatatccatatgaaattcatggctttttctttttttgcatattaaagataagacttcctctaccaccacaccaaatgactactacacactgctcatttgagaactgtcagctgagtggggcaggcttgagttttcatttcatatatctatatgtctataagtatataaatactatagttatatagataaagagatacgaatttctatagactgactttttccattttttaaatgttcatgtcacatcctaatagaaagaaattacttctagtcagtcatccaggcttacctgcttggtctagaatggatttttcccggagccggaagccaggaggaaactacaccacactaaaacattgtctacagctccagatgtttctcattttaaacaactttccactgacaacgaaagtaaagtaaagtattggatttttttaaagggaacatgtgaatgaatacacaggacttattatatcagagtgagtaatcggttggttggttgattgattgattgattgatacattcagcttcctgctgctagcaatgccacgatttagatttaatgatgcttcagtggaaatcaatcagaaggtattctgaccttgtgaacatcagaaggtattttttaactcccaagcagtagcaggacgatgatagggctggagggctatggattcccagcccatccctgtgaaggagtaggccactctttaagtgaaggattggatgattgttcataatacataaagttctctgtaattacaactaaattattatgccctcttctcacagtcaaaaggaactgggtggtttggtttttgttgcttttttagatttattgtcccatgtgggatgagtttttaaatgccacaagacataatttaaaataaataaactttgggaaaaggtgtaagacagtagccccatcacatttgtgatactgacaggtatcaacccagaagcccatgaactgtgtttccatcctttgcatttctctgcgagtagttccacacaggtttgtaagtaagtaagaaagaaggcaaattgattcaaatgttacaaaaaaacccttcttggtggattagacaggttaaatatataaacaaacaaacaaaaattgctcaaaaaagaggagaaaagctcaagaggaaaagctaaggactggtaggaaaaagctttactctttcatgccattttatttctttttgatttttaaatcattcattcaatagataccaccgtgtgacctataattttgcaaatctgttacctctgacatcaagtgtaattagcttttggagagtgggctgacatcaagtgtaattagcttttggagagtgggttttgtccattattaataattaattaattaacatcaaacacggcttctcatgctatttctacctcactttggttttggggtgttcctgataattgtgcacacctgagttcacagcttcaccacttgtccattgcgttattttctttttcctttataattctttctttttccttcataattttcaaaagaaaacccaaagctctaaggtaacaaattaccaaattacatgaagatttggtttttgtcttgcatttttttcctttatgtgacgctggaccttttctttacccaaggatttttaaaactcagatttaaaacaaggggttactttacatcctactaagaagtttaagtaagtaagtttcattctaaaatcagaggtaaatagagtgcataaataattttgttttaatctttttgtttttcttttagacacattagctctggagtgagtctgtcataatatttgaacaaaaattgagagctttattgctgcattttaagcataattaatttggacattatttcgtgttgtgttctttataaccaccgagtattaaactgtaaatcataatgtaactgaagcataaacatcacatggcatgttttgtcattgttttcaggtactgagttcttacttgagtatcataatatattgtgttttaacaccaacactgtaacatttacgaattatttttttaaacttcagttttactgcattttcacaacatatcagacttcaccaaatatatgccttactattgtattatagtactgctttactgtgtatctcaataaagcacgcagttatgttac

SEQ ID NO: 2228 - protein, 1225 aa, Homo sapiens
MPSSLMLEVPALADFNRAWTELTDWLSLLDQVIKSQRVMVGDLEDINEMIIKQKATMQDLEQRRPQLEELITAAQNLKNKTSNQEARTIITDRIERIQNQWDEVQEHLQNRRQQLNEMLKDSTQWLEAKEEAEQVLGQARAKLESWKEGPYTVDAIQKKITETKQLAKDLRQWQTNVDVANDLALKLLRDYSADDTRKVHMITENINASWRSIHKRVSEREAALEETHRLLQQFPLDLEKFLAWLTEAETTANVLQDATRKERLLEDSKGVKELMKQWQDLQGEIEAHTDVYHNLDENSQKILRSLEGSDDAVLLQRRLDNMNFKWSELRKKSLNIRSHLEASSDQWKRLHLSLQELLVWLQLKDDELSRQAPIGGDFPAVQKQNDVHRAFKRELKTKEPVIMSTLETVRIFLTEQPLEGLEKLYQEPRELPPEERAQNVTRLLRKQAEEVNTEWEKLNLHSADWQRKIDETLERLQELQEATDELDLKLRQAEVIKGSWQPVGDLLIDSLQDHLEKVKALRGEIAPLKENVSHVNDLARQLTTLGIQLSPYNLSTLEDLNTRWKLLQVAVEDRVRQLHEAHRDFGPASQHFLSTSVQGPWERAISPNKVPYYINHETQTTCWDHPKMTELYQSLADLNNVRFSAYRTAMKLRRLQKALCLDLLSLSAACDALDQHNLKQNDQPMDILQIINCLTTIYDRLEQEHNNLVNVPLCVDMCLNWLLNVYDTGRTGRIRVLSFKTGIISLCKAHLEDKYRYLFKQVASSTGFCDQRRLGLLLHDSIQIPRQLGEVASFGGSNIEPSVRSCFQFANNKPEIEAALFLDWMRLEPQSMVWLPVLHRVAAAETAKHQAKCNICKECPIIGFRYRSLKHFNYDICQSCFFSGRVAKGHKMHYPMVEYCTPTTSGEDVRDFAKVLKNKFRTKRYFAKHPRMGYLPVQTVLEGDNMETPVTLINFWPVDSAPASSPQLSHDDTHSRIEHYASRLAEMENSNGSYLNDSISPNESIDDEHLLIQHYCQSLNQDSPLSQPRSPAQILISLESEERGELERILADLEEENRNLQAEYDRLKQQHEHKGLSPLPSPPEMMPTSPQSPRDAELIAEAKLLRQHKGRLEARMQILEDHNKQLESQLHRLRQLLEQPQAEAKVNGTTVSSPSTSLQRSDSSQPMLLRVVGSQTSDSMGEEDLLSPPQDTSTGLEEVMEQLNNSFPSSRGRNTPGKPMREDTM

SEQ ID NO: 2229 - DNA, 5623 bp, Homo sapiens
gggttttctcaggattgctatgcaacaggatcagtgctgtagtgcccggttcaagctgaaaatgttacacaggaagacataccatgtaaaggacctccaaggtgaaattgaagctcacacagatgtttatcacaacctggatgaaaacagccaaaaaatcctgagatccctggaaggttccgatgatgcagtcctgttacaaagacgtttggataacatgaacttcaagtggagtgaacttcggaaaaagtctctcaacattaggtcccatttggaagccagttctgaccagtggaagcgtctgcacctttctctgcaggaacttctggtgtggctacagctgaaagatgatgaattaagccggcaggcacctattggaggcgactttccagcagttcagaagcagaacgatgtacatagggccttcaagagggaattgaaaactaaagaacctgtaatcatgagtactcttgagactgtacgaatatttctgacagagcagcctttggaaggactagagaaactctaccaggagcccagagagctgcctcctgaggagagagcccagaatgtcactcggcttctacgaaagcaggctgaggaggtcaatactgagtgggaaaaattgaacctgcactccgctgactggcagagaaaaatagatgagacccttgaaagactccaggaacttcaagaggccacggatgagctggacctcaagctgcgccaagctgaggtgatcaagggatcctggcagcccgtgggcgatctcctcattgactctctccaagatcacctcgagaaagtcaaggcacttcgaggagaaattgcgcctctgaaagagaacgtgagccacgtcaatgaccttgctcgccagcttaccactttgggcattcagctctcaccgtataacctcagcactctggaagacctgaacaccagatggaagcttctgcaggtggccgtcgaggaccgagtcaggcagctgcatgaagcccacagggactttggtccagcatctcagcactttctttccacgtctgtccagggtccctgggagagagccatctcgccaaacaaagtgccctactatatcaaccacgagactcaaacaacttgctgggaccatcccaaaatgacagagctctaccagtctttagctgacctgaataatgtcagattctcagcttataggactgccatgaaactccgaagactgcagaaggccctttgcttggatctcttgagcctgtcagctgcatgtgatgccttggaccagcacaacctcaagcaaaatgaccagcccatggatatcctgcagattattaattgtttgaccactatttatgaccgcctggagcaagagcacaacaatttggtcaacgtccctctctgcgtggatatgtgtctgaactggctgctgaatgtttatgatacgggacgaacagggaggatccgtgtcctgtcttttaaaactggcatcatttccctgtgtaaagcacatttggaagacaagtacagataccttttcaagcaagtggcaagttcaacaggattttgtgaccagcgcaggctgggcctccttctgcatgattctatccaaattccaagacagttgggtgaagttgcatcctttgggggcagtaacattgagccaagtgtccggagctgcttccaatttgctaataataagccagagatcgaagcggccctcttcctagactggatgagactggaaccccagtccatggtgtggctgcccgtcctgcacagagtggctgctgcagaaactgccaagcatcaggccaaatgtaacatctgcaaagagtgtccaatcattggattcaggtacaggagtctaaagcactttaattatgacatctgccaaagctgctttttttctggtcgagttgcaaaaggccataaaatgcactatcccatggtggaatattgcactccgactacatcaggagaagatgttcgagactttgccaaggtactaaaaaacaaatttcgaaccaaaaggtattttgcgaagcatccccgaatgggctacctgccagtgcagactgtcttagagggggacaacatggaaactcccgttactctgatcaacttctggccagtagattctgcgcctgcctcgtcccctcagctttcacacgatgatactcattcacgcattgaacattatgctagcaggctagcagaaatggaaaacagcaatggatcttatctaaatgatagcatctctcctaatgagagcatagatgatgaacatttgttaatccagcattactgccaaagtttgaaccaggactcccccctgagccagcctcgtagtcctgcccagatcttgatttccttagagagtgaggaaagaggggagctagagagaatcctagcagatcttgaggaagaaaacaggaatctgcaagcagaatatgaccgtctaaagcagcagcacgaacataaaggcctgtccccactgccgtcccctcctgaaatgatgcccacctctccccagagtccccgggatgctgagctcattgctgaggccaagctactgcgtcaacacaaaggccgcctggaagccaggatgcaaatcctggaagaccacaataaacagctggagtcacagttacacaggctaaggcagctgctggagcaaccccaggcagaggccaaagtgaatggcacaacggtgtcctctccttctacctctctacagaggtccgacagcagtcagcctatgctgctccgagtggttggcagtcaaacttcggactccatgggtgaggaagatcttctcagtcctccccaggacacaagcacagggttagaggaggtgatggagcaactcaacaactccttccctagttcaagaggaagaaatacccctggaaagccaatgagagaggacacaatgtaggaagtcttttccacatggcagatgatttgggcagagcgatggagtccttagtatcagtcatgacagatgaagaaggagcagaataaatgttttacaactcctgattcccgcatggtttttataatattcatacaacaaagaggattagacagtaagagtttacaagaaataaatctatatttttgtgaagggtagtggtattatactgtagatttcagtagtttctaagtctgttattgttttgttaacaatggcaggttttacacgtctatgcaattgtacaaaaaagttataagaaaactacatgtaaaatcttgatagctaaataacttgccatttctttatatggaacgcattttgggttgtttaaaaatttataacagttataaagaaagattgtaaactaaagtgtgctttataaaaaaaagttgtttataaaaacccctaaaaacaaaacaaacacacacacacacacatacacacacacacacaaaactttgaggcagcgcattgttttgcatccttttggcgtgatatccatatgaaattcatggctttttctttttttgcatattaaagataagacttcctctaccaccacaccaaatgactactacacactgctcatttgagaactgtcagctgagtggggcaggcttgagttttcatttcatatatctatatgtctataagtatataaatactatagttatatagataaagagatacgaatttctatagactgactttttccattttttaaatgttcatgtcacatcctaatagaaagaaattacttctagtcagtcatccaggcttacctgcttggtctagaatggatttttcccggagccggaagccaggaggaaactacaccacactaaaacattgtctacagctccagatgtttctcattttaaacaactttccactgacaacgaaagtaaagtaaagtattggatttttttaaagggaacatgtgaatgaatacacaggacttattatatcagagtgagtaatcggttggttggttgattgattgattgattgatacattcagcttcctgctgctagcaatgccacgatttagatttaatgatgcttcagtggaaatcaatcagaaggtattctgaccttgtgaacatcagaaggtattttttaactcccaagcagtagcaggacgatgatagggctggagggctatggattcccagcccatccctgtgaaggagtaggccactctttaagtgaaggattggatgattgttcataatacataaagttctctgtaattacaactaaattattatgccctcttctcacagtcaaaaggaactgggtggtttggtttttgttgcttttttagatttattgtcccatgtgggatgagtttttaaatgccacaagacataatttaaaataaataaactttgggaaaaggtgtaagacagtagccccatcacatttgtgatactgacaggtatcaacccagaagcccatgaactgtgtttccatcctttgcatttctctgcgagtagttccacacaggtttgtaagtaagtaagaaagaaggcaaattgattcaaatgttacaaaaaaacccttcttggtggattagacaggttaaatatataaacaaacaaacaaaaattgctcaaaaaagaggagaaaagctcaagaggaaaagctaaggactggtaggaaaaagctttactctttcatgccattttatttctttttgatttttaaatcattcattcaatagataccaccgtgtgacctataattttgcaaatctgttacctctgacatcaagtgtaattagcttttggagagtgggctgacatcaagtgtaattagcttttggagagtgggttttgtccattattaataattaattaattaacatcaaacacggcttctcatgctatttctacctcactttggttttggggtgttcctgataattgtgcacacctgagttcacagcttcaccacttgtccattgcgttattttctttttcctttataattctttctttttccttcataattttcaaaagaaaacccaaagctctaaggtaacaaattaccaaattacatgaagatttggtttttgtcttgcatttttttcctttatgtgacgctggaccttttctttacccaaggatttttaaaactcagatttaaaacaaggggttactttacatcctactaagaagtttaagtaagtaagtttcattctaaaatcagaggtaaatagagtgcataaataattttgttttaatctttttgtttttcttttagacacattagctctggagtgagtctgtcataatatttgaacaaaaattgagagctttattgctgcattttaagcataattaatttggacattatttcgtgttgtgttctttataaccaccgagtattaaactgtaaatcataatgtaactgaagcataaacatcacatggcatgttttgtcattgttttcaggtactgagttcttacttgagtatcataatatattgtgttttaacaccaacactgtaacatttacgaattatttttttaaacttcagttttactgcattttcacaacatatcagacttcaccaaatatatgccttactattgtattatagtactgctttactgtgtatctcaataaagcacgcagttatgttac

SEQ ID NO: 2230 - protein, 956 aa, Homo sapiens
MLHRKTYHVKDLQGEIEAHTDVYHNLDENSQKILRSLEGSDDAVLLQRRLDNMNFKWSELRKKSLNIRSHLEASSDQWKRLHLSLQELLVWLQLKDDELSRQAPIGGDFPAVQKQNDVHRAFKRELKTKEPVIMSTLETVRIFLTEQPLEGLEKLYQEPRELPPEERAQNVTRLLRKQAEEVNTEWEKLNLHSADWQRKIDETLERLQELQEATDELDLKLRQAEVIKGSWQPVGDLLIDSLQDHLEKVKALRGEIAPLKENVSHVNDLARQLTTLGIQLSPYNLSTLEDLNTRWKLLQVAVEDRVRQLHEAHRDFGPASQHFLSTSVQGPWERAISPNKVPYYINHETQTTCWDHPKMTELYQSLADLNNVRFSAYRTAMKLRRLQKALCLDLLSLSAACDALDQHNLKQNDQPMDILQIINCLTTIYDRLEQEHNNLVNVPLCVDMCLNWLLNVYDTGRTGRIRVLSFKTGIISLCKAHLEDKYRYLFKQVASSTGFCDQRRLGLLLHDSIQIPRQLGEVASFGGSNIEPSVRSCFQFANNKPEIEAALFLDWMRLEPQSMVWLPVLHRVAAAETAKHQAKCNICKECPIIGFRYRSLKHFNYDICQSCFFSGRVAKGHKMHYPMVEYCTPTTSGEDVRDFAKVLKNKFRTKRYFAKHPRMGYLPVQTVLEGDNMETPVTLINFWPVDSAPASSPQLSHDDTHSRIEHYASRLAEMENSNGSYLNDSISPNESIDDEHLLIQHYCQSLNQDSPLSQPRSPAQILISLESEERGELERILADLEEENRNLQAEYDRLKQQHEHKGLSPLPSPPEMMPTSPQSPRDAELIAEAKLLRQHKGRLEARMQILEDHNKQLESQLHRLRQLLEQPQAEAKVNGTTVSSPSTSLQRSDSSQPMLLRVVGSQTSDSMGEEDLLSPPQDTSTGLEEVMEQLNNSFPSSRGRNTPGKPMREDTM

SEQ ID NO: 2231 - DNA, 4623 bp, Homo sapiens
actttcggggagcccggcggctctgggaagctcactcctccactcgtacccacactcgaccgcggagcccttgcagccatgagggaacagctcaaaggccacgagactcaaacaacttgctgggaccatcccaaaatgacagagctctaccagtctttagctgacctgaataatgtcagattctcagcttataggactgccatgaaactccgaagactgcagaaggccctttgcttggatctcttgagcctgtcagctgcatgtgatgccttggaccagcacaacctcaagcaaaatgaccagcccatggatatcctgcagattattaattgtttgaccactatttatgaccgcctggagcaagagcacaacaatttggtcaacgtccctctctgcgtggatatgtgtctgaactggctgctgaatgtttatgatacgggacgaacagggaggatccgtgtcctgtcttttaaaactggcatcatttccctgtgtaaagcacatttggaagacaagtacagataccttttcaagcaagtggcaagttcaacaggattttgtgaccagcgcaggctgggcctccttctgcatgattctatccaaattccaagacagttgggtgaagttgcatcctttgggggcagtaacattgagccaagtgtccggagctgcttccaatttgctaataataagccagagatcgaagcggccctcttcctagactggatgagactggaaccccagtccatggtgtggctgcccgtcctgcacagagtggctgctgcagaaactgccaagcatcaggccaaatgtaacatctgcaaagagtgtccaatcattggattcaggtacaggagtctaaagcactttaattatgacatctgccaaagctgctttttttctggtcgagttgcaaaaggccataaaatgcactatcccatggtggaatattgcactccgactacatcaggagaagatgttcgagactttgccaaggtactaaaaaacaaatttcgaaccaaaaggtattttgcgaagcatccccgaatgggctacctgccagtgcagactgtcttagagggggacaacatggaaactcccgttactctgatcaacttctggccagtagattctgcgcctgcctcgtcccctcagctttcacacgatgatactcattcacgcattgaacattatgctagcaggctagcagaaatggaaaacagcaatggatcttatctaaatgatagcatctctcctaatgagagcatagatgatgaacatttgttaatccagcattactgccaaagtttgaaccaggactcccccctgagccagcctcgtagtcctgcccagatcttgatttccttagagagtgaggaaagaggggagctagagagaatcctagcagatcttgaggaagaaaacaggaatctgcaagcagaatatgaccgtctaaagcagcagcacgaacataaaggcctgtccccactgccgtcccctcctgaaatgatgcccacctctccccagagtccccgggatgctgagctcattgctgaggccaagctactgcgtcaacacaaaggccgcctggaagccaggatgcaaatcctggaagaccacaataaacagctggagtcacagttacacaggctaaggcagctgctggagcaaccccaggcagaggccaaagtgaatggcacaacggtgtcctctccttctacctctctacagaggtccgacagcagtcagcctatgctgctccgagtggttggcagtcaaacttcggactccatgggtgaggaagatcttctcagtcctccccaggacacaagcacagggttagaggaggtgatggagcaactcaacaactccttccctagttcaagaggaagaaatacccctggaaagccaatgagagaggacacaatgtaggaagtcttttccacatggcagatgatttgggcagagcgatggagtccttagtatcagtcatgacagatgaagaaggagcagaataaatgttttacaactcctgattcccgcatggtttttataatattcatacaacaaagaggattagacagtaagagtttacaagaaataaatctatatttttgtgaagggtagtggtattatactgtagatttcagtagtttctaagtctgttattgttttgttaacaatggcaggttttacacgtctatgcaattgtacaaaaaagttataagaaaactacatgtaaaatcttgatagctaaataacttgccatttctttatatggaacgcattttgggttgtttaaaaatttataacagttataaagaaagattgtaaactaaagtgtgctttataaaaaaaagttgtttataaaaacccctaaaaacaaaacaaacacacacacacacacatacacacacacacacaaaactttgaggcagcgcattgttttgcatccttttggcgtgatatccatatgaaattcatggctttttctttttttgcatattaaagataagacttcctctaccaccacaccaaatgactactacacactgctcatttgagaactgtcagctgagtggggcaggcttgagttttcatttcatatatctatatgtctataagtatataaatactatagttatatagataaagagatacgaatttctatagactgactttttccattttttaaatgttcatgtcacatcctaatagaaagaaattacttctagtcagtcatccaggcttacctgcttggtctagaatggatttttcccggagccggaagccaggaggaaactacaccacactaaaacattgtctacagctccagatgtttctcattttaaacaactttccactgacaacgaaagtaaagtaaagtattggatttttttaaagggaacatgtgaatgaatacacaggacttattatatcagagtgagtaatcggttggttggttgattgattgattgattgatacattcagcttcctgctgctagcaatgccacgatttagatttaatgatgcttcagtggaaatcaatcagaaggtattctgaccttgtgaacatcagaaggtattttttaactcccaagcagtagcaggacgatgatagggctggagggctatggattcccagcccatccctgtgaaggagtaggccactctttaagtgaaggattggatgattgttcataatacataaagttctctgtaattacaactaaattattatgccctcttctcacagtcaaaaggaactgggtggtttggtttttgttgcttttttagatttattgtcccatgtgggatgagtttttaaatgccacaagacataatttaaaataaataaactttgggaaaaggtgtaagacagtagccccatcacatttgtgatactgacaggtatcaacccagaagcccatgaactgtgtttccatcctttgcatttctctgcgagtagttccacacaggtttgtaagtaagtaagaaagaaggcaaattgattcaaatgttacaaaaaaacccttcttggtggattagacaggttaaatatataaacaaacaaacaaaaattgctcaaaaaagaggagaaaagctcaagaggaaaagctaaggactggtaggaaaaagctttactctttcatgccattttatttctttttgatttttaaatcattcattcaatagataccaccgtgtgacctataattttgcaaatctgttacctctgacatcaagtgtaattagcttttggagagtgggctgacatcaagtgtaattagcttttggagagtgggttttgtccattattaataattaattaattaacatcaaacacggcttctcatgctatttctacctcactttggttttggggtgttcctgataattgtgcacacctgagttcacagcttcaccacttgtccattgcgttattttctttttcctttataattctttctttttccttcataattttcaaaagaaaacccaaagctctaaggtaacaaattaccaaattacatgaagatttggtttttgtcttgcatttttttcctttatgtgacgctggaccttttctttacccaaggatttttaaaactcagatttaaaacaaggggttactttacatcctactaagaagtttaagtaagtaagtttcattctaaaatcagaggtaaatagagtgcataaataattttgttttaatctttttgtttttcttttagacacattagctctggagtgagtctgtcataatatttgaacaaaaattgagagctttattgctgcattttaagcataattaatttggacattatttcgtgttgtgttctttataaccaccgagtattaaactgtaaatcataatgtaactgaagcataaacatcacatggcatgttttgtcattgttttcaggtactgagttcttacttgagtatcataatatattgtgttttaacaccaacactgtaacatttacgaattatttttttaaacttcagttttactgcattttcacaacatatcagacttcaccaaatatatgccttactattgtattatagtactgctttactgtgtatctcaataaagcacgcagttatgttac

SEQ ID NO: 2232 - protein, 617 aa, Homo sapiens
MREQLKGHETQTTCWDHPKMTELYQSLADLNNVRFSAYRTAMKLRRLQKALCLDLLSLSAACDALDQHNLKQNDQPMDILQIINCLTTIYDRLEQEHNNLVNVPLCVDMCLNWLLNVYDTGRTGRIRVLSFKTGIISLCKAHLEDKYRYLFKQVASSTGFCDQRRLGLLLHDSIQIPRQLGEVASFGGSNIEPSVRSCFQFANNKPEIEAALFLDWMRLEPQSMVWLPVLHRVAAAETAKHQAKCNICKECPIIGFRYRSLKHFNYDICQSCFFSGRVAKGHKMHYPMVEYCTPTTSGEDVRDFAKVLKNKFRTKRYFAKHPRMGYLPVQTVLEGDNMETPVTLINFWPVDSAPASSPQLSHDDTHSRIEHYASRLAEMENSNGSYLNDSISPNESIDDEHLLIQHYCQSLNQDSPLSQPRSPAQILISLESEERGELERILADLEEENRNLQAEYDRLKQQHEHKGLSPLPSPPEMMPTSPQSPRDAELIAEAKLLRQHKGRLEARMQILEDHNKQLESQLHRLRQLLEQPQAEAKVNGTTVSSPSTSLQRSDSSQPMLLRVVGSQTSDSMGEEDLLSPPQDTSTGLEEVMEQLNNSFPSSRGRNTPGKPMREDTM

SEQ ID NO: 2233 - DNA, 4591 bp, Homo sapiens
actttcggggagcccggcggctctgggaagctcactcctccactcgtacccacactcgaccgcggagcccttgcagccatgagggaacagctcaaaggccacgagactcaaacaacttgctgggaccatcccaaaatgacagagctctaccagtctttagctgacctgaataatgtcagattctcagcttataggactgccatgaaactccgaagactgcagaaggccctttgcttggatctcttgagcctgtcagctgcatgtgatgccttggaccagcacaacctcaagcaaaatgaccagcccatggatatcctgcagattattaattgtttgaccactatttatgaccgcctggagcaagagcacaacaatttggtcaacgtccctctctgcgtggatatgtgtctgaactggctgctgaatgtttatgatacgggacgaacagggaggatccgtgtcctgtcttttaaaactggcatcatttccctgtgtaaagcacatttggaagacaagtacagataccttttcaagcaagtggcaagttcaacaggattttgtgaccagcgcaggctgggcctccttctgcatgattctatccaaattccaagacagttgggtgaagttgcatcctttgggggcagtaacattgagccaagtgtccggagctgcttccaatttgctaataataagccagagatcgaagcggccctcttcctagactggatgagactggaaccccagtccatggtgtggctgcccgtcctgcacagagtggctgctgcagaaactgccaagcatcaggccaaatgtaacatctgcaaagagtgtccaatcattggattcaggtacaggagtctaaagcactttaattatgacatctgccaaagctgctttttttctggtcgagttgcaaaaggccataaaatgcactatcccatggtggaatattgcactccgactacatcaggagaagatgttcgagactttgccaaggtactaaaaaacaaatttcgaaccaaaaggtattttgcgaagcatccccgaatgggctacctgccagtgcagactgtcttagagggggacaacatggaaactcccgttactctgatcaacttctggccagtagattctgcgcctgcctcgtcccctcagctttcacacgatgatactcattcacgcattgaacattatgctagcaggctagcagaaatggaaaacagcaatggatcttatctaaatgatagcatctctcctaatgagagcatagatgatgaacatttgttaatccagcattactgccaaagtttgaaccaggactcccccctgagccagcctcgtagtcctgcccagatcttgatttccttagagagtgaggaaagaggggagctagagagaatcctagcagatcttgaggaagaaaacaggaatctgcaagcagaatatgaccgtctaaagcagcagcacgaacataaaggcctgtccccactgccgtcccctcctgaaatgatgcccacctctccccagagtccccgggatgctgagctcattgctgaggccaagctactgcgtcaacacaaaggccgcctggaagccaggatgcaaatcctggaagaccacaataaacagctggagtcacagttacacaggctaaggcagctgctggagcaaccccaggcagaggccaaagtgaatggcacaacggtgtcctctccttctacctctctacagaggtccgacagcagtcagcctatgctgctccgagtggttggcagtcaaacttcggactccatgggtgaggaagatcttctcagtcctccccaggacacaagcacagggttagaggaggtgatggagcaactcaacaactccttccctagttcaagaggacacaatgtaggaagtcttttccacatggcagatgatttgggcagagcgatggagtccttagtatcagtcatgacagatgaagaaggagcagaataaatgttttacaactcctgattcccgcatggtttttataatattcatacaacaaagaggattagacagtaagagtttacaagaaataaatctatatttttgtgaagggtagtggtattatactgtagatttcagtagtttctaagtctgttattgttttgttaacaatggcaggttttacacgtctatgcaattgtacaaaaaagttataagaaaactacatgtaaaatcttgatagctaaataacttgccatttctttatatggaacgcattttgggttgtttaaaaatttataacagttataaagaaagattgtaaactaaagtgtgctttataaaaaaaagttgtttataaaaacccctaaaaacaaaacaaacacacacacacacacatacacacacacacacaaaactttgaggcagcgcattgttttgcatccttttggcgtgatatccatatgaaattcatggctttttctttttttgcatattaaagataagacttcctctaccaccacaccaaatgactactacacactgctcatttgagaactgtcagctgagtggggcaggcttgagttttcatttcatatatctatatgtctataagtatataaatactatagttatatagataaagagatacgaatttctatagactgactttttccattttttaaatgttcatgtcacatcctaatagaaagaaattacttctagtcagtcatccaggcttacctgcttggtctagaatggatttttcccggagccggaagccaggaggaaactacaccacactaaaacattgtctacagctccagatgtttctcattttaaacaactttccactgacaacgaaagtaaagtaaagtattggatttttttaaagggaacatgtgaatgaatacacaggacttattatatcagagtgagtaatcggttggttggttgattgattgattgattgatacattcagcttcctgctgctagcaatgccacgatttagatttaatgatgcttcagtggaaatcaatcagaaggtattctgaccttgtgaacatcagaaggtattttttaactcccaagcagtagcaggacgatgatagggctggagggctatggattcccagcccatccctgtgaaggagtaggccactctttaagtgaaggattggatgattgttcataatacataaagttctctgtaattacaactaaattattatgccctcttctcacagtcaaaaggaactgggtggtttggtttttgttgcttttttagatttattgtcccatgtgggatgagtttttaaatgccacaagacataatttaaaataaataaactttgggaaaaggtgtaagacagtagccccatcacatttgtgatactgacaggtatcaacccagaagcccatgaactgtgtttccatcctttgcatttctctgcgagtagttccacacaggtttgtaagtaagtaagaaagaaggcaaattgattcaaatgttacaaaaaaacccttcttggtggattagacaggttaaatatataaacaaacaaacaaaaattgctcaaaaaagaggagaaaagctcaagaggaaaagctaaggactggtaggaaaaagctttactctttcatgccattttatttctttttgatttttaaatcattcattcaatagataccaccgtgtgacctataattttgcaaatctgttacctctgacatcaagtgtaattagcttttggagagtgggctgacatcaagtgtaattagcttttggagagtgggttttgtccattattaataattaattaattaacatcaaacacggcttctcatgctatttctacctcactttggttttggggtgttcctgataattgtgcacacctgagttcacagcttcaccacttgtccattgcgttattttctttttcctttataattctttctttttccttcataattttcaaaagaaaacccaaagctctaaggtaacaaattaccaaattacatgaagatttggtttttgtcttgcatttttttcctttatgtgacgctggaccttttctttacccaaggatttttaaaactcagatttaaaacaaggggttactttacatcctactaagaagtttaagtaagtaagtttcattctaaaatcagaggtaaatagagtgcataaataattttgttttaatctttttgtttttcttttagacacattagctctggagtgagtctgtcataatatttgaacaaaaattgagagctttattgctgcattttaagcataattaatttggacattatttcgtgttgtgttctttataaccaccgagtattaaactgtaaatcataatgtaactgaagcataaacatcacatggcatgttttgtcattgttttcaggtactgagttcttacttgagtatcataatatattgtgttttaacaccaacactgtaacatttacgaattatttttttaaacttcagttttactgcattttcacaacatatcagacttcaccaaatatatgccttactattgtattatagtactgctttactgtgtatctcaataaagcacgcagttatgttac

SEQ ID NO: 2234 - protein, 635 aa, Homo sapiens
MREQLKGHETQTTCWDHPKMTELYQSLADLNNVRFSAYRTAMKLRRLQKALCLDLLSLSAACDALDQHNLKQNDQPMDILQIINCLTTIYDRLEQEHNNLVNVPLCVDMCLNWLLNVYDTGRTGRIRVLSFKTGIISLCKAHLEDKYRYLFKQVASSTGFCDQRRLGLLLHDSIQIPRQLGEVASFGGSNIEPSVRSCFQFANNKPEIEAALFLDWMRLEPQSMVWLPVLHRVAAAETAKHQAKCNICKECPIIGFRYRSLKHFNYDICQSCFFSGRVAKGHKMHYPMVEYCTPTTSGEDVRDFAKVLKNKFRTKRYFAKHPRMGYLPVQTVLEGDNMETPVTLINFWPVDSAPASSPQLSHDDTHSRIEHYASRLAEMENSNGSYLNDSISPNESIDDEHLLIQHYCQSLNQDSPLSQPRSPAQILISLESEERGELERILADLEEENRNLQAEYDRLKQQHEHKGLSPLPSPPEMMPTSPQSPRDAELIAEAKLLRQHKGRLEARMQILEDHNKQLESQLHRLRQLLEQPQAEAKVNGTTVSSPSTSLQRSDSSQPMLLRVVGSQTSDSMGEEDLLSPPQDTSTGLEEVMEQLNNSFPSSRGHNVGSLFHMADDLGRAMESLVSVMTDEEGAE

SEQ ID NO: 2235 - DNA, 4584 bp, Homo sapiens
actttcggggagcccggcggctctgggaagctcactcctccactcgtacccacactcgaccgcggagcccttgcagccatgagggaacagctcaaaggccacgagactcaaacaacttgctgggaccatcccaaaatgacagagctctaccagtctttagctgacctgaataatgtcagattctcagcttataggactgccatgaaactccgaagactgcagaaggccctttgcttggatctcttgagcctgtcagctgcatgtgatgccttggaccagcacaacctcaagcaaaatgaccagcccatggatatcctgcagattattaattgtttgaccactatttatgaccgcctggagcaagagcacaacaatttggtcaacgtccctctctgcgtggatatgtgtctgaactggctgctgaatgtttatgatacgggacgaacagggaggatccgtgtcctgtcttttaaaactggcatcatttccctgtgtaaagcacatttggaagacaagtacagataccttttcaagcaagtggcaagttcaacaggattttgtgaccagcgcaggctgggcctccttctgcatgattctatccaaattccaagacagttgggtgaagttgcatcctttgggggcagtaacattgagccaagtgtccggagctgcttccaatttgctaataataagccagagatcgaagcggccctcttcctagactggatgagactggaaccccagtccatggtgtggctgcccgtcctgcacagagtggctgctgcagaaactgccaagcatcaggccaaatgtaacatctgcaaagagtgtccaatcattggattcaggtacaggagtctaaagcactttaattatgacatctgccaaagctgctttttttctggtcgagttgcaaaaggccataaaatgcactatcccatggtggaatattgcactccgactacatcaggagaagatgttcgagactttgccaaggtactaaaaaacaaatttcgaaccaaaaggtattttgcgaagcatccccgaatgggctacctgccagtgcagactgtcttagagggggacaacatggaaacgcctgcctcgtcccctcagctttcacacgatgatactcattcacgcattgaacattatgctagcaggctagcagaaatggaaaacagcaatggatcttatctaaatgatagcatctctcctaatgagagcatagatgatgaacatttgttaatccagcattactgccaaagtttgaaccaggactcccccctgagccagcctcgtagtcctgcccagatcttgatttccttagagagtgaggaaagaggggagctagagagaatcctagcagatcttgaggaagaaaacaggaatctgcaagcagaatatgaccgtctaaagcagcagcacgaacataaaggcctgtccccactgccgtcccctcctgaaatgatgcccacctctccccagagtccccgggatgctgagctcattgctgaggccaagctactgcgtcaacacaaaggccgcctggaagccaggatgcaaatcctggaagaccacaataaacagctggagtcacagttacacaggctaaggcagctgctggagcaaccccaggcagaggccaaagtgaatggcacaacggtgtcctctccttctacctctctacagaggtccgacagcagtcagcctatgctgctccgagtggttggcagtcaaacttcggactccatgggtgaggaagatcttctcagtcctccccaggacacaagcacagggttagaggaggtgatggagcaactcaacaactccttccctagttcaagaggaagaaatacccctggaaagccaatgagagaggacacaatgtaggaagtcttttccacatggcagatgatttgggcagagcgatggagtccttagtatcagtcatgacagatgaagaaggagcagaataaatgttttacaactcctgattcccgcatggtttttataatattcatacaacaaagaggattagacagtaagagtttacaagaaataaatctatatttttgtgaagggtagtggtattatactgtagatttcagtagtttctaagtctgttattgttttgttaacaatggcaggttttacacgtctatgcaattgtacaaaaaagttataagaaaactacatgtaaaatcttgatagctaaataacttgccatttctttatatggaacgcattttgggttgtttaaaaatttataacagttataaagaaagattgtaaactaaagtgtgctttataaaaaaaagttgtttataaaaacccctaaaaacaaaacaaacacacacacacacacatacacacacacacacaaaactttgaggcagcgcattgttttgcatccttttggcgtgatatccatatgaaattcatggctttttctttttttgcatattaaagataagacttcctctaccaccacaccaaatgactactacacactgctcatttgagaactgtcagctgagtggggcaggcttgagttttcatttcatatatctatatgtctataagtatataaatactatagttatatagataaagagatacgaatttctatagactgactttttccattttttaaatgttcatgtcacatcctaatagaaagaaattacttctagtcagtcatccaggcttacctgcttggtctagaatggatttttcccggagccggaagccaggaggaaactacaccacactaaaacattgtctacagctccagatgtttctcattttaaacaactttccactgacaacgaaagtaaagtaaagtattggatttttttaaagggaacatgtgaatgaatacacaggacttattatatcagagtgagtaatcggttggttggttgattgattgattgattgatacattcagcttcctgctgctagcaatgccacgatttagatttaatgatgcttcagtggaaatcaatcagaaggtattctgaccttgtgaacatcagaaggtattttttaactcccaagcagtagcaggacgatgatagggctggagggctatggattcccagcccatccctgtgaaggagtaggccactctttaagtgaaggattggatgattgttcataatacataaagttctctgtaattacaactaaattattatgccctcttctcacagtcaaaaggaactgggtggtttggtttttgttgcttttttagatttattgtcccatgtgggatgagtttttaaatgccacaagacataatttaaaataaataaactttgggaaaaggtgtaagacagtagccccatcacatttgtgatactgacaggtatcaacccagaagcccatgaactgtgtttccatcctttgcatttctctgcgagtagttccacacaggtttgtaagtaagtaagaaagaaggcaaattgattcaaatgttacaaaaaaacccttcttggtggattagacaggttaaatatataaacaaacaaacaaaaattgctcaaaaaagaggagaaaagctcaagaggaaaagctaaggactggtaggaaaaagctttactctttcatgccattttatttctttttgatttttaaatcattcattcaatagataccaccgtgtgacctataattttgcaaatctgttacctctgacatcaagtgtaattagcttttggagagtgggctgacatcaagtgtaattagcttttggagagtgggttttgtccattattaataattaattaattaacatcaaacacggcttctcatgctatttctacctcactttggttttggggtgttcctgataattgtgcacacctgagttcacagcttcaccacttgtccattgcgttattttctttttcctttataattctttctttttccttcataattttcaaaagaaaacccaaagctctaaggtaacaaattaccaaattacatgaagatttggtttttgtcttgcatttttttcctttatgtgacgctggaccttttctttacccaaggatttttaaaactcagatttaaaacaaggggttactttacatcctactaagaagtttaagtaagtaagtttcattctaaaatcagaggtaaatagagtgcataaataattttgttttaatctttttgtttttcttttagacacattagctctggagtgagtctgtcataatatttgaacaaaaattgagagctttattgctgcattttaagcataattaatttggacattatttcgtgttgtgttctttataaccaccgagtattaaactgtaaatcataatgtaactgaagcataaacatcacatggcatgttttgtcattgttttcaggtactgagttcttacttgagtatcataatatattgtgttttaacaccaacactgtaacatttacgaattatttttttaaacttcagttttactgcattttcacaacatatcagacttcaccaaatatatgccttactattgtattatagtactgctttactgtgtatctcaataaagcacgcagttatgttac

SEQ ID NO: 2236 - protein, 604 aa, Homo sapiens
MREQLKGHETQTTCWDHPKMTELYQSLADLNNVRFSAYRTAMKLRRLQKALCLDLLSLSAACDALDQHNLKQNDQPMDILQIINCLTTIYDRLEQEHNNLVNVPLCVDMCLNWLLNVYDTGRTGRIRVLSFKTGIISLCKAHLEDKYRYLFKQVASSTGFCDQRRLGLLLHDSIQIPRQLGEVASFGGSNIEPSVRSCFQFANNKPEIEAALFLDWMRLEPQSMVWLPVLHRVAAAETAKHQAKCNICKECPIIGFRYRSLKHFNYDICQSCFFSGRVAKGHKMHYPMVEYCTPTTSGEDVRDFAKVLKNKFRTKRYFAKHPRMGYLPVQTVLEGDNMETPASSPQLSHDDTHSRIEHYASRLAEMENSNGSYLNDSISPNESIDDEHLLIQHYCQSLNQDSPLSQPRSPAQILISLESEERGELERILADLEEENRNLQAEYDRLKQQHEHKGLSPLPSPPEMMPTSPQSPRDAELIAEAKLLRQHKGRLEARMQILEDHNKQLESQLHRLRQLLEQPQAEAKVNGTTVSSPSTSLQRSDSSQPMLLRVVGSQTSDSMGEEDLLSPPQDTSTGLEEVMEQLNNSFPSSRGRNTPGKPMREDTM

SEQ ID NO: 2237 - DNA, 4552 bp, Homo sapiens
actttcggggagcccggcggctctgggaagctcactcctccactcgtacccacactcgaccgcggagcccttgcagccatgagggaacagctcaaaggccacgagactcaaacaacttgctgggaccatcccaaaatgacagagctctaccagtctttagctgacctgaataatgtcagattctcagcttataggactgccatgaaactccgaagactgcagaaggccctttgcttggatctcttgagcctgtcagctgcatgtgatgccttggaccagcacaacctcaagcaaaatgaccagcccatggatatcctgcagattattaattgtttgaccactatttatgaccgcctggagcaagagcacaacaatttggtcaacgtccctctctgcgtggatatgtgtctgaactggctgctgaatgtttatgatacgggacgaacagggaggatccgtgtcctgtcttttaaaactggcatcatttccctgtgtaaagcacatttggaagacaagtacagataccttttcaagcaagtggcaagttcaacaggattttgtgaccagcgcaggctgggcctccttctgcatgattctatccaaattccaagacagttgggtgaagttgcatcctttgggggcagtaacattgagccaagtgtccggagctgcttccaatttgctaataataagccagagatcgaagcggccctcttcctagactggatgagactggaaccccagtccatggtgtggctgcccgtcctgcacagagtggctgctgcagaaactgccaagcatcaggccaaatgtaacatctgcaaagagtgtccaatcattggattcaggtacaggagtctaaagcactttaattatgacatctgccaaagctgctttttttctggtcgagttgcaaaaggccataaaatgcactatcccatggtggaatattgcactccgactacatcaggagaagatgttcgagactttgccaaggtactaaaaaacaaatttcgaaccaaaaggtattttgcgaagcatccccgaatgggctacctgccagtgcagactgtcttagagggggacaacatggaaacgcctgcctcgtcccctcagctttcacacgatgatactcattcacgcattgaacattatgctagcaggctagcagaaatggaaaacagcaatggatcttatctaaatgatagcatctctcctaatgagagcatagatgatgaacatttgttaatccagcattactgccaaagtttgaaccaggactcccccctgagccagcctcgtagtcctgcccagatcttgatttccttagagagtgaggaaagaggggagctagagagaatcctagcagatcttgaggaagaaaacaggaatctgcaagcagaatatgaccgtctaaagcagcagcacgaacataaaggcctgtccccactgccgtcccctcctgaaatgatgcccacctctccccagagtccccgggatgctgagctcattgctgaggccaagctactgcgtcaacacaaaggccgcctggaagccaggatgcaaatcctggaagaccacaataaacagctggagtcacagttacacaggctaaggcagctgctggagcaaccccaggcagaggccaaagtgaatggcacaacggtgtcctctccttctacctctctacagaggtccgacagcagtcagcctatgctgctccgagtggttggcagtcaaacttcggactccatgggtgaggaagatcttctcagtcctccccaggacacaagcacagggttagaggaggtgatggagcaactcaacaactccttccctagttcaagaggacacaatgtaggaagtcttttccacatggcagatgatttgggcagagcgatggagtccttagtatcagtcatgacagatgaagaaggagcagaataaatgttttacaactcctgattcccgcatggtttttataatattcatacaacaaagaggattagacagtaagagtttacaagaaataaatctatatttttgtgaagggtagtggtattatactgtagatttcagtagtttctaagtctgttattgttttgttaacaatggcaggttttacacgtctatgcaattgtacaaaaaagttataagaaaactacatgtaaaatcttgatagctaaataacttgccatttctttatatggaacgcattttgggttgtttaaaaatttataacagttataaagaaagattgtaaactaaagtgtgctttataaaaaaaagttgtttataaaaacccctaaaaacaaaacaaacacacacacacacacatacacacacacacacaaaactttgaggcagcgcattgttttgcatccttttggcgtgatatccatatgaaattcatggctttttctttttttgcatattaaagataagacttcctctaccaccacaccaaatgactactacacactgctcatttgagaactgtcagctgagtggggcaggcttgagttttcatttcatatatctatatgtctataagtatataaatactatagttatatagataaagagatacgaatttctatagactgactttttccattttttaaatgttcatgtcacatcctaatagaaagaaattacttctagtcagtcatccaggcttacctgcttggtctagaatggatttttcccggagccggaagccaggaggaaactacaccacactaaaacattgtctacagctccagatgtttctcattttaaacaactttccactgacaacgaaagtaaagtaaagtattggatttttttaaagggaacatgtgaatgaatacacaggacttattatatcagagtgagtaatcggttggttggttgattgattgattgattgatacattcagcttcctgctgctagcaatgccacgatttagatttaatgatgcttcagtggaaatcaatcagaaggtattctgaccttgtgaacatcagaaggtattttttaactcccaagcagtagcaggacgatgatagggctggagggctatggattcccagcccatccctgtgaaggagtaggccactctttaagtgaaggattggatgattgttcataatacataaagttctctgtaattacaactaaattattatgccctcttctcacagtcaaaaggaactgggtggtttggtttttgttgcttttttagatttattgtcccatgtgggatgagtttttaaatgccacaagacataatttaaaataaataaactttgggaaaaggtgtaagacagtagccccatcacatttgtgatactgacaggtatcaacccagaagcccatgaactgtgtttccatcctttgcatttctctgcgagtagttccacacaggtttgtaagtaagtaagaaagaaggcaaattgattcaaatgttacaaaaaaacccttcttggtggattagacaggttaaatatataaacaaacaaacaaaaattgctcaaaaaagaggagaaaagctcaagaggaaaagctaaggactggtaggaaaaagctttactctttcatgccattttatttctttttgatttttaaatcattcattcaatagataccaccgtgtgacctataattttgcaaatctgttacctctgacatcaagtgtaattagcttttggagagtgggctgacatcaagtgtaattagcttttggagagtgggttttgtccattattaataattaattaattaacatcaaacacggcttctcatgctatttctacctcactttggttttggggtgttcctgataattgtgcacacctgagttcacagcttcaccacttgtccattgcgttattttctttttcctttataattctttctttttccttcataattttcaaaagaaaacccaaagctctaaggtaacaaattaccaaattacatgaagatttggtttttgtcttgcatttttttcctttatgtgacgctggaccttttctttacccaaggatttttaaaactcagatttaaaacaaggggttactttacatcctactaagaagtttaagtaagtaagtttcattctaaaatcagaggtaaatagagtgcataaataattttgttttaatctttttgtttttcttttagacacattagctctggagtgagtctgtcataatatttgaacaaaaattgagagctttattgctgcattttaagcataattaatttggacattatttcgtgttgtgttctttataaccaccgagtattaaactgtaaatcataatgtaactgaagcataaacatcacatggcatgttttgtcattgttttcaggtactgagttcttacttgagtatcataatatattgtgttttaacaccaacactgtaacatttacgaattatttttttaaacttcagttttactgcattttcacaacatatcagacttcaccaaatatatgccttactattgtattatagtactgctttactgtgtatctcaataaagcacgcagttatgttac

SEQ ID NO: 2238 - protein, 622 aa, Homo sapiens
MREQLKGHETQTTCWDHPKMTELYQSLADLNNVRFSAYRTAMKLRRLQKALCLDLLSLSAACDALDQHNLKQNDQPMDILQIINCLTTIYDRLEQEHNNLVNVPLCVDMCLNWLLNVYDTGRTGRIRVLSFKTGIISLCKAHLEDKYRYLFKQVASSTGFCDQRRLGLLLHDSIQIPRQLGEVASFGGSNIEPSVRSCFQFANNKPEIEAALFLDWMRLEPQSMVWLPVLHRVAAAETAKHQAKCNICKECPIIGFRYRSLKHFNYDICQSCFFSGRVAKGHKMHYPMVEYCTPTTSGEDVRDFAKVLKNKFRTKRYFAKHPRMGYLPVQTVLEGDNMETPASSPQLSHDDTHSRIEHYASRLAEMENSNGSYLNDSISPNESIDDEHLLIQHYCQSLNQDSPLSQPRSPAQILISLESEERGELERILADLEEENRNLQAEYDRLKQQHEHKGLSPLPSPPEMMPTSPQSPRDAELIAEAKLLRQHKGRLEARMQILEDHNKQLESQLHRLRQLLEQPQAEAKVNGTTVSSPSTSLQRSDSSQPMLLRVVGSQTSDSMGEEDLLSPPQDTSTGLEEVMEQLNNSFPSSRGHNVGSLFHMADDLGRAMESLVSVMTDEEGAE

SEQ ID NO: 2239 - DNA, 1634 bp, Homo sapiens
actttcggggagcccggcggctctgggaagctcactcctccactcgtacccacactcgaccgcggagcccttgcagccatgagggaacagctcaaaggccacgagactcaaacaacttgctgggaccatcccaaaatgacagagctctaccagtctttagctgacctgaataatgtcagattctcagcttataggactgccatgaaactccgaagactgcagaaggccctttgcttggatctcttgagcctgtcagctgcatgtgatgccttggaccagcacaacctcaagcaaaatgaccagcccatggatatcctgcagattattaattgtttgaccactatttatgaccgcctggagcaagagcacaacaatttggtcaacgtccctctctgcgtggatatgtgtctgaactggctgctgaatgtttatgatacgggacgaacagggaggatccgtgtcctgtcttttaaaactggcatcatttccctgtgtaaagcacatttggaagacaagtacagataccttttcaagcaagtggcaagttcaacaggattttgtgaccagcgcaggctgggcctccttctgcatgattctatccaaattccaagacagttgggtgaagttgcatcctttgggggcagtaacattgagccaagtgtccggagctgcttccaatttgctaataataagccagagatcgaagcggccctcttcctagactggatgagactggaaccccagtccatggtgtggctgcccgtcctgcacagagtggctgctgcagaaactgccaagcatcaggccaaatgtaacatctgcaaagagtgtccaatcattggattcaggtacaggagtctaaagcactttaattatgacatctgccaaagctgctttttttctggtcgagttgcaaaaggccataaaatgcactatcccatggtggaatattgcactccgactacatcaggagaagatgttcgagactttgccaaggtactaaaaaacaaatttcgaaccaaaaggtattttgcgaagcatccccgaatgggctacctgccagtgcagactgtcttagagggggacaacatggaaacgtgagtagtagcaaaagcagaacacactcttgtttgatgtatatttgaactcctctcagctgaacaccctcctttcactcccaaatgcaaacagtctcttctatttctttctttttatttacattagctgaaaagagaaaaataagctgatgtccagttgccactttcccacgtcacttgacaatttctttttccaaaagttaaactttatctcacagggggaaaaaaaaaaaaaaaccacaacacaatacagccactaattgccttacaagccttataagaaatatgggactgtttacaaatgagtgattccagtatttcattttgattttctctctcacaatcagtaatgtgtgtctttgtatctcatgtgtggtcatatctagtcactgtctactcacaaatcagtaaatgcttgtgtctttttgtatctcattgtgtgtggtcatatctagtcacttgctttctaccaaaagaaaatatagtcacaggaaactactcacgtaagtagtaatgattctcaagatcaaaggggag

SEQ ID NO: 2240 - protein, 340 aa, Homo sapiens
MREQLKGHETQTTCWDHPKMTELYQSLADLNNVRFSAYRTAMKLRRLQKALCLDLLSLSAACDALDQHNLKQNDQPMDILQIINCLTTIYDRLEQEHNNLVNVPLCVDMCLNWLLNVYDTGRTGRIRVLSFKTGIISLCKAHLEDKYRYLFKQVASSTGFCDQRRLGLLLHDSIQIPRQLGEVASFGGSNIEPSVRSCFQFANNKPEIEAALFLDWMRLEPQSMVWLPVLHRVAAAETAKHQAKCNICKECPIIGFRYRSLKHFNYDICQSCFFSGRVAKGHKMHYPMVEYCTPTTSGEDVRDFAKVLKNKFRTKRYFAKHPRMGYLPVQTVLEGDNMET

SEQ ID NO: 2241 - DNA, 7050 bp, Homo sapiens
acactagcaatggcaaagctttgtgcggaggcattgctggctgctctgaactaaaagcatccgtggggaccgaaagaggtttttgcacaccttattaaggaactccaggatggcattgggcagcggcaaactgttgtcagaacattgaatgcaactggggaagaaataattcagcaatcctcaaaaacagatgccagtattctacaggaaaaattgggaagcctgaatctgcggtggcaggaggtctgcaaacagctgtcagacagaaaaaagaggctagaagaacaaaagaatatcttgtcagaatttcaaagagatttaaatgaatttgttttatggttggaggaagcagataacattgctagtatcccacttgaacctggaaaagagcagcaactaaaagaaaagcttgagcaagtcaagttactggtggaagagttgcccctgcgccagggaattctcaaacaattaaatgaaactggaggacccgtgcttgtaagtgctcccataagcccagaagagcaagataaacttgaaaataagctcaagcagacaaatctccagtggataaaggtttccagagctttacctgagaaacaaggagaaattgaagctcaaataaaagaccttgggcagcttgaaaaaaagcttgaagaccttgaagagcagttaaatcatctgctgctgtggttatctcctattaggaatcagttggaaatttataaccaaccaaaccaagaaggaccatttgacgttcaggaaactgaaatagcagttcaagctaaacaaccggatgtggaagagattttgtctaaagggcagcatttgtacaaggaaaaaccagccactcagccagtgaagaggaagttagaagatctgagctctgagtggaaggcggtaaaccgtttacttcaagagctgagggcaaagcagcctgacctagctcctggactgaccactattggagcctctcctactcagactgttactctggtgacacaacctgtggttactaaggaaactgccatctccaaactagaaatgccatcttccttgatgttggaggtacctgctctggcagatttcaaccgggcttggacagaacttaccgactggctttctctgcttgatcaagttataaaatcacagagggtgatggtgggtgaccttgaggatatcaacgagatgatcatcaagcagaaggcaacaatgcaggatttggaacagaggcgtccccagttggaagaactcattaccgctgcccaaaatttgaaaaacaagaccagcaatcaagaggctagaacaatcattacggatcgaattgaaagaattcagaatcagtgggatgaagtacaagaacaccttcagaaccggaggcaacagttgaatgaaatgttaaaggattcaacacaatggctggaagctaaggaagaagctgagcaggtcttaggacaggccagagccaagcttgagtcatggaaggagggtccctatacagtagatgcaatccaaaagaaaatcacagaaaccaagcagttggccaaagacctccgccagtggcagacaaatgtagatgtggcaaatgacttggccctgaaacttctccgggattattctgcagatgataccagaaaagtccacatgataacagagaatatcaatgcctcttggagaagcattcataaaagggtgagtgagcgagaggctgctttggaagaaactcatagattactgcaacagttccccctggacctggaaaagtttcttgcctggcttacagaagctgaaacaactgccaatgtcctacaggatgctacccgtaaggaaaggctcctagaagactccaagggagtaaaagagctgatgaaacaatggcaagacctccaaggtgaaattgaagctcacacagatgtttatcacaacctggatgaaaacagccaaaaaatcctgagatccctggaaggttccgatgatgcagtcctgttacaaagacgtttggataacatgaacttcaagtggagtgaacttcggaaaaagtctctcaacattaggtcccatttggaagccagttctgaccagtggaagcgtctgcacctttctctgcaggaacttctggtgtggctacagctgaaagatgatgaattaagccggcaggcacctattggaggcgactttccagcagttcagaagcagaacgatgtacatagggccttcaagagggaattgaaaactaaagaacctgtaatcatgagtactcttgagactgtacgaatatttctgacagagcagcctttggaaggactagagaaactctaccaggagcccagagagctgcctcctgaggagagagcccagaatgtcactcggcttctacgaaagcaggctgaggaggtcaatactgagtgggaaaaattgaacctgcactccgctgactggcagagaaaaatagatgagacccttgaaagactccaggaacttcaagaggccacggatgagctggacctcaagctgcgccaagctgaggtgatcaagggatcctggcagcccgtgggcgatctcctcattgactctctccaagatcacctcgagaaagtcaaggcacttcgaggagaaattgcgcctctgaaagagaacgtgagccacgtcaatgaccttgctcgccagcttaccactttgggcattcagctctcaccgtataacctcagcactctggaagacctgaacaccagatggaagcttctgcaggtggccgtcgaggaccgagtcaggcagctgcatgaagcccacagggactttggtccagcatctcagcactttctttccacgtctgtccagggtccctgggagagagccatctcgccaaacaaagtgccctactatatcaaccacgagactcaaacaacttgctgggaccatcccaaaatgacagagctctaccagtctttagctgacctgaataatgtcagattctcagcttataggactgccatgaaactccgaagactgcagaaggccctttgcttggatctcttgagcctgtcagctgcatgtgatgccttggaccagcacaacctcaagcaaaatgaccagcccatggatatcctgcagattattaattgtttgaccactatttatgaccgcctggagcaagagcacaacaatttggtcaacgtccctctctgcgtggatatgtgtctgaactggctgctgaatgtttatgatacgggacgaacagggaggatccgtgtcctgtcttttaaaactggcatcatttccctgtgtaaagcacatttggaagacaagtacagataccttttcaagcaagtggcaagttcaacaggattttgtgaccagcgcaggctgggcctccttctgcatgattctatccaaattccaagacagttgggtgaagttgcatcctttgggggcagtaacattgagccaagtgtccggagctgcttccaatttgctaataataagccagagatcgaagcggccctcttcctagactggatgagactggaaccccagtccatggtgtggctgcccgtcctgcacagagtggctgctgcagaaactgccaagcatcaggccaaatgtaacatctgcaaagagtgtccaatcattggattcaggtacaggagtctaaagcactttaattatgacatctgccaaagctgctttttttctggtcgagttgcaaaaggccataaaatgcactatcccatggtggaatattgcactccgactacatcaggagaagatgttcgagactttgccaaggtactaaaaaacaaatttcgaaccaaaaggtattttgcgaagcatccccgaatgggctacctgccagtgcagaatctgcaagcagaatatgaccgtctaaagcagcagcacgaacataaaggcctgtccccactgccgtcccctcctgaaatgatgcccacctctccccagagtccccgggatgctgagctcattgctgaggccaagctactgcgtcaacacaaaggccgcctggaagccaggatgcaaatcctggaagaccacaataaacagctggagtcacagttacacaggctaaggcagctgctggagcaaccccaggcagaggccaaagtgaatggcacaacggtgtcctctccttctacctctctacagaggtccgacagcagtcagcctatgctgctccgagtggttggcagtcaaacttcggactccatgggtgaggaagatcttctcagtcctccccaggacacaagcacagggttagaggaggtgatggagcaactcaacaactccttccctagttcaagaggaagaaatacccctggaaagccaatgagagaggacacaatgtaggaagtcttttccacatggcagatgatttgggcagagcgatggagtccttagtatcagtcatgacagatgaagaaggagcagaataaatgttttacaactcctgattcccgcatggtttttataatattcatacaacaaagaggattagacagtaagagtttacaagaaataaatctatatttttgtgaagggtagtggtattatactgtagatttcagtagtttctaagtctgttattgttttgttaacaatggcaggttttacacgtctatgcaattgtacaaaaaagttataagaaaactacatgtaaaatcttgatagctaaataacttgccatttctttatatggaacgcattttgggttgtttaaaaatttataacagttataaagaaagattgtaaactaaagtgtgctttataaaaaaaagttgtttataaaaacccctaaaaacaaaacaaacacacacacacacacatacacacacacacacaaaactttgaggcagcgcattgttttgcatccttttggcgtgatatccatatgaaattcatggctttttctttttttgcatattaaagataagacttcctctaccaccacaccaaatgactactacacactgctcatttgagaactgtcagctgagtggggcaggcttgagttttcatttcatatatctatatgtctataagtatataaatactatagttatatagataaagagatacgaatttctatagactgactttttccattttttaaatgttcatgtcacatcctaatagaaagaaattacttctagtcagtcatccaggcttacctgcttggtctagaatggatttttcccggagccggaagccaggaggaaactacaccacactaaaacattgtctacagctccagatgtttctcattttaaacaactttccactgacaacgaaagtaaagtaaagtattggatttttttaaagggaacatgtgaatgaatacacaggacttattatatcagagtgagtaatcggttggttggttgattgattgattgattgatacattcagcttcctgctgctagcaatgccacgatttagatttaatgatgcttcagtggaaatcaatcagaaggtattctgaccttgtgaacatcagaaggtattttttaactcccaagcagtagcaggacgatgatagggctggagggctatggattcccagcccatccctgtgaaggagtaggccactctttaagtgaaggattggatgattgttcataatacataaagttctctgtaattacaactaaattattatgccctcttctcacagtcaaaaggaactgggtggtttggtttttgttgcttttttagatttattgtcccatgtgggatgagtttttaaatgccacaagacataatttaaaataaataaactttgggaaaaggtgtaagacagtagccccatcacatttgtgatactgacaggtatcaacccagaagcccatgaactgtgtttccatcctttgcatttctctgcgagtagttccacacaggtttgtaagtaagtaagaaagaaggcaaattgattcaaatgttacaaaaaaacccttcttggtggattagacaggttaaatatataaacaaacaaacaaaaattgctcaaaaaagaggagaaaagctcaagaggaaaagctaaggactggtaggaaaaagctttactctttcatgccattttatttctttttgatttttaaatcattcattcaatagataccaccgtgtgacctataattttgcaaatctgttacctctgacatcaagtgtaattagcttttggagagtgggctgacatcaagtgtaattagcttttggagagtgggttttgtccattattaataattaattaattaacatcaaacacggcttctcatgctatttctacctcactttggttttggggtgttcctgataattgtgcacacctgagttcacagcttcaccacttgtccattgcgttattttctttttcctttataattctttctttttccttcataattttcaaaagaaaacccaaagctctaaggtaacaaattaccaaattacatgaagatttggtttttgtcttgcatttttttcctttatgtgacgctggaccttttctttacccaaggatttttaaaactcagatttaaaacaaggggttactttacatcctactaagaagtttaagtaagtaagtttcattctaaaatcagaggtaaatagagtgcataaataattttgttttaatctttttgtttttcttttagacacattagctctggagtgagtctgtcataatatttgaacaaaaattgagagctttattgctgcattttaagcataattaatttggacattatttcgtgttgtgttctttataaccaccgagtattaaactgtaaatcataatgtaactgaagcataaacatcacatggcatgttttgtcattgttttcaggtactgagttcttacttgagtatcataatatattgtgttttaacaccaacactgtaacatttacgaattatttttttaaacttcagttttactgcattttcacaacatatcagacttcaccaaatatatgccttactattgtattatagtactgctttactgtgtatctcaataaagcacgcagttatgttac

SEQ ID NO: 2242 - protein, 1105 aa, Homo sapiens
MPSSLMLEVPALADFNRAWTELTDWLSLLDQVIKSQRVMVGDLEDINEMIIKQKATMQDLEQRRPQLEELITAAQNLKNKTSNQEARTIITDRIERIQNQWDEVQEHLQNRRQQLNEMLKDSTQWLEAKEEAEQVLGQARAKLESWKEGPYTVDAIQKKITETKQLAKDLRQWQTNVDVANDLALKLLRDYSADDTRKVHMITENINASWRSIHKRVSEREAALEETHRLLQQFPLDLEKFLAWLTEAETTANVLQDATRKERLLEDSKGVKELMKQWQDLQGEIEAHTDVYHNLDENSQKILRSLEGSDDAVLLQRRLDNMNFKWSELRKKSLNIRSHLEASSDQWKRLHLSLQELLVWLQLKDDELSRQAPIGGDFPAVQKQNDVHRAFKRELKTKEPVIMSTLETVRIFLTEQPLEGLEKLYQEPRELPPEERAQNVTRLLRKQAEEVNTEWEKLNLHSADWQRKIDETLERLQELQEATDELDLKLRQAEVIKGSWQPVGDLLIDSLQDHLEKVKALRGEIAPLKENVSHVNDLARQLTTLGIQLSPYNLSTLEDLNTRWKLLQVAVEDRVRQLHEAHRDFGPASQHFLSTSVQGPWERAISPNKVPYYINHETQTTCWDHPKMTELYQSLADLNNVRFSAYRTAMKLRRLQKALCLDLLSLSAACDALDQHNLKQNDQPMDILQIINCLTTIYDRLEQEHNNLVNVPLCVDMCLNWLLNVYDTGRTGRIRVLSFKTGIISLCKAHLEDKYRYLFKQVASSTGFCDQRRLGLLLHDSIQIPRQLGEVASFGGSNIEPSVRSCFQFANNKPEIEAALFLDWMRLEPQSMVWLPVLHRVAAAETAKHQAKCNICKECPIIGFRYRSLKHFNYDICQSCFFSGRVAKGHKMHYPMVEYCTPTTSGEDVRDFAKVLKNKFRTKRYFAKHPRMGYLPVQNLQAEYDRLKQQHEHKGLSPLPSPPEMMPTSPQSPRDAELIAEAKLLRQHKGRLEARMQILEDHNKQLESQLHRLRQLLEQPQAEAKVNGTTVSSPSTSLQRSDSSQPMLLRVVGSQTSDSMGEEDLLSPPQDTSTGLEEVMEQLNNSFPSSRGRNTPGKPMREDTM

SEQ ID NO: 2243 - DNA, 7378 bp, Homo sapiens
acactagcaatggcaaagctttgtgcggaggcattgctggctgctctgaactaaaagcatccgtggggaccgaaagaggtttttgcacaccttattaaggaactccaggatggcattgggcagcggcaaactgttgtcagaacattgaatgcaactggggaagaaataattcagcaatcctcaaaaacagatgccagtattctacaggaaaaattgggaagcctgaatctgcggtggcaggaggtctgcaaacagctgtcagacagaaaaaagaggctagaagaacaaaagaatatcttgtcagaatttcaaagagatttaaatgaatttgttttatggttggaggaagcagataacattgctagtatcccacttgaacctggaaaagagcagcaactaaaagaaaagcttgagcaagtcaagttactggtggaagagttgcccctgcgccagggaattctcaaacaattaaatgaaactggaggacccgtgcttgtaagtgctcccataagcccagaagagcaagataaacttgaaaataagctcaagcagacaaatctccagtggataaaggtttccagagctttacctgagaaacaaggagaaattgaagctcaaataaaagaccttgggcagcttgaaaaaaagcttgaagaccttgaagagcagttaaatcatctgctgctgtggttatctcctattaggaatcagttggaaatttataaccaaccaaaccaagaaggaccatttgacgttcaggaaactgaaatagcagttcaagctaaacaaccggatgtggaagagattttgtctaaagggcagcatttgtacaaggaaaaaccagccactcagccagtgaagaggaagttagaagatctgagctctgagtggaaggcggtaaaccgtttacttcaagagctgagggcaaagcagcctgacctagctcctggactgaccactattggagcctctcctactcagactgttactctggtgacacaacctgtggttactaaggaaactgccatctccaaactagaaatgccatcttccttgatgttggaggtacctgctctggcagatttcaaccgggcttggacagaacttaccgactggctttctctgcttgatcaagttataaaatcacagagggtgatggtgggtgaccttgaggatatcaacgagatgatcatcaagcagaaggcaacaatgcaggatttggaacagaggcgtccccagttggaagaactcattaccgctgcccaaaatttgaaaaacaagaccagcaatcaagaggctagaacaatcattacggatcgaattgaaagaattcagaatcagtgggatgaagtacaagaacaccttcagaaccggaggcaacagttgaatgaaatgttaaaggattcaacacaatggctggaagctaaggaagaagctgagcaggtcttaggacaggccagagccaagcttgagtcatggaaggagggtccctatacagtagatgcaatccaaaagaaaatcacagaaaccaagcagttggccaaagacctccgccagtggcagacaaatgtagatgtggcaaatgacttggccctgaaacttctccgggattattctgcagatgataccagaaaagtccacatgataacagagaatatcaatgcctcttggagaagcattcataaaagggtgagtgagcgagaggctgctttggaagaaactcatagattactgcaacagttccccctggacctggaaaagtttcttgcctggcttacagaagctgaaacaactgccaatgtcctacaggatgctacccgtaaggaaaggctcctagaagactccaagggagtaaaagagctgatgaaacaatggcaagacctccaaggtgaaattgaagctcacacagatgtttatcacaacctggatgaaaacagccaaaaaatcctgagatccctggaaggttccgatgatgcagtcctgttacaaagacgtttggataacatgaacttcaagtggagtgaacttcggaaaaagtctctcaacattaggtcccatttggaagccagttctgaccagtggaagcgtctgcacctttctctgcaggaacttctggtgtggctacagctgaaagatgatgaattaagccggcaggcacctattggaggcgactttccagcagttcagaagcagaacgatgtacatagggccttcaagagggaattgaaaactaaagaacctgtaatcatgagtactcttgagactgtacgaatatttctgacagagcagcctttggaaggactagagaaactctaccaggagcccagagagctgcctcctgaggagagagcccagaatgtcactcggcttctacgaaagcaggctgaggaggtcaatactgagtgggaaaaattgaacctgcactccgctgactggcagagaaaaatagatgagacccttgaaagactccaggaacttcaagaggccacggatgagctggacctcaagctgcgccaagctgaggtgatcaagggatcctggcagcccgtgggcgatctcctcattgactctctccaagatcacctcgagaaagtcaaggcacttcgaggagaaattgcgcctctgaaagagaacgtgagccacgtcaatgaccttgctcgccagcttaccactttgggcattcagctctcaccgtataacctcagcactctggaagacctgaacaccagatggaagcttctgcaggtggccgtcgaggaccgagtcaggcagctgcatgaagcccacagggactttggtccagcatctcagcactttctttccacgtctgtccagggtccctgggagagagccatctcgccaaacaaagtgccctactatatcaaccacgagactcaaacaacttgctgggaccatcccaaaatgacagagctctaccagtctttagctgacctgaataatgtcagattctcagcttataggactgccatgaaactccgaagactgcagaaggccctttgcttggatctcttgagcctgtcagctgcatgtgatgccttggaccagcacaacctcaagcaaaatgaccagcccatggatatcctgcagattattaattgtttgaccactatttatgaccgcctggagcaagagcacaacaatttggtcaacgtccctctctgcgtggatatgtgtctgaactggctgctgaatgtttatgatacgggacgaacagggaggatccgtgtcctgtcttttaaaactggcatcatttccctgtgtaaagcacatttggaagacaagtacagataccttttcaagcaagtggcaagttcaacaggattttgtgaccagcgcaggctgggcctccttctgcatgattctatccaaattccaagacagttgggtgaagttgcatcctttgggggcagtaacattgagccaagtgtccggagctgcttccaatttgctaataataagccagagatcgaagcggccctcttcctagactggatgagactggaaccccagtccatggtgtggctgcccgtcctgcacagagtggctgctgcagaaactgccaagcatcaggccaaatgtaacatctgcaaagagtgtccaatcattggattcaggtacaggagtctaaagcactttaattatgacatctgccaaagctgctttttttctggtcgagttgcaaaaggccataaaatgcactatcccatggtggaatattgcactccgactacatcaggagaagatgttcgagactttgccaaggtactaaaaaacaaatttcgaaccaaaaggtattttgcgaagcatccccgaatgggctacctgccagtgcagactgtcttagagggggacaacatggaaactcccgttactctgatcaacttctggccagtagattctgcgcctgcctcgtcccctcagctttcacacgatgatactcattcacgcattgaacattatgctagcaggctagcagaaatggaaaacagcaatggatcttatctaaatgatagcatctctcctaatgagagcatagatgatgaacatttgttaatccagcattactgccaaagtttgaaccaggactcccccctgagccagcctcgtagtcctgcccagatcttgatttccttagagagtgaggaaagaggggagctagagagaatcctagcagatcttgaggaagaaaacaggaatctgcaagcagaatatgaccgtctaaagcagcagcacgaacataaaggcctgtccccactgccgtcccctcctgaaatgatgcccacctctccccagagtccccgggatgctgagctcattgctgaggccaagctactgcgtcaacacaaaggccgcctggaagccaggatgcaaatcctggaagaccacaataaacagctggagtcacagttacacaggctaaggcagctgctggagcaaccccaggcagaggccaaagtgaatggcacaacggtgtcctctccttctacctctctacagaggtccgacagcagtcagcctatgctgctccgagtggttggcagtcaaacttcggactccatgggtgaggaagatcttctcagtcctccccaggacacaagcacagggttagaggaggtgatggagcaactcaacaactccttccctagttcaagaggacacaatgtaggaagtcttttccacatggcagatgatttgggcagagcgatggagtccttagtatcagtcatgacagatgaagaaggagcagaataaatgttttacaactcctgattcccgcatggtttttataatattcatacaacaaagaggattagacagtaagagtttacaagaaataaatctatatttttgtgaagggtagtggtattatactgtagatttcagtagtttctaagtctgttattgttttgttaacaatggcaggttttacacgtctatgcaattgtacaaaaaagttataagaaaactacatgtaaaatcttgatagctaaataacttgccatttctttatatggaacgcattttgggttgtttaaaaatttataacagttataaagaaagattgtaaactaaagtgtgctttataaaaaaaagttgtttataaaaacccctaaaaacaaaacaaacacacacacacacacatacacacacacacacaaaactttgaggcagcgcattgttttgcatccttttggcgtgatatccatatgaaattcatggctttttctttttttgcatattaaagataagacttcctctaccaccacaccaaatgactactacacactgctcatttgagaactgtcagctgagtggggcaggcttgagttttcatttcatatatctatatgtctataagtatataaatactatagttatatagataaagagatacgaatttctatagactgactttttccattttttaaatgttcatgtcacatcctaatagaaagaaattacttctagtcagtcatccaggcttacctgcttggtctagaatggatttttcccggagccggaagccaggaggaaactacaccacactaaaacattgtctacagctccagatgtttctcattttaaacaactttccactgacaacgaaagtaaagtaaagtattggatttttttaaagggaacatgtgaatgaatacacaggacttattatatcagagtgagtaatcggttggttggttgattgattgattgattgatacattcagcttcctgctgctagcaatgccacgatttagatttaatgatgcttcagtggaaatcaatcagaaggtattctgaccttgtgaacatcagaaggtattttttaactcccaagcagtagcaggacgatgatagggctggagggctatggattcccagcccatccctgtgaaggagtaggccactctttaagtgaaggattggatgattgttcataatacataaagttctctgtaattacaactaaattattatgccctcttctcacagtcaaaaggaactgggtggtttggtttttgttgcttttttagatttattgtcccatgtgggatgagtttttaaatgccacaagacataatttaaaataaataaactttgggaaaaggtgtaagacagtagccccatcacatttgtgatactgacaggtatcaacccagaagcccatgaactgtgtttccatcctttgcatttctctgcgagtagttccacacaggtttgtaagtaagtaagaaagaaggcaaattgattcaaatgttacaaaaaaacccttcttggtggattagacaggttaaatatataaacaaacaaacaaaaattgctcaaaaaagaggagaaaagctcaagaggaaaagctaaggactggtaggaaaaagctttactctttcatgccattttatttctttttgatttttaaatcattcattcaatagataccaccgtgtgacctataattttgcaaatctgttacctctgacatcaagtgtaattagcttttggagagtgggctgacatcaagtgtaattagcttttggagagtgggttttgtccattattaataattaattaattaacatcaaacacggcttctcatgctatttctacctcactttggttttggggtgttcctgataattgtgcacacctgagttcacagcttcaccacttgtccattgcgttattttctttttcctttataattctttctttttccttcataattttcaaaagaaaacccaaagctctaaggtaacaaattaccaaattacatgaagatttggtttttgtcttgcatttttttcctttatgtgacgctggaccttttctttacccaaggatttttaaaactcagatttaaaacaaggggttactttacatcctactaagaagtttaagtaagtaagtttcattctaaaatcagaggtaaatagagtgcataaataattttgttttaatctttttgtttttcttttagacacattagctctggagtgagtctgtcataatatttgaacaaaaattgagagctttattgctgcattttaagcataattaatttggacattatttcgtgttgtgttctttataaccaccgagtattaaactgtaaatcataatgtaactgaagcataaacatcacatggcatgttttgtcattgttttcaggtactgagttcttacttgagtatcataatatattgtgttttaacaccaacactgtaacatttacgaattatttttttaaacttcagttttactgcattttcacaacatatcagacttcaccaaatatatgccttactattgtattatagtactgctttactgtgtatctcaataaagcacgcagttatgttac

SEQ ID NO: 2244 - protein, 1243 aa, Homo sapiens
MPSSLMLEVPALADFNRAWTELTDWLSLLDQVIKSQRVMVGDLEDINEMIIKQKATMQDLEQRRPQLEELITAAQNLKNKTSNQEARTIITDRIERIQNQWDEVQEHLQNRRQQLNEMLKDSTQWLEAKEEAEQVLGQARAKLESWKEGPYTVDAIQKKITETKQLAKDLRQWQTNVDVANDLALKLLRDYSADDTRKVHMITENINASWRSIHKRVSEREAALEETHRLLQQFPLDLEKFLAWLTEAETTANVLQDATRKERLLEDSKGVKELMKQWQDLQGEIEAHTDVYHNLDENSQKILRSLEGSDDAVLLQRRLDNMNFKWSELRKKSLNIRSHLEASSDQWKRLHLSLQELLVWLQLKDDELSRQAPIGGDFPAVQKQNDVHRAFKRELKTKEPVIMSTLETVRIFLTEQPLEGLEKLYQEPRELPPEERAQNVTRLLRKQAEEVNTEWEKLNLHSADWQRKIDETLERLQELQEATDELDLKLRQAEVIKGSWQPVGDLLIDSLQDHLEKVKALRGEIAPLKENVSHVNDLARQLTTLGIQLSPYNLSTLEDLNTRWKLLQVAVEDRVRQLHEAHRDFGPASQHFLSTSVQGPWERAISPNKVPYYINHETQTTCWDHPKMTELYQSLADLNNVRFSAYRTAMKLRRLQKALCLDLLSLSAACDALDQHNLKQNDQPMDILQIINCLTTIYDRLEQEHNNLVNVPLCVDMCLNWLLNVYDTGRTGRIRVLSFKTGIISLCKAHLEDKYRYLFKQVASSTGFCDQRRLGLLLHDSIQIPRQLGEVASFGGSNIEPSVRSCFQFANNKPEIEAALFLDWMRLEPQSMVWLPVLHRVAAAETAKHQAKCNICKECPIIGFRYRSLKHFNYDICQSCFFSGRVAKGHKMHYPMVEYCTPTTSGEDVRDFAKVLKNKFRTKRYFAKHPRMGYLPVQTVLEGDNMETPVTLINFWPVDSAPASSPQLSHDDTHSRIEHYASRLAEMENSNGSYLNDSISPNESIDDEHLLIQHYCQSLNQDSPLSQPRSPAQILISLESEERGELERILADLEEENRNLQAEYDRLKQQHEHKGLSPLPSPPEMMPTSPQSPRDAELIAEAKLLRQHKGRLEARMQILEDHNKQLESQLHRLRQLLEQPQAEAKVNGTTVSSPSTSLQRSDSSQPMLLRVVGSQTSDSMGEEDLLSPPQDTSTGLEEVMEQLNNSFPSSRGHNVGSLFHMADDLGRAMESLVSVMTDEEGAE

SEQ ID NO: 2245 - DNA, 7339 bp, Homo sapiens
acactagcaatggcaaagctttgtgcggaggcattgctggctgctctgaactaaaagcatccgtggggaccgaaagaggtttttgcacaccttattaaggaactccaggatggcattgggcagcggcaaactgttgtcagaacattgaatgcaactggggaagaaataattcagcaatcctcaaaaacagatgccagtattctacaggaaaaattgggaagcctgaatctgcggtggcaggaggtctgcaaacagctgtcagacagaaaaaagaggctagaagaacaaaagaatatcttgtcagaatttcaaagagatttaaatgaatttgttttatggttggaggaagcagataacattgctagtatcccacttgaacctggaaaagagcagcaactaaaagaaaagcttgagcaagtcaagttactggtggaagagttgcccctgcgccagggaattctcaaacaattaaatgaaactggaggacccgtgcttgtaagtgctcccataagcccagaagagcaagataaacttgaaaataagctcaagcagacaaatctccagtggataaaggtttccagagctttacctgagaaacaaggagaaattgaagctcaaataaaagaccttgggcagcttgaaaaaaagcttgaagaccttgaagagcagttaaatcatctgctgctgtggttatctcctattaggaatcagttggaaatttataaccaaccaaaccaagaaggaccatttgacgttcaggaaactgaaatagcagttcaagctaaacaaccggatgtggaagagattttgtctaaagggcagcatttgtacaaggaaaaaccagccactcagccagtgaagaggaagttagaagatctgagctctgagtggaaggcggtaaaccgtttacttcaagagctgagggcaaagcagcctgacctagctcctggactgaccactattggagcctctcctactcagactgttactctggtgacacaacctgtggttactaaggaaactgccatctccaaactagaaatgccatcttccttgatgttggaggtacctgctctggcagatttcaaccgggcttggacagaacttaccgactggctttctctgcttgatcaagttataaaatcacagagggtgatggtgggtgaccttgaggatatcaacgagatgatcatcaagcagaaggcaacaatgcaggatttggaacagaggcgtccccagttggaagaactcattaccgctgcccaaaatttgaaaaacaagaccagcaatcaagaggctagaacaatcattacggatcgaattgaaagaattcagaatcagtgggatgaagtacaagaacaccttcagaaccggaggcaacagttgaatgaaatgttaaaggattcaacacaatggctggaagctaaggaagaagctgagcaggtcttaggacaggccagagccaagcttgagtcatggaaggagggtccctatacagtagatgcaatccaaaagaaaatcacagaaaccaagcagttggccaaagacctccgccagtggcagacaaatgtagatgtggcaaatgacttggccctgaaacttctccgggattattctgcagatgataccagaaaagtccacatgataacagagaatatcaatgcctcttggagaagcattcataaaagggtgagtgagcgagaggctgctttggaagaaactcatagattactgcaacagttccccctggacctggaaaagtttcttgcctggcttacagaagctgaaacaactgccaatgtcctacaggatgctacccgtaaggaaaggctcctagaagactccaagggagtaaaagagctgatgaaacaatggcaagacctccaaggtgaaattgaagctcacacagatgtttatcacaacctggatgaaaacagccaaaaaatcctgagatccctggaaggttccgatgatgcagtcctgttacaaagacgtttggataacatgaacttcaagtggagtgaacttcggaaaaagtctctcaacattaggtcccatttggaagccagttctgaccagtggaagcgtctgcacctttctctgcaggaacttctggtgtggctacagctgaaagatgatgaattaagccggcaggcacctattggaggcgactttccagcagttcagaagcagaacgatgtacatagggccttcaagagggaattgaaaactaaagaacctgtaatcatgagtactcttgagactgtacgaatatttctgacagagcagcctttggaaggactagagaaactctaccaggagcccagagagctgcctcctgaggagagagcccagaatgtcactcggcttctacgaaagcaggctgaggaggtcaatactgagtgggaaaaattgaacctgcactccgctgactggcagagaaaaatagatgagacccttgaaagactccaggaacttcaagaggccacggatgagctggacctcaagctgcgccaagctgaggtgatcaagggatcctggcagcccgtgggcgatctcctcattgactctctccaagatcacctcgagaaagtcaaggcacttcgaggagaaattgcgcctctgaaagagaacgtgagccacgtcaatgaccttgctcgccagcttaccactttgggcattcagctctcaccgtataacctcagcactctggaagacctgaacaccagatggaagcttctgcaggtggccgtcgaggaccgagtcaggcagctgcatgaagcccacagggactttggtccagcatctcagcactttctttccacgtctgtccagggtccctgggagagagccatctcgccaaacaaagtgccctactatatcaaccacgagactcaaacaacttgctgggaccatcccaaaatgacagagctctaccagtctttagctgacctgaataatgtcagattctcagcttataggactgccatgaaactccgaagactgcagaaggccctttgcttggatctcttgagcctgtcagctgcatgtgatgccttggaccagcacaacctcaagcaaaatgaccagcccatggatatcctgcagattattaattgtttgaccactatttatgaccgcctggagcaagagcacaacaatttggtcaacgtccctctctgcgtggatatgtgtctgaactggctgctgaatgtttatgatacgggacgaacagggaggatccgtgtcctgtcttttaaaactggcatcatttccctgtgtaaagcacatttggaagacaagtacagataccttttcaagcaagtggcaagttcaacaggattttgtgaccagcgcaggctgggcctccttctgcatgattctatccaaattccaagacagttgggtgaagttgcatcctttgggggcagtaacattgagccaagtgtccggagctgcttccaatttgctaataataagccagagatcgaagcggccctcttcctagactggatgagactggaaccccagtccatggtgtggctgcccgtcctgcacagagtggctgctgcagaaactgccaagcatcaggccaaatgtaacatctgcaaagagtgtccaatcattggattcaggtacaggagtctaaagcactttaattatgacatctgccaaagctgctttttttctggtcgagttgcaaaaggccataaaatgcactatcccatggtggaatattgcactccgactacatcaggagaagatgttcgagactttgccaaggtactaaaaaacaaatttcgaaccaaaaggtattttgcgaagcatccccgaatgggctacctgccagtgcagactgtcttagagggggacaacatggaaacgcctgcctcgtcccctcagctttcacacgatgatactcattcacgcattgaacattatgctagcaggctagcagaaatggaaaacagcaatggatcttatctaaatgatagcatctctcctaatgagagcatagatgatgaacatttgttaatccagcattactgccaaagtttgaaccaggactcccccctgagccagcctcgtagtcctgcccagatcttgatttccttagagagtgaggaaagaggggagctagagagaatcctagcagatcttgaggaagaaaacaggaatctgcaagcagaatatgaccgtctaaagcagcagcacgaacataaaggcctgtccccactgccgtcccctcctgaaatgatgcccacctctccccagagtccccgggatgctgagctcattgctgaggccaagctactgcgtcaacacaaaggccgcctggaagccaggatgcaaatcctggaagaccacaataaacagctggagtcacagttacacaggctaaggcagctgctggagcaaccccaggcagaggccaaagtgaatggcacaacggtgtcctctccttctacctctctacagaggtccgacagcagtcagcctatgctgctccgagtggttggcagtcaaacttcggactccatgggtgaggaagatcttctcagtcctccccaggacacaagcacagggttagaggaggtgatggagcaactcaacaactccttccctagttcaagaggacacaatgtaggaagtcttttccacatggcagatgatttgggcagagcgatggagtccttagtatcagtcatgacagatgaagaaggagcagaataaatgttttacaactcctgattcccgcatggtttttataatattcatacaacaaagaggattagacagtaagagtttacaagaaataaatctatatttttgtgaagggtagtggtattatactgtagatttcagtagtttctaagtctgttattgttttgttaacaatggcaggttttacacgtctatgcaattgtacaaaaaagttataagaaaactacatgtaaaatcttgatagctaaataacttgccatttctttatatggaacgcattttgggttgtttaaaaatttataacagttataaagaaagattgtaaactaaagtgtgctttataaaaaaaagttgtttataaaaacccctaaaaacaaaacaaacacacacacacacacatacacacacacacacaaaactttgaggcagcgcattgttttgcatccttttggcgtgatatccatatgaaattcatggctttttctttttttgcatattaaagataagacttcctctaccaccacaccaaatgactactacacactgctcatttgagaactgtcagctgagtggggcaggcttgagttttcatttcatatatctatatgtctataagtatataaatactatagttatatagataaagagatacgaatttctatagactgactttttccattttttaaatgttcatgtcacatcctaatagaaagaaattacttctagtcagtcatccaggcttacctgcttggtctagaatggatttttcccggagccggaagccaggaggaaactacaccacactaaaacattgtctacagctccagatgtttctcattttaaacaactttccactgacaacgaaagtaaagtaaagtattggatttttttaaagggaacatgtgaatgaatacacaggacttattatatcagagtgagtaatcggttggttggttgattgattgattgattgatacattcagcttcctgctgctagcaatgccacgatttagatttaatgatgcttcagtggaaatcaatcagaaggtattctgaccttgtgaacatcagaaggtattttttaactcccaagcagtagcaggacgatgatagggctggagggctatggattcccagcccatccctgtgaaggagtaggccactctttaagtgaaggattggatgattgttcataatacataaagttctctgtaattacaactaaattattatgccctcttctcacagtcaaaaggaactgggtggtttggtttttgttgcttttttagatttattgtcccatgtgggatgagtttttaaatgccacaagacataatttaaaataaataaactttgggaaaaggtgtaagacagtagccccatcacatttgtgatactgacaggtatcaacccagaagcccatgaactgtgtttccatcctttgcatttctctgcgagtagttccacacaggtttgtaagtaagtaagaaagaaggcaaattgattcaaatgttacaaaaaaacccttcttggtggattagacaggttaaatatataaacaaacaaacaaaaattgctcaaaaaagaggagaaaagctcaagaggaaaagctaaggactggtaggaaaaagctttactctttcatgccattttatttctttttgatttttaaatcattcattcaatagataccaccgtgtgacctataattttgcaaatctgttacctctgacatcaagtgtaattagcttttggagagtgggctgacatcaagtgtaattagcttttggagagtgggttttgtccattattaataattaattaattaacatcaaacacggcttctcatgctatttctacctcactttggttttggggtgttcctgataattgtgcacacctgagttcacagcttcaccacttgtccattgcgttattttctttttcctttataattctttctttttccttcataattttcaaaagaaaacccaaagctctaaggtaacaaattaccaaattacatgaagatttggtttttgtcttgcatttttttcctttatgtgacgctggaccttttctttacccaaggatttttaaaactcagatttaaaacaaggggttactttacatcctactaagaagtttaagtaagtaagtttcattctaaaatcagaggtaaatagagtgcataaataattttgttttaatctttttgtttttcttttagacacattagctctggagtgagtctgtcataatatttgaacaaaaattgagagctttattgctgcattttaagcataattaatttggacattatttcgtgttgtgttctttataaccaccgagtattaaactgtaaatcataatgtaactgaagcataaacatcacatggcatgttttgtcattgttttcaggtactgagttcttacttgagtatcataatatattgtgttttaacaccaacactgtaacatttacgaattatttttttaaacttcagttttactgcattttcacaacatatcagacttcaccaaatatatgccttactattgtattatagtactgctttactgtgtatctcaataaagcacgcagttatgttac

SEQ ID NO: 2246 - protein, 1230 aa, Homo sapiens
MPSSLMLEVPALADFNRAWTELTDWLSLLDQVIKSQRVMVGDLEDINEMIIKQKATMQDLEQRRPQLEELITAAQNLKNKTSNQEARTIITDRIERIQNQWDEVQEHLQNRRQQLNEMLKDSTQWLEAKEEAEQVLGQARAKLESWKEGPYTVDAIQKKITETKQLAKDLRQWQTNVDVANDLALKLLRDYSADDTRKVHMITENINASWRSIHKRVSEREAALEETHRLLQQFPLDLEKFLAWLTEAETTANVLQDATRKERLLEDSKGVKELMKQWQDLQGEIEAHTDVYHNLDENSQKILRSLEGSDDAVLLQRRLDNMNFKWSELRKKSLNIRSHLEASSDQWKRLHLSLQELLVWLQLKDDELSRQAPIGGDFPAVQKQNDVHRAFKRELKTKEPVIMSTLETVRIFLTEQPLEGLEKLYQEPRELPPEERAQNVTRLLRKQAEEVNTEWEKLNLHSADWQRKIDETLERLQELQEATDELDLKLRQAEVIKGSWQPVGDLLIDSLQDHLEKVKALRGEIAPLKENVSHVNDLARQLTTLGIQLSPYNLSTLEDLNTRWKLLQVAVEDRVRQLHEAHRDFGPASQHFLSTSVQGPWERAISPNKVPYYINHETQTTCWDHPKMTELYQSLADLNNVRFSAYRTAMKLRRLQKALCLDLLSLSAACDALDQHNLKQNDQPMDILQIINCLTTIYDRLEQEHNNLVNVPLCVDMCLNWLLNVYDTGRTGRIRVLSFKTGIISLCKAHLEDKYRYLFKQVASSTGFCDQRRLGLLLHDSIQIPRQLGEVASFGGSNIEPSVRSCFQFANNKPEIEAALFLDWMRLEPQSMVWLPVLHRVAAAETAKHQAKCNICKECPIIGFRYRSLKHFNYDICQSCFFSGRVAKGHKMHYPMVEYCTPTTSGEDVRDFAKVLKNKFRTKRYFAKHPRMGYLPVQTVLEGDNMETPASSPQLSHDDTHSRIEHYASRLAEMENSNGSYLNDSISPNESIDDEHLLIQHYCQSLNQDSPLSQPRSPAQILISLESEERGELERILADLEEENRNLQAEYDRLKQQHEHKGLSPLPSPPEMMPTSPQSPRDAELIAEAKLLRQHKGRLEARMQILEDHNKQLESQLHRLRQLLEQPQAEAKVNGTTVSSPSTSLQRSDSSQPMLLRVVGSQTSDSMGEEDLLSPPQDTSTGLEEVMEQLNNSFPSSRGHNVGSLFHMADDLGRAMESLVSVMTDEEGAE

SEQ ID NO: 2247 - DNA, 7048 bp, Homo sapiens
acactagcaatggcaaagctttgtgcggaggcattgctggctgctctgaactaaaagcatccgtggggaccgaaagaggtttttgcacaccttattaaggaactccaggatggcattgggcagcggcaaactgttgtcagaacattgaatgcaactggggaagaaataattcagcaatcctcaaaaacagatgccagtattctacaggaaaaattgggaagcctgaatctgcggtggcaggaggtctgcaaacagctgtcagacagaaaaaagaggctagaagaacaaaagaatatcttgtcagaatttcaaagagatttaaatgaatttgttttatggttggaggaagcagataacattgctagtatcccacttgaacctggaaaagagcagcaactaaaagaaaagcttgagcaagtcaagttactggtggaagagttgcccctgcgccagggaattctcaaacaattaaatgaaactggaggacccgtgcttgtaagtgctcccataagcccagaagagcaagataaacttgaaaataagctcaagcagacaaatctccagtggataaaggtttccagagctttacctgagaaacaaggagaaattgaagctcaaataaaagaccttgggcagcttgaaaaaaagcttgaagaccttgaagagcagttaaatcatctgctgctgtggttatctcctattaggaatcagttggaaatttataaccaaccaaaccaagaaggaccatttgacgttcaggaaactgaaatagcagttcaagctaaacaaccggatgtggaagagattttgtctaaagggcagcatttgtacaaggaaaaaccagccactcagccagtgaagaggaagttagaagatctgagctctgagtggaaggcggtaaaccgtttacttcaagagctgagggcaaagcagcctgacctagctcctggactgaccactattggagcctctcctactcagactgttactctggtgacacaacctgtggttactaaggaaactgccatctccaaactagaaatgccatcttccttgatgttggaggtacctgctctggcagatttcaaccgggcttggacagaacttaccgactggctttctctgcttgatcaagttataaaatcacagagggtgatggtgggtgaccttgaggatatcaacgagatgatcatcaagcagaaggcaacaatgcaggatttggaacagaggcgtccccagttggaagaactcattaccgctgcccaaaatttgaaaaacaagaccagcaatcaagaggctagaacaatcattacggatcgaattgaaagaattcagaatcagtgggatgaagtacaagaacaccttcagaaccggaggcaacagttgaatgaaatgttaaaggattcaacacaatggctggaagctaaggaagaagctgagcaggtcttaggacaggccagagccaagcttgagtcatggaaggagggtccctatacagtagatgcaatccaaaagaaaatcacagaaaccaagcagttggccaaagacctccgccagtggcagacaaatgtagatgtggcaaatgacttggccctgaaacttctccgggattattctgcagatgataccagaaaagtccacatgataacagagaatatcaatgcctcttggagaagcattcataaaagggtgagtgagcgagaggctgctttggaagaaactcatagattactgcaacagttccccctggacctggaaaagtttcttgcctggcttacagaagctgaaacaactgccaatgtcctacaggatgctacccgtaaggaaaggctcctagaagactccaagggagtaaaagagctgatgaaacaatggcaagacctccaaggtgaaattgaagctcacacagatgtttatcacaacctggatgaaaacagccaaaaaatcctgagatccctggaaggttccgatgatgcagtcctgttacaaagacgtttggataacatgaacttcaagtggagtgaacttcggaaaaagtctctcaacattaggtcccatttggaagccagttctgaccagtggaagcgtctgcacctttctctgcaggaacttctggtgtggctacagctgaaagatgatgaattaagccggcaggcacctattggaggcgactttccagcagttcagaagcagaacgatgtacatagggccttcaagagggaattgaaaactaaagaacctgtaatcatgagtactcttgagactgtacgaatatttctgacagagcagcctttggaaggactagagaaactctaccaggagcccagagagctgcctcctgaggagagagcccagaatgtcactcggcttctacgaaagcaggctgaggaggtcaatactgagtgggaaaaattgaacctgcactccgctgactggcagagaaaaatagatgagacccttgaaagactccaggaacttcaagaggccacggatgagctggacctcaagctgcgccaagctgaggtgatcaagggatcctggcagcccgtgggcgatctcctcattgactctctccaagatcacctcgagaaagtcaaggcacttcgaggagaaattgcgcctctgaaagagaacgtgagccacgtcaatgaccttgctcgccagcttaccactttgggcattcagctctcaccgtataacctcagcactctggaagacctgaacaccagatggaagcttctgcaggtggccgtcgaggaccgagtcaggcagctgcatgaagcccacagggactttggtccagcatctcagcactttctttccacgtctgtccagggtccctgggagagagccatctcgccaaacaaagtgccctactatatcaaccacgagactcaaacaacttgctgggaccatcccaaaatgacagagctctaccagtctttagctgacctgaataatgtcagattctcagcttataggactgccatgaaactccgaagactgcagaaggccctttgcttggatctcttgagcctgtcagctgcatgtgatgccttggaccagcacaacctcaagcaaaatgaccagcccatggatatcctgcagattattaattgtttgaccactatttatgaccgcctggagcaagagcacaacaatttggtcaacgtccctctctgcgtggatatgtgtctgaactggctgctgaatgtttatgatacgggacgaacagggaggatccgtgtcctgtcttttaaaactggcatcatttccctgtgtaaagcacatttggaagacaagtacagataccttttcaagcaagtggcaagttcaacaggattttgtgaccagcgcaggctgggcctccttctgcatgattctatccaaattccaagacagttgggtgaagttgcatcctttgggggcagtaacattgagccaagtgtccggagctgcttccaatttgctaataataagccagagatcgaagcggccctcttcctagactggatgagactggaaccccagtccatggtgtggctgcccgtcctgcacagagtggctgctgcagaaactgccaagcatcaggccaaatgtaacatctgcaaagagtgtccaatcattggattcaggtacaggagtctaaagcactttaattatgacatctgccaaagctgctttttttctggtcgagttgcaaaaggccataaaatgcactatcccatggtggaatattgcactccgactacatcaggagaagatgttcgagactttgccaaggtactaaaaaacaaatttcgaaccaaaaggtattttgcgaagcatccccgaatgggctacctgccagtgcagactgtcttagagggggacaacatggaaacgaatctgcaagcagaatatgaccgtctaaagcagcagcacgaacataaaggcctgtccccactgccgtcccctcctgaaatgatgcccacctctccccagagtccccgggatgctgagctcattgctgaggccaagctactgcgtcaacacaaaggccgcctggaagccaggatgcaaatcctggaagaccacaataaacagctggagtcacagttacacaggctaaggcagctgctggagcaaccccaggcagaggccaaagtgaatggcacaacggtgtcctctccttctacctctctacagaggtccgacagcagtcagcctatgctgctccgagtggttggcagtcaaacttcggactccatgggtgaggaagatcttctcagtcctccccaggacacaagcacagggttagaggaggtgatggagcaactcaacaactccttccctagttcaagaggacacaatgtaggaagtcttttccacatggcagatgatttgggcagagcgatggagtccttagtatcagtcatgacagatgaagaaggagcagaataaatgttttacaactcctgattcccgcatggtttttataatattcatacaacaaagaggattagacagtaagagtttacaagaaataaatctatatttttgtgaagggtagtggtattatactgtagatttcagtagtttctaagtctgttattgttttgttaacaatggcaggttttacacgtctatgcaattgtacaaaaaagttataagaaaactacatgtaaaatcttgatagctaaataacttgccatttctttatatggaacgcattttgggttgtttaaaaatttataacagttataaagaaagattgtaaactaaagtgtgctttataaaaaaaagttgtttataaaaacccctaaaaacaaaacaaacacacacacacacacatacacacacacacacaaaactttgaggcagcgcattgttttgcatccttttggcgtgatatccatatgaaattcatggctttttctttttttgcatattaaagataagacttcctctaccaccacaccaaatgactactacacactgctcatttgagaactgtcagctgagtggggcaggcttgagttttcatttcatatatctatatgtctataagtatataaatactatagttatatagataaagagatacgaatttctatagactgactttttccattttttaaatgttcatgtcacatcctaatagaaagaaattacttctagtcagtcatccaggcttacctgcttggtctagaatggatttttcccggagccggaagccaggaggaaactacaccacactaaaacattgtctacagctccagatgtttctcattttaaacaactttccactgacaacgaaagtaaagtaaagtattggatttttttaaagggaacatgtgaatgaatacacaggacttattatatcagagtgagtaatcggttggttggttgattgattgattgattgatacattcagcttcctgctgctagcaatgccacgatttagatttaatgatgcttcagtggaaatcaatcagaaggtattctgaccttgtgaacatcagaaggtattttttaactcccaagcagtagcaggacgatgatagggctggagggctatggattcccagcccatccctgtgaaggagtaggccactctttaagtgaaggattggatgattgttcataatacataaagttctctgtaattacaactaaattattatgccctcttctcacagtcaaaaggaactgggtggtttggtttttgttgcttttttagatttattgtcccatgtgggatgagtttttaaatgccacaagacataatttaaaataaataaactttgggaaaaggtgtaagacagtagccccatcacatttgtgatactgacaggtatcaacccagaagcccatgaactgtgtttccatcctttgcatttctctgcgagtagttccacacaggtttgtaagtaagtaagaaagaaggcaaattgattcaaatgttacaaaaaaacccttcttggtggattagacaggttaaatatataaacaaacaaacaaaaattgctcaaaaaagaggagaaaagctcaagaggaaaagctaaggactggtaggaaaaagctttactctttcatgccattttatttctttttgatttttaaatcattcattcaatagataccaccgtgtgacctataattttgcaaatctgttacctctgacatcaagtgtaattagcttttggagagtgggctgacatcaagtgtaattagcttttggagagtgggttttgtccattattaataattaattaattaacatcaaacacggcttctcatgctatttctacctcactttggttttggggtgttcctgataattgtgcacacctgagttcacagcttcaccacttgtccattgcgttattttctttttcctttataattctttctttttccttcataattttcaaaagaaaacccaaagctctaaggtaacaaattaccaaattacatgaagatttggtttttgtcttgcatttttttcctttatgtgacgctggaccttttctttacccaaggatttttaaaactcagatttaaaacaaggggttactttacatcctactaagaagtttaagtaagtaagtttcattctaaaatcagaggtaaatagagtgcataaataattttgttttaatctttttgtttttcttttagacacattagctctggagtgagtctgtcataatatttgaacaaaaattgagagctttattgctgcattttaagcataattaatttggacattatttcgtgttgtgttctttataaccaccgagtattaaactgtaaatcataatgtaactgaagcataaacatcacatggcatgttttgtcattgttttcaggtactgagttcttacttgagtatcataatatattgtgttttaacaccaacactgtaacatttacgaattatttttttaaacttcagttttactgcattttcacaacatatcagacttcaccaaatatatgccttactattgtattatagtactgctttactgtgtatctcaataaagcacgcagttatgttac

SEQ ID NO: 2248 - protein, 1133 aa, Homo sapiens
MPSSLMLEVPALADFNRAWTELTDWLSLLDQVIKSQRVMVGDLEDINEMIIKQKATMQDLEQRRPQLEELITAAQNLKNKTSNQEARTIITDRIERIQNQWDEVQEHLQNRRQQLNEMLKDSTQWLEAKEEAEQVLGQARAKLESWKEGPYTVDAIQKKITETKQLAKDLRQWQTNVDVANDLALKLLRDYSADDTRKVHMITENINASWRSIHKRVSEREAALEETHRLLQQFPLDLEKFLAWLTEAETTANVLQDATRKERLLEDSKGVKELMKQWQDLQGEIEAHTDVYHNLDENSQKILRSLEGSDDAVLLQRRLDNMNFKWSELRKKSLNIRSHLEASSDQWKRLHLSLQELLVWLQLKDDELSRQAPIGGDFPAVQKQNDVHRAFKRELKTKEPVIMSTLETVRIFLTEQPLEGLEKLYQEPRELPPEERAQNVTRLLRKQAEEVNTEWEKLNLHSADWQRKIDETLERLQELQEATDELDLKLRQAEVIKGSWQPVGDLLIDSLQDHLEKVKALRGEIAPLKENVSHVNDLARQLTTLGIQLSPYNLSTLEDLNTRWKLLQVAVEDRVRQLHEAHRDFGPASQHFLSTSVQGPWERAISPNKVPYYINHETQTTCWDHPKMTELYQSLADLNNVRFSAYRTAMKLRRLQKALCLDLLSLSAACDALDQHNLKQNDQPMDILQIINCLTTIYDRLEQEHNNLVNVPLCVDMCLNWLLNVYDTGRTGRIRVLSFKTGIISLCKAHLEDKYRYLFKQVASSTGFCDQRRLGLLLHDSIQIPRQLGEVASFGGSNIEPSVRSCFQFANNKPEIEAALFLDWMRLEPQSMVWLPVLHRVAAAETAKHQAKCNICKECPIIGFRYRSLKHFNYDICQSCFFSGRVAKGHKMHYPMVEYCTPTTSGEDVRDFAKVLKNKFRTKRYFAKHPRMGYLPVQTVLEGDNMETNLQAEYDRLKQQHEHKGLSPLPSPPEMMPTSPQSPRDAELIAEAKLLRQHKGRLEARMQILEDHNKQLESQLHRLRQLLEQPQAEAKVNGTTVSSPSTSLQRSDSSQPMLLRVVGSQTSDSMGEEDLLSPPQDTSTGLEEVMEQLNNSFPSSRGHNVGSLFHMADDLGRAMESLVSVMTDEEGAE

SEQ ID NO: 2249 - DNA, 493 bp, Homo sapiens
gccacttctcttcccttcattcttcgccaggctctctgctgactcaagttcttcagttcacgatcttctagttgcagcgatgagtgcacgagtgagatcaagatccagaggaagaggagatggtcaggaggctcccgatgtggttgcattcgtggctcccggtgaatctcagcaagaggaaccaccaactgacaatcaggatattgaacctggacaagagagagaaggaacacctccgatcgaagaacgtaaagtagaaggtgattgccaggaaatggatctggaaaagactcggagtgagcgtggagatggctctgatgtaaaagagaagactccacctaatcctaagcatgctaagactaaagaagcaggagatgggcagccataagttaaaaagaagacaagctgaagctacacacatggctgatgtcacattgaaaatgtgactgaaaatttgaaaattctctcaataaagtttgagttttctctgaag

SEQ ID NO: 2250 - protein, 102 aa, Homo sapiens
MSARVRSRSRGRGDGQEAPDVVAFVAPGESQQEEPPTDNQDIEPGQEREGTPPIEERKVEGDCQEMDLEKTRSERGDGSDVKEKTPPNPKHAKTKEAGDGQP

SEQ ID NO: 2251 - DNA, 443 bp, Homo sapiens
gggccccagaggctgcttatgatcaggtcctgcgcttcccgaaaaggatgaagctccagctgcagttctggggaggcctggaccccagctccgggggggccgggctaccaaggccgctgggcctggagaggcgcgtccctggcccatcttatcagcgctctgcagggtctgggcctgctgctcgcgtcctcctgggctcccaaggccacgggtgggttaatggcttgacagccggcctcctggcccagcagacgctgagcagcccgatggcacaatccacctcttctctccaaggccagctggagggacgaggcacgacaaggccatccctacagctggcacttcccctacagctgagagggggcctaaactacaggacacactcccaagacccttaagccctggcagcatcccgggggaggggggcagcaggtggaagtgga

SEQ ID NO: 2252 - protein, 116 aa, Homo sapiens
MKLQLQFWGGLDPSSGGAGLPRPLGLERRVPGPSYQRSAGSGPAARVLLGSQGHGWVNGLTAGLLAQQTLSSPMAQSTSSLQGQLEGRGTTRPSLQLALPLQLRGGLNYRTHSQDP

SEQ ID NO: 2253 - DNA, 1674 bp, Homo sapiens
cggcccccgccccggccccggccccggcgcggccctgggggcggatgcctggatgtggattttgccgtggggccaccaggctgttctcacgtgaacagctttaaggtgggagagaactggaggcaggaactgcgggttatctaccagtgcttcgtgtggtgtggaaccccagagaccaggaaaagcaaggcaaagtcctgcatctgccatgtgtgtggcacccatctgaacagactccactcttgcctttcctgtgtcttctttggctgcttcacggagaaacacattcacgagcacgcagagacgaaacaacacaacttagcagtagacctgtattacggaggtatatactgctttatgtgtaaggactatgtatatgacaaagacattgagcaaattgccaaagaagagcaaggagaagctttgaaattacaagcctccacctcaacagaggtttctcaccagcagtgttcagtgccaggccttggtgagaaattcccaacctgggaaacaaccaaaccagaattagaactgctggggcacaacccgaggagaagaagaatcacctccagctttacgatcggtttaagaggactcatcaatcttggcaacacgtgctttatgaactgcattgtccaggccctcacccacacgccgatactgagagatttctttctctctgacaggcaccgatgtgagatgccgagtcccgagttgtgtctggtctgtgagatgtcgtcgctgtttcgggagttgtattctggaaacccgtctcctcatgtgccctataagttactgcacctggtgtggatacatgcccgccatttagcagggtacaggcaacaggatgcccacgagttcctcattgcagcgttagatgtcctgcacaggcactgcaaaggtgatgatgtcgggaaggcggccaacaatcccaaccactgtaactgcatcatagaccaaatcttcacaggtggcctgcagtctgatgtcacctgtcaagcctgccatggcgtctccaccacgatagacccatgctgggacattagtttggacttgcctggctcttgcacctccttctggcccatgagcccagggagggagagcagtgtgaacggggaaagccacataccaggaatcaccaccctcacggactgcttgcggaggtttacgaggccagagcacttaggaagcagtgccaaaatcaaatgtggtagttgccaaagctaccaggaatctaccaaacagctcacaatgaataaattacctgtcgttgcctgttttcatttcaaacggtttgaacattcagcgaaacagaggcgcaagatcactacatacatttcctttcctctggagctggatatgacgccgtttatggcctcaagtaaagagagcagaatgaatggacaattgcagctgccaaccaatagtggaaacaacgaaaataagtattccttgtttgctgtggttaatcaccaaggaaccttggagagtggccactataccagcttcatccggcaccacaaggaccagtggttcaagtgtgatgatgccgtcatcactaaggccagtattaaggacgtactggacagtgaagggtatttactgttctatcacaaacaggtgctagaacatgagtcagaaaaagtgaaagaaatgaacacacaagcctactga

SEQ ID NO: 2254 - protein, 557 aa, Homo sapiens
  misc_feature (1)..(1): Xaa may be selenocysteine
XPPPRPRPRRGPGGGCLDVDFAVGPPGCSHVNSFKVGENWRQELRVIYQCFVWCGTPETRKSKAKSCICHVCGTHLNRLHSCLSCVFFGCFTEKHIHEHAETKQHNLAVDLYYGGIYCFMCKDYVYDKDIEQIAKEEQGEALKLQASTSTEVSHQQCSVPGLGEKFPTWETTKPELELLGHNPRRRRITSSFTIGLRGLINLGNTCFMNCIVQALTHTPILRDFFLSDRHRCEMPSPELCLVCEMSSLFRELYSGNPSPHVPYKLLHLVWIHARHLAGYRQQDAHEFLIAALDVLHRHCKGDDVGKAANNPNHCNCIIDQIFTGGLQSDVTCQACHGVSTTIDPCWDISLDLPGSCTSFWPMSPGRESSVNGESHIPGITTLTDCLRRFTRPEHLGSSAKIKCGSCQSYQESTKQLTMNKLPVVACFHFKRFEHSAKQRRKITTYISFPLELDMTPFMASSKESRMNGQLQLPTNSGNNENKYSLFAVVNHQGTLESGHYTSFIRHHKDQWFKCDDAVITKASIKDVLDSEGYLLFYHKQVLEHESEKVKEMNTQAY

SEQ ID NO: 2255 - DNA, 9505 bp, Homo sapiens
cacattctgaccgccagggaacactggtagttctttaggtggcgtttgttgctgtgaaaggcagagaatgcagcaagtgcccttctaaagcacttcagactggggcttcttttgtaaaagctccccaacctgaatgaccaaatgcgggctgccaaggttatttcttccttgaggcagaaaaaaagaaaactgtgattgaagaggacaagtcgtacaatggtggaggaataggttcttcaaataggatcatggacttcttggaggagccaatccctggtgtagggacctatgatgatttcaatacaattgattgggtgagagagaagtctcgagaccgggataggcaccgagagattaccaataaaagcaaagagtcaacatgggccttaattcacagtgtgagtgatgctttttccggctggttgttgatgctccttattgggcttttatcaggttcgttagctggtttgatagacatctctgctcattggatgacagacttaaaagaaggtatatgcacagggggattctggtttaaccatgaacattgttgctggaactctgagcatgtcacctttgaagagagagacaaatgtccagagtggaatagttggtcccagcttatcatcagcacagatgagggagcctttgcctacatagtcaattatttcatgtacgtcctctgggctctcctatttgccttccttgccgtatctcttgtcaaggtgtttgcgccttatgcctgtggctctggaatccctgagataaaaactatcttgagtggtttcattattaggggctatttgggtaagtggactctggttatcaaaaccatcaccttggtgctggcagtgtcgtctggcttgagcctgggcaaagagggccctctagtgcacgtggcttgctgctgtgggaacatcctgtgccactgcttcaacaaatacaggaagaatgaagccaagcgcagagaggtcttgtcggctgcagcagcagctggtgtatctgtagcctttggagcacctataggtggagtattattcagccttgaagaggtcagctactattttcccctcaaaacattgtggcgttcattctttgctgccttggtggcagcattcactctacgctccatcaatccatttgggaacagccgcctggtactattttatgtggagtttcacaccccatggcatctctttgagctcgtgccattcattctgctgggcatatttggtggtctgtggggagcactgtttatccgcacaaacattgcctggtgtcggaagcgaaagaccacccagttgggcaagtatcctgttatagaggtactcgtcgtgacagccatcactgccatcctggctttccccaatgaatacactcggatgagcacaagtgagctcatttctgagctgtttaatgactgtggccttctggactcctccaagctctgtgattatgagaaccgtttcaacacaagcaaagggggtgaactgcctgacagaccggctggcgtgggagtctacagtgcaatgtggcagctggctttaacactcatactgaaaattgtcattactatattcacctttggcatgaagatcccttctggcctctttatccctagcatggctgttggtgctatagcaggtcgacttctaggagtaggaatggaacagctggcttattaccaccaggaatggaccgtcttcaatagctggtgtagtcagggagctgattgcatcacccccggcctttatgcaatggttggggctgcagcctgcttaggtggggtgactcggatgactgtttctcttgttgtcataatgtttgaactgactggtggcttagaatacatcgtgcctctgatggctgcagccatgacaagcaagtgggtggcagatgctcttgggcgggagggcatctatgatgcccacatccgtctcaatggatacccctttcttgaagccaaagaagagtttgctcataagaccctggcaatggatgtgatgaaaccccggagaaatgatcctttgttgactgtccttactcaggacagtatgactgtggaagatgtagagaccataatcagtgaaaccacttacagtggcttcccagtggtggtatcccgggagtcccaaagacttgtgggctttgtcctccgaagagatctcattatttcaattgaaaatgctcgaaagaaacaggatggggttgttagcacttccatcatttatttcacggagcattctcctccattgccaccatacactccacccactctaaagcttcggaacatcctcgatctcagccccttcactgtgactgaccttacacccatggagatcgtagtggatattttccgaaagctgggactgcggcagtgcctggttacacacaacgggcgattgcttggaatcattaccaaaaaggatgtgttaaagcatatagcacagatggcgaaccaagatcctgattccattctcttcaactagaatcatagagttctggatgtaaagcgggaaggacattacagaccatggatatgttgtattaactgggtacccaaaacacattttccatatttggatggtgaagtcacattagtgtgttgtctctttcctacaagttaaccagttgcactacataatctctggaaattaattttctctttaggagaaattatagttaggcttccatgatgttacattaggaagatatcatgaaagaataaataagattgctatggtttaattatatttgctttttaaaagatttttttaacttaaaaagtagttagccaatatgcaatcactgaaaactatgcaagagaaattccaaccgtcctgacctataacctgtaggaaaccgacgaaaaagtcactcttttgggatctaactgttgttactggaagacgaagtgtaaactaaggggctttgcttttcaaaccagagaaaggaaagccagaaggaaaagagtaatggtattttctagactgtgaagattcagttcaaatgttatccttgttcctgttacaatatttagcattattagtttgttatgtgtgtatgtttatgttaattttaatttctgattataagacaatgctgctttggttaatctcttctaaatgaatttagagagattgacttttatagcttgcttgttgctggtactcttttgaagtgcacaaagataagttatagagctttctccttgtctgcaaaaacggtaattttccaggtggcatttgttagctggtagacaaggactttgccgtgaatttgttagtagcaaggaatgatttcttccagcttccttgaaatgaataattagtaaacttctaagcaaagtcaatgactaggagtttcacatgtttgtgaggtcctaactaattctcttacccagatgccacctccatgaatgatggtgctttaggcttctggaatatgtaaaaacagcaaagggaaccaagtctagactgcatactggtaaaccagggaagactcagaactgcatatgcatcctcatgcattcctttgtaaagaccaccagtactaaaataactggacactcattgtacctcccagcgataagtatgtgtaacaggccagtgtgttgtccccatgatcatgaattaggcttgggatgcttccaaatatattcaaggtgttggaacaggataggcagctgtgactccctcaagagtccttagaattctaaataaaatgcagagccatcctaagacacaggggtatggacaaggcctggtgacaccaaaggtgcttgtatccaattgaaaaggtgcctgtctcaatttcataccacctttattgcagttaaaaaaaaatcacactctggggacacttggtggaattacagagccaccatcatcattccaaccactatttcattttctgtagttttacctgtgtgcaattactccccctccattctgttccacttcttactccttagtaccaaatcctctgtttgggattgagcgctgctcctggttaatcattcctactacaaaaaaaaataactcccagggctagttaaattgtaaaccaaggctcagcagtctcacaacacatggaccagaggtgacacacagccatttcctttgccatgtggcccagttgctgctgccatgcctccatttccacactggatgcctacggcagtgagatttcactgccggggtaagagttcagcctggatgattttatagctctgttcctagcacttctcatcatccttccagcccagaatcagcggtcattctgcatattcccaccaaccctctacccccaaacacttcagtgtacctcattttaagagttgctgatccctgattctaggacgtttttacccatagttcttgtctttccaaaatctgaaattcttttttttgctcagaactgggtagccaagggttattttatttttatctttaaaataatcaaggcagtcgctagagtttctccttgtgaatagatcactctagcattttaatgaaaaagaaaaaaatctttctggggtatgttgtatcatagtaatggctcagtaaccacatattttgtcctttccatgtcactgattccttcatatgagactatttggcttgactaccctgtatattgtgtagaaatcaaagttcttatctgtacatttctggtccaatacctgtcttattagttgtccttccccactaaagtttgcaaaacagaaaatgttactatttctggtatttaatgacaatgaaaggtttggtcatatttcatagtgcagtagcgataaggagggtgtctcaagtttgcttttgtgtttcttctaggctttgttcttgattttagacagatgagccagtgttaaggtgctacttcagagaataaattagagaaatcagataacactgtgccaaggtatactttgtagatgctaagcaccgattggccctccagagaatgacaatatccctttgatacctcactcctgatcaatctcattcattaacctcagcttctcaggaatccttgtagcttgtatgctagaagtagctatggtatatggtatccactatatgtccagtcctatggtttggctcaaaggttggctaattgcagctagagctctcaactgctagctcagcaccttgacatttgaagtttcttgtcttgaggagaaggaaaatgttctttctgccattgccactttaacagttggacatgcttaagcaacaaatacagccagtatagggaggactgtcagtagcatcaaatggccacatacctcaatggcaaaagactagatggtttgtgatttaaaaattaatgagtcgagatgagactattttggtattaaatgagaaaattgcctaacacaagggaagggtttacaaaagaatgccaattagtgtttcaacagagttaggattttccaagtaagagtagctggtagccatccagccataaaaggaacgagagtctatagatttgtaaaagtaaaactgctatattttgtatcttcaaatcttcaatataaagaatttaaagaacctgaaacagttaatgcatgattcgttatattggagggaaaaagcaggggactgataatacaaaataatggcaactttaaagatcatttctacgtggatgtttggttagaaacatattccaatgctctcctctttctctggccacagcatcctggctcagcccagctgtggagtagaggtggtaagatccacagaacagatatcctctggtagataagctgacattgatgatactttgaatttaccagctggtgaagcaaacgattaatttgtgattgaactgaaaagcagttgaattgttttgacaccagaggctgaatctaaaccctttacaggaagagcagagcatactatacatttcttagcagatcttcaattctgtttgaacatgatgaagtaaccagggtttagtgagatctaaggccgtgaagtaattcacaaccaagatcttatgaacgcattcagatgtgaggggggcaaatatgttttcaaaaacttagtgtgcaatagagtccattatagaaattaaccactgctatatgttttaagtagttcaatcacctgttgtggttcagtcttgattattgtttattttgttaggtgataagtaggaagatgcacttgttatcccacactatctcttgttttgttttgttttgtttttaaataatgaacagtgcaatctttgaacttgagtttttaataatgatagcaaagacaatggtgagaacttgaaacagccagcatattttatattgccaaagtacttactgatgactgaccacactgtcttgtgaggaactgggtcccctgcactggatcagagccaaatgcaagccacccatcagttcagaggaagcaggaaaacatcttttgggtggtgcatagaacattgagctcttaaaaacccggagaaaaattaggaatttagaaagtaagtgggaggtagaatattgagtccttttttaaaaaaaagaattgatgtctaaatatgtagtctgaacttaagtgtcctaaaaccttgttttttgtttttttgttttttgaggagtcgtcttgctctatcaccaggtgggagtgcagtggcacaatctcggctcactgtaacctctgcctcctgcctcccgggtccaagcaattcccctgcctcagtctcccaagtaggtgggactacaggcgcacaccaccatgcccagctaacttttgtatttttagtagagacggggtttcaccatgttggccaggatggtctcgatctcttgacctcgtgatccacccatctcggcctcccaaagtgctgggattataggtgtgagccaccgcacccagccaaaccttgatttttttagccacctctgggattgcctgggttccctttggagaagaaactaaaagttatggccatagaaaaagccctggtaagaaaatatttgaatggtgtaagatggtggaaggaaagccatcccacacccctacaacatatgttctggcatttataaactgcttgattgtgtgcctcaaggggagaaaaagtcaagcaatgcttcaaaggccaggctttctaagcaaatgagtggttcaaagcagtgtttggctcaagggcagtctggttttatggatagggccgacccaagacatctgctcatgaagaaatgtggcatctgttgccatttcctaaactataaggtttagatagattgtcttgaattttgatagcaaatttttttaaatttatatttctgcctcctcgtacatccttatatatggaaaaaaaagtaagagttcctcagatcagagctcagtagctgtgtcaatttgaagttcaatcagtgtagttgtcctggggtgatcgctgactctgctctgtttcatatttcagttgcttgctccaaggagagaatttctgagaacaatgggtgttagcaactttaagttactccccaaacgtttgctggccacattctcatttctaaacatctggatctgggtaaaggtttgaatagatgtagggaacaaaattggtttttccatggtgtagtctaattttgccaaatcacccaagaaagaaagtatatgacgtgtggagtttgcatttcttggatgggacctatcgggtcacccagcccagtcttacagtcataaattcctacctcttagttcctgccaaagggccttcagcctctgtgtgcacacttattgaatgaatgctttgcctaaagtttggccttttgaagaaaaacagcatgtgataatataaaaatatgagagtttaaaaaaaaaaaagatctctgcctctcttctctctgcctcgtcccaccttgctgtctgtctcattgtctttctctcccctcaccatgcgctgaattcagatttctctttcttttattataggcatgttgttttgaatgtggactttgtgggagggagaggattgttctgagaacagaaactggaagatacgtctgagttgatgggaccaacagggctttgctcctctgtgagggccaaagccattgatacttgtcgggggtgatgagggctttagcatctcaaggcagacatatgaagtatttactgctaaactatattacttactagtacaaatctgttggaattcaggggcagtctaagatttggtgagtgaaatgccatctggcaaaatcgagaagagagtgtggcctgagaggggaatgttcagcctcactgtcacattaagggtacctcaaaatacatggtccttccagtgtgttccttttccttcctccatttcactttgtcccctcttcttcctttctctcccattttcctggctttttagcactcagcttttttttataagtatgtatttactttttattatatatttggtcctttgggactttgtgatgattaagaatttattccattcaggattttaaaatgatgtgtttaatattttgttctcttaaactcttttgaagctatgctgctaaccaggtataggccagaaaggaggtggcccagtcagtaccttgctcacgtcagctaagggggacagtgatgtcatgtgggtgactcttcttcatttgaccaaggccagcctcctgttcttacctctgcccattcatttctggctatgggaaaactaccacctgttgagtgagccaatgaggccaggaagatcagaggggctgggttccggcccatgggccactatttgaatttctctgtagtaagctctttgtagggctggctccaactgcagtagccaaagaaaacctgtctgactcgacattttaatgcctgagagttggtgaaagttcagctgaagctaatgtctagacatcagcagtaactaggcatccagaaagtagcttcaaccaaagctaatagagcccaagtttccgcaggaagtttggtgctgagctgtccagagcagttgtttatctgagtgttgctagcccttagccatgctttcttagctttattctcgcctgttcctaggcatagcctgaaccagagctatggctcactgctcgctttattctactccctagtcatgcggaacaacatagtctaaaaaggaagatgtggactggggagttaggagacctgatttctattccctatgcttctactaactagcctcgagatcttaaccgctctgtgcctcagtgttcccatctgcaaaatggggatagtgttaattgccctacctacctcacagggttgttgtgaggataaactgagacaatgaattcaaagcaagttgacaagtaagtgctatgcaaattgtaagaaatggaaacaatcatgttaaaagcaatggaatggacattggcagaagggttaatggattgtccagccctttctctgtgtggcttaaacccaggtcgccattgctttatacattttcacttagcacagatttgtaattatgcatgtaataaagcacagccttatccaccctg

SEQ ID NO: 2256 - protein, 746 aa, Homo sapiens
MDFLEEPIPGVGTYDDFNTIDWVREKSRDRDRHREITNKSKESTWALIHSVSDAFSGWLLMLLIGLLSGSLAGLIDISAHWMTDLKEGICTGGFWFNHEHCCWNSEHVTFEERDKCPEWNSWSQLIISTDEGAFAYIVNYFMYVLWALLFAFLAVSLVKVFAPYACGSGIPEIKTILSGFIIRGYLGKWTLVIKTITLVLAVSSGLSLGKEGPLVHVACCCGNILCHCFNKYRKNEAKRREVLSAAAAAGVSVAFGAPIGGVLFSLEEVSYYFPLKTLWRSFFAALVAAFTLRSINPFGNSRLVLFYVEFHTPWHLFELVPFILLGIFGGLWGALFIRTNIAWCRKRKTTQLGKYPVIEVLVVTAITAILAFPNEYTRMSTSELISELFNDCGLLDSSKLCDYENRFNTSKGGELPDRPAGVGVYSAMWQLALTLILKIVITIFTFGMKIPSGLFIPSMAVGAIAGRLLGVGMEQLAYYHQEWTVFNSWCSQGADCITPGLYAMVGAAACLGGVTRMTVSLVVIMFELTGGLEYIVPLMAAAMTSKWVADALGREGIYDAHIRLNGYPFLEAKEEFAHKTLAMDVMKPRRNDPLLTVLTQDSMTVEDVETIISETTYSGFPVVVSRESQRLVGFVLRRDLIISIENARKKQDGVVSTSIIYFTEHSPPLPPYTPPTLKLRNILDLSPFTVTDLTPMEIVVDIFRKLGLRQCLVTHNGRLLGIITKKDVLKHIAQMANQDPDSILFN

SEQ ID NO: 2257 - DNA, 213 bp, Homo sapiens
atggtgtcggtgtgcaggccgtggcctgctgtggccatagcacttctggctctgctggtctgcctgggggcgctggtcgacacctgccccatcaaacccgaggctcctggcgaagacgagtccctggaggagctgagccactattatgcttccctgtgccactacctcaacgtggtcaccagacagtggtgggagggtgcagacatgtggtga

SEQ ID NO: 2258 - protein, 70 aa, Homo sapiens
MVSVCRPWPAVAIALLALLVCLGALVDTCPIKPEAPGEDESLEELSHYYASLCHYLNVVTRQWWEGADMW

SEQ ID NO: 2259 - DNA, 2881 bp, Homo sapiens
ccagctggcagtcaaggctgtaggagggcatggagagttgaagaaaaaagcagtatcttgaggcagactggaagagtcatcacagcatccaaatcaacaagaaaacatcattccagggtcctacatgatggcgtactctgatactacaatgatgtctgatgatattgactggttacgcagccacaggggtgtgtgcaaggtagatctctacaacccagaaggacagcaagatcaggaccggaaagtgatatgctttgtcgatgtgtccaccctgaatgtagaagataaagattacaaggatgctgctagttccagctcagaaggcaacttaaacctgggaagtctggaagaaaaagagattatcgtgatcaaggacactgagaagaaagaccagtctaagacagagggatctgtatgccttttcaaacaagctccctctgatcctgtaagtgtcctcaactggcttctcagtgatctccagaagtatgccttgggtttccaacatgcactgagcccctcaacctctacctgtaaacataaagtaggagacacagagggcgaatatcacagagcatcctctgagaactgctacagtgtctatgccgatcaagtgaacatagattatttgatgaacagacctcaaaacctacgtctagaaatgacagcagctaaaaacaccaacaataatcaaagtccttcagctcctccagccaaacctcctagcactcagagagcagtcatttcccctgatggagaatgttctatagatgacctttccttctacgtcaaccgactatcttctctggtaatccagatggcccataaggaaatcaaggagaagttggaaggtaaaagcaaatgccttcatcattcaatctgtccatcccctgggaacaaagagagaatcagtccccgaactcctgcgagcaagattgcttctgaaatggcctatgaagctgtggaactgacagctgcagaaatgcgtggcactggagaggagtccagggaaggtggccagaaaagctttctatatagcgaattatccaacaagagcaaaagtggagacaaacagatgtcccagagagagagcaaagaatttgcagattccatcagcaaggggctcatggtttatgcaaatcaggtggcatctgacatgatggtctctctcatgaagaccttgaaagtgcacagctctgggaagccaattccagcatctgtggtcctgaagagggtgttgctaaggcacaccaaggagattgtgtccgatttgattgattcttgcatgaagaacctgcataatattactggggtcctgatgactgactcagactttgtctcagctgtcaagagaaatctgttcaaccagtggaaacaaaatgctacagacatcatggaggccatgctgaagcgcttggtcagtgcccttataggtgaggagaaggagactaagtctcagagtctgtcatatgcatctttaaaagctgggtcccatgatcccaaatgcaggaatcagagtcttgaattctccaccatgaaagctgaaatgaaagagagggacaaaggcaaaatgaaatcagacccatgcaagtcactgactagtgctgagaaagtcggtgaacacattctcaaagagggcctaaccatctggaaccaaaagcaaggaaactcatgcaaggtggctaccaaagcatgcagcaataaagatgagaaaggagaaaagatcaatgcttccacagattcactggccaaggacctgattgtctctgcccttaagctgatccagtaccatctgacccagcagactaagggcaaagatacatgtgaagaagactgtcctggttccaccatgggctatatggctcagagtactcaatatgaaaagtgtggaggtggccaaagtgccaaagcactttcagtgaaacaactagaatctcacagagcccctggaccatccacctgtcaaaaggagaaccaacacctggactcccagaaaatggatatgtcaaacatcgttctaatgctgattcagaaactgcttaatgagaaccccttcaaatgtgaggatccatgcgaaggtgagaacaagtgttctgagcccagggcaagcaaagcagcttccatgtccaacagatctgacaaagcggaagaacaatgccaggagcatcaagaacttgactgtaccagtgggatgaagcaagcgaacgggcaatttatagataaactagtagaatctgtgatgaagctctgccttatcatggctaagtatagcaacgatggggcagcccttgctgagttggaagaacaagcagcctcggcaaataagcccaatttcaggggcaccagatgcattcacagtggtgcaatgccacagaactatcaagactctcttggacatgaagtaattgtcaataatcagtgctctacaaatagcttgcagaagcagctccaggctgtcctgcagtggattgcagcctcccagtttaacgtgcccatgctctacttcatgggagataaggatggacaactggaaaagcttcctcaggtttcagctaaagcagcagagaaggggtacagtgtaggaggtcttcttcaagaggtcatgaagtttgccaaggaacggcaaccagatgaagctgtgggaaaggtggccaggaaacagttgctggactggctgctcgctaacctgtgagctgatccttgactcctcttcatcttagcccccctagcagcattccatcccagccagagcacccccaccatcaggccagtcaactgcacaatacacaactgtatttcccaatacacttgagcagttgcctgtgaatgtaagaggtgtcaacaaactgggaaataaaataaaaaaaaataataataaatgtgt

SEQ ID NO: 2260 - protein, 854 aa, Homo sapiens
MMAYSDTTMMSDDIDWLRSHRGVCKVDLYNPEGQQDQDRKVICFVDVSTLNVEDKDYKDAASSSSEGNLNLGSLEEKEIIVIKDTEKKDQSKTEGSVCLFKQAPSDPVSVLNWLLSDLQKYALGFQHALSPSTSTCKHKVGDTEGEYHRASSENCYSVYADQVNIDYLMNRPQNLRLEMTAAKNTNNNQSPSAPPAKPPSTQRAVISPDGECSIDDLSFYVNRLSSLVIQMAHKEIKEKLEGKSKCLHHSICPSPGNKERISPRTPASKIASEMAYEAVELTAAEMRGTGEESREGGQKSFLYSELSNKSKSGDKQMSQRESKEFADSISKGLMVYANQVASDMMVSLMKTLKVHSSGKPIPASVVLKRVLLRHTKEIVSDLIDSCMKNLHNITGVLMTDSDFVSAVKRNLFNQWKQNATDIMEAMLKRLVSALIGEEKETKSQSLSYASLKAGSHDPKCRNQSLEFSTMKAEMKERDKGKMKSDPCKSLTSAEKVGEHILKEGLTIWNQKQGNSCKVATKACSNKDEKGEKINASTDSLAKDLIVSALKLIQYHLTQQTKGKDTCEEDCPGSTMGYMAQSTQYEKCGGGQSAKALSVKQLESHRAPGPSTCQKENQHLDSQKMDMSNIVLMLIQKLLNENPFKCEDPCEGENKCSEPRASKAASMSNRSDKAEEQCQEHQELDCTSGMKQANGQFIDKLVESVMKLCLIMAKYSNDGAALAELEEQAASANKPNFRGTRCIHSGAMPQNYQDSLGHEVIVNNQCSTNSLQKQLQAVLQWIAASQFNVPMLYFMGDKDGQLEKLPQVSAKAAEKGYSVGGLLQEVMKFAKERQPDEAVGKVARKQLLDWLLANL

SEQ ID NO: 2261 - DNA, 2867 bp, Homo sapiens
caggggtggcagccaactgcaggtgcccaagaacttggcacttctcagttccatctaaaggggcacatctcccttctgggtgtcacgttttcagccaaacatctaaaagaacttcatcatcaagatgtctgatgatattgactggttacgcagccacaggggtgtgtgcaaggtagatctctacaacccagaaggacagcaagatcaggaccggaaagtgatatgctttgtcgatgtgtccaccctgaatgtagaagataaagattacaaggatgctgctagttccagctcagaaggcaacttaaacctgggaagtctggaagaaaaagagattatcgtgatcaaggacactgagaagaaagaccagtctaagacagagggatctgtatgccttttcaaacaagctccctctgatcctgtaagtgtcctcaactggcttctcagtgatctccagaagtatgccttgggtttccaacatgcactgagcccctcaacctctacctgtaaacataaagtaggagacacagagggcgaatatcacagagcatcctctgagaactgctacagtgtctatgccgatcaagtgaacatagattatttgatgaacagacctcaaaacctacgtctagaaatgacagcagctaaaaacaccaacaataatcaaagtccttcagctcctccagccaaacctcctagcactcagagagcagtcatttcccctgatggagaatgttctatagatgacctttccttctacgtcaaccgactatcttctctggtaatccagatggcccataaggaaatcaaggagaagttggaaggtaaaagcaaatgccttcatcattcaatctgtccatcccctgggaacaaagagagaatcagtccccgaactcctgcgagcaagattgcttctgaaatggcctatgaagctgtggaactgacagctgcagaaatgcgtggcactggagaggagtccagggaaggtggccagaaaagctttctatatagcgaattatccaacaagagcaaaagtggagacaaacagatgtcccagagagagagcaaagaatttgcagattccatcagcaaggggctcatggtttatgcaaatcaggtggcatctgacatgatggtctctctcatgaagaccttgaaagtgcacagctctgggaagccaattccagcatctgtggtcctgaagagggtgttgctaaggcacaccaaggagattgtgtccgatttgattgattcttgcatgaagaacctgcataatattactggggtcctgatgactgactcagactttgtctcagctgtcaagagaaatctgttcaaccagtggaaacaaaatgctacagacatcatggaggccatgctgaagcgcttggtcagtgcccttataggtgaggagaaggagactaagtctcagagtctgtcatatgcatctttaaaagctgggtcccatgatcccaaatgcaggaatcagagtcttgaattctccaccatgaaagctgaaatgaaagagagggacaaaggcaaaatgaaatcagacccatgcaagtcactgactagtgctgagaaagtcggtgaacacattctcaaagagggcctaaccatctggaaccaaaagcaaggaaactcatgcaaggtggctaccaaagcatgcagcaataaagatgagaaaggagaaaagatcaatgcttccacagattcactggccaaggacctgattgtctctgcccttaagctgatccagtaccatctgacccagcagactaagggcaaagatacatgtgaagaagactgtcctggttccaccatgggctatatggctcagagtactcaatatgaaaagtgtggaggtggccaaagtgccaaagcactttcagtgaaacaactagaatctcacagagcccctggaccatccacctgtcaaaaggagaaccaacacctggactcccagaaaatggatatgtcaaacatcgttctaatgctgattcagaaactgcttaatgagaaccccttcaaatgtgaggatccatgcgaaggtgagaacaagtgttctgagcccagggcaagcaaagcagcttccatgtccaacagatctgacaaagcggaagaacaatgccaggagcatcaagaacttgactgtaccagtgggatgaagcaagcgaacgggcaatttatagataaactagtagaatctgtgatgaagctctgccttatcatggctaagtatagcaacgatggggcagcccttgctgagttggaagaacaagcagcctcggcaaataagcccaatttcaggggcaccagatgcattcacagtggtgcaatgccacagaactatcaagactctcttggacatgaagtaattgtcaataatcagtgctctacaaatagcttgcagaagcagctccaggctgtcctgcagtggattgcagcctcccagtttaacgtgcccatgctctacttcatgggagataaggatggacaactggaaaagcttcctcaggtttcagctaaagcagcagagaaggggtacagtgtaggaggtcttcttcaagaggtcatgaagtttgccaaggaacggcaaccagatgaagctgtgggaaaggtggccaggaaacagttgctggactggctgctcgctaacctgtgagctgatccttgactcctcttcatcttagcccccctagcagcattccatcccagccagagcacccccaccatcaggccagtcaactgcacaatacacaactgtatttcccaatacacttgagcagttgcctgtgaatgtaagaggtgtcaacaaactgggaaataaaataaaaaaaaataataaaaaaaaaaaaaaaaaaaaaaaa

SEQ ID NO: 2262 - protein, 845 aa, Homo sapiens
MSDDIDWLRSHRGVCKVDLYNPEGQQDQDRKVICFVDVSTLNVEDKDYKDAASSSSEGNLNLGSLEEKEIIVIKDTEKKDQSKTEGSVCLFKQAPSDPVSVLNWLLSDLQKYALGFQHALSPSTSTCKHKVGDTEGEYHRASSENCYSVYADQVNIDYLMNRPQNLRLEMTAAKNTNNNQSPSAPPAKPPSTQRAVISPDGECSIDDLSFYVNRLSSLVIQMAHKEIKEKLEGKSKCLHHSICPSPGNKERISPRTPASKIASEMAYEAVELTAAEMRGTGEESREGGQKSFLYSELSNKSKSGDKQMSQRESKEFADSISKGLMVYANQVASDMMVSLMKTLKVHSSGKPIPASVVLKRVLLRHTKEIVSDLIDSCMKNLHNITGVLMTDSDFVSAVKRNLFNQWKQNATDIMEAMLKRLVSALIGEEKETKSQSLSYASLKAGSHDPKCRNQSLEFSTMKAEMKERDKGKMKSDPCKSLTSAEKVGEHILKEGLTIWNQKQGNSCKVATKACSNKDEKGEKINASTDSLAKDLIVSALKLIQYHLTQQTKGKDTCEEDCPGSTMGYMAQSTQYEKCGGGQSAKALSVKQLESHRAPGPSTCQKENQHLDSQKMDMSNIVLMLIQKLLNENPFKCEDPCEGENKCSEPRASKAASMSNRSDKAEEQCQEHQELDCTSGMKQANGQFIDKLVESVMKLCLIMAKYSNDGAALAELEEQAASANKPNFRGTRCIHSGAMPQNYQDSLGHEVIVNNQCSTNSLQKQLQAVLQWIAASQFNVPMLYFMGDKDGQLEKLPQVSAKAAEKGYSVGGLLQEVMKFAKERQPDEAVGKVARKQLLDWLLANL

SEQ ID NO: 2263 - DNA, 4524 bp, Homo sapiens
aggtgtctggaactggattacagtttcttctgattgaacgcagcctttgaatactgcctggcctatcgcgaatacatccctgccttggacaagacgcagctgaatctctaagtgatgctactgccactaccaccccagagctccaaacctgtgcctaagaaatctcagtccagcaaaattgtgcccagtcatcatgacccatctgaaaagacgggggagaattgccaaacgaagatatctccatcttcacttcaggagtctccatcttcacttcagggagcactcaaaaagagatcagcttttgaagatctcactaatgcttctcaatgtcaacctgtccagcccaagaaagaagccaataaagagtttgtaaaagttgtttccaagaagataaacaggaacacacatgctcttggactggccaaaaagaataagcggaatctaaaatggcataagctggaagtcacaccagtagtagcctctactaccgtggtaccaaacattatggagaaaccactcattctagacatatccaccacctccaaaacacccaacactgaggaggcatctctcttcagaaagccattagttttaaaggaggaacccactattgaggatgaaacccttatcaataagtcattatctttaaaaaagtgctcaaatcatgaggaggtgtccttactggaaaagctacagcccctgcaggaggagagtgacagtgatgatgcgtttgttatagagccaatgacttttaagaagacacataaaactgaggaggcagccatcaccaagaagacattatccttaaagaagaagatgtgtgcaagtcagcggaagcagtcctgccaggaagagtcgttggctgtgcaggatgtcaatatggaagaggattccttctttatggagtcaatgagttttaagaagaagcctaaaactgaggagtcaatccccacccataagttatcatctttaaagaagaaatgtaccatttatgggaagatatgccactttaggaagccaccagtattgcagacaaccatctgtggagcaatgtcctccattaagaagcctaccactgagaaggagacacttttccaagagctatctgtattgcaagagaaacacaccactgagcatgagatgtccatcttgaagaaatcattggccttgcagaagaccaactttaaagaggattcccttgttaaggagtcgttagcctttaagaagaagcctagcactgaggaggcaatcatgatgccagtaatattgaaggagcagtgcatgactgaggggaagaggtcccgtctgaagccattagtattgcaggagatcacctctggagagaagtcgctcattatgaagccattgtccattaaagaaaagccatctactgagaaggagtccttttcccaggaaccatctgcattgcaaaagaagcacaccactcaggaggaggtttccatcttaaaggagccctcgtccttgctaaagtctccaactgaggagtcaccttttgatgaggctttggcttttacaaagaagtgtaccattgaggaggcaccccccaccaagaagcctttaattttaaagaggaagcatgccactcaggggacaatgtcccacttgaagaaaccactaatattacagaccacctctggagaaaagtcacttattaaggagccactgccctttaaagaagaaaaagtgtctttaaagaaaaagtgtaccacacaagagatgatgtccatctgtccagaactgttggactttcaggatatgattggtgaagataagaattctttctttatggagccaatgtcatttaggaagaaccctacaactgaggagacagtacttaccaagacatcgttgtctttacaggaaaagaaaattactcaggggaagatgtcccacttaaagaagccactggtcttgcagaagatcacttctgaggaggagtcattctataagaagctgttgccctttaagatgaaatctacaacggaagaaaagttcctctcccaggaaccatctgcattgaaagagaagcataccaccttgcaggaagtgtccctctcaaaagagtcattggccatccaagagaaggctaccactgaggaggaattctctcaggaactattttcattgcatgttaagcataccaacaaaagtgggtccctcttccaggaggctttggtcttgcaagagaagactgatgccgaagaggattccttgaagaacttgttggctttgcaggagaaaagcaccatggaagaagagtcccttatcaataagctattggctctgaaggaggagctttctgctgaggcagccacaaacatacagacacaattatctttaaagaagaagtccacttctcatggaaaagtgttcttcctgaagaagcagttggctttgaatgagaccatcaatgaagaggagttccttaataagcagccactggccttggaggggtatcccagcattgcggagggggagaccctcttcaagaagcttttggccatgcaggaggagcccagcattgagaaggaagctgtcctcaaggagcccactattgacacagaagctcactttaaggaacctttggccttgcaggaggagcccagcactgagaaggaggctgtcctcaaggagcccagtgttgacacagaagctcactttaaggaaactttggccttgcaggagaagcccagcattgagcaggaggccctctttaagcgacactcagctttgtgggagaagcccagcactgagaaggagaccatcttcaaggagtctttggacttgcaagagaagcccagcattaagaaagagaccctcctcaaaaagccattagccttgaagatgtctaccatcaatgaggcagtcctcttcgaagatatgatagctctgaatgagaaacccaccactgggaaggagttgtccttcaaggagccattagccttacaagagagtcccacctacaaggaagacacctttctcaaaacattgttggtcccccaagttggaaccagcccaaatgtgtctagcactgcccctgaatccataaccagcaagtccagcattgctaccatgaccagtgtgggcaaatctggtaccatcaatgaggcattcctcttcgaagatatgataactctgaatgagaaacccaccactgggaaggagttgtccttcaaggagccattggccttacaagagagtcccacctgcaaggaagacacctttctggaaacattcttgatcccccaaattggaaccagcccatatgtgtttagcaccacccctgaatccataacagagaagtccagcattgcaaccatgaccagcgtgggcaagtccaggaccaccaccgagtccagtgcatgtgaatctgcttctgataaacctgtctcaccacaggccaagggaacaccaaaggagataaccccacgggaagatattgatgaggacagcagtgatccaagtttcaacccaatgtatgccaaggaaatcttcagttacatgaaagagagagaggaacagtttatacttacagattacatgaacaggcagattgaaatcaccagtgacatgagggccattcttgtggactggttggtggaggtgcaggtgtcctttgagatgacccatgagaccctgtacttggcagtgaagctggtggatctctacctaatgaaggcagtatgcaagaaggataagttacaactccttggtgccactgcctttatgattgcagcaaaatttgaggagcacaactcacctcgtgtggatgactttgtgtacatctgtgatgataattatcagcgatctgaggtactcagcatggaaatcaacatcctgaacgtcctcaaatgtgacattaacattcccatcgcctaccattttctgcgcagatatgctaggtgtatccacaccaacatgaagacactgaccttgtcccgctacatctgcgagatgaccctgcaggaataccactatgtccaggagaaggcttccaagctagctgctgcctccttactcctggccctctacatgaagaagctcggatactgggttcccttcctggagcattacagtggctacagtatctctgagcttcaccccttggtcagacagctgaacaaactgctgactttcagttcttacgatagtctcaaggctgtgtattacaagtattctcacccggtcttctttgaagtcgccaaaatccctgccttggatatgttgaagctggaggagattttgaactgtgattgtgaggctcagggcctggtactctagcagcagccacagggctaagcatgcatgttaacagggtatatttattctatgttcgaatttgtcttttgatcgcttttattcatttttcctttctttgtcttttcccaaactgataatgttataaatatttatgttgcttgtttttatgaaagaaaaaatattgtcatatttgactacaaatttaataaaaaattaatggttattgttaaaaaaaaaaaaaaa

SEQ ID NO: 2264 - protein, 1395 aa, Homo sapiens
MLLPLPPQSSKPVPKKSQSSKIVPSHHDPSEKTGENCQTKISPSSLQESPSSLQGALKKRSAFEDLTNASQCQPVQPKKEANKEFVKVVSKKINRNTHALGLAKKNKRNLKWHKLEVTPVVASTTVVPNIMEKPLILDISTTSKTPNTEEASLFRKPLVLKEEPTIEDETLINKSLSLKKCSNHEEVSLLEKLQPLQEESDSDDAFVIEPMTFKKTHKTEEAAITKKTLSLKKKMCASQRKQSCQEESLAVQDVNMEEDSFFMESMSFKKKPKTEESIPTHKLSSLKKKCTIYGKICHFRKPPVLQTTICGAMSSIKKPTTEKETLFQELSVLQEKHTTEHEMSILKKSLALQKTNFKEDSLVKESLAFKKKPSTEEAIMMPVILKEQCMTEGKRSRLKPLVLQEITSGEKSLIMKPLSIKEKPSTEKESFSQEPSALQKKHTTQEEVSILKEPSSLLKSPTEESPFDEALAFTKKCTIEEAPPTKKPLILKRKHATQGTMSHLKKPLILQTTSGEKSLIKEPLPFKEEKVSLKKKCTTQEMMSICPELLDFQDMIGEDKNSFFMEPMSFRKNPTTEETVLTKTSLSLQEKKITQGKMSHLKKPLVLQKITSEEESFYKKLLPFKMKSTTEEKFLSQEPSALKEKHTTLQEVSLSKESLAIQEKATTEEEFSQELFSLHVKHTNKSGSLFQEALVLQEKTDAEEDSLKNLLALQEKSTMEEESLINKLLALKEELSAEAATNIQTQLSLKKKSTSHGKVFFLKKQLALNETINEEEFLNKQPLALEGYPSIAEGETLFKKLLAMQEEPSIEKEAVLKEPTIDTEAHFKEPLALQEEPSTEKEAVLKEPSVDTEAHFKETLALQEKPSIEQEALFKRHSALWEKPSTEKETIFKESLDLQEKPSIKKETLLKKPLALKMSTINEAVLFEDMIALNEKPTTGKELSFKEPLALQESPTYKEDTFLKTLLVPQVGTSPNVSSTAPESITSKSSIATMTSVGKSGTINEAFLFEDMITLNEKPTTGKELSFKEPLALQESPTCKEDTFLETFLIPQIGTSPYVFSTTPESITEKSSIATMTSVGKSRTTTESSACESASDKPVSPQAKGTPKEITPREDIDEDSSDPSFNPMYAKEIFSYMKEREEQFILTDYMNRQIEITSDMRAILVDWLVEVQVSFEMTHETLYLAVKLVDLYLMKAVCKKDKLQLLGATAFMIAAKFEEHNSPRVDDFVYICDDNYQRSEVLSMEINILNVLKCDINIPIAYHFLRRYARCIHTNMKTLTLSRYICEMTLQEYHYVQEKASKLAAASLLLALYMKKLGYWVPFLEHYSGYSISELHPLVRQLNKLLTFSSYDSLKAVYYKYSHPVFFEVAKIPALDMLKLEEILNCDCEAQGLVL

SEQ ID NO: 2265 - DNA, 1212 bp, Homo sapiens
aggtgtctggaactggattacagtttcttctgattgaacgcagcctttgaatactgcctggcctatcgcgaatacatccctgccttggacaagacgcagctgaatctctaagtgatgctactgccactaccaccccagagctccaaacctgtgcctaagaaatctcagtccagcaaaattgtgcccagtcatcatgacccatctgaaaagacgggggagaattgccaaacgaagatatctccatcttcacttcaggagtctccatcttcacttcagggagcactcaaaaagagatcagcttttgaagatctcactaatgtgtcctttgagatgacccatgagaccctgtacttggcagtgaagctggtggatctctacctaatgaaggcagtatgcaagaaggataagttacaactccttggtgccactgcctttatgattgcagcaaaatttgaggagcacaactcacctcgtgtggatgactttgtgtacatctgtgatgataattatcagcgatctgaggtactcagcatggaaatcaacatcctgaacgtcctcaaatgtgacattaacattcccatcgcctaccattttctgcgcagatatgctaggtgtatccacaccaacatgaagacactgaccttgtcccgctacatctgcgagatgaccctgcaggaataccactatgtccaggagaaggcttccaagctagctgctgcctccttactcctggccctctacatgaagaagctcggatactgggttcccttcctggagcattacagtggctacagtatctctgagcttcaccccttggtcagacagctgaacaaactgctgactttcagttcttacgatagtctcaaggctgtgtattacaagtattctcacccggtcttctttgaagtcgccaaaatccctgccttggatatgttgaagctggaggagattttgaactgtgattgtgaggctcagggcctggtactctagcagcagccacagggctaagcatgcatgttaacagggtatatttattctatgttcgaatttgtcttttgatcgcttttattcatttttcctttctttgtcttttcccaaactgataatgttataaatatttatgttgcttgtttttatgaaagaaaaaatattgtcatatttgactacaaatttaataaaaaattaatggttattgttaaaaaaaaaaaaaaa

SEQ ID NO: 2266 - protein, 291 aa, Homo sapiens
MLLPLPPQSSKPVPKKSQSSKIVPSHHDPSEKTGENCQTKISPSSLQESPSSLQGALKKRSAFEDLTNVSFEMTHETLYLAVKLVDLYLMKAVCKKDKLQLLGATAFMIAAKFEEHNSPRVDDFVYICDDNYQRSEVLSMEINILNVLKCDINIPIAYHFLRRYARCIHTNMKTLTLSRYICEMTLQEYHYVQEKASKLAAASLLLALYMKKLGYWVPFLEHYSGYSISELHPLVRQLNKLLTFSSYDSLKAVYYKYSHPVFFEVAKIPALDMLKLEEILNCDCEAQGLVL

SEQ ID NO: 2267 - DNA, 3918 bp, Homo sapiens
gtactttagccttccaggcttagggactcaggctgcccagacctgaagcggtgtgcggccatggaccgcggagctgccgcagcccagggcactgccccgcctcaggatggagagcagcccgctgagtctccagagcctccgccgccttggccgccgccgccaccaccaccggctccgccgccggctccgccgctgctctccgaggcttcgccagaacccataccagagccctgtccagagcttgctccaggtccctgtccagaggcgacctcagaatcagccacagaactgtacacagaaccgaccccagaaccagccacagagccggcctcagaaccggccccagaacctgccacagagccggccccagaacctgccacagagccggccccagaaccggccccagaacctgccacagagtctgccccagagccgactccagaacctgccctagagtcggtcccagagccggccccagagctgactccagaagttgccccagagctggccccagagccgaccccagaacctgtgacagagctggccccagagttctgccctgaggcggctccagagttccgtccaagtccagcaccatgtctattgcaatgtccggtggacactcgagagagaggtctaaagacctcgccatcgccatcgccatcgccatcgcccagaacgccaatgtcgtggtccagaataaagaaaatattgaaggaaggacctatgctgaagaactgtaactctttcaagagatggaagcttagatattttctggttcaaggacagaagctctactttgcacaccatcccgcgtttgcacactttgaaacgattgatctgtctcaagccactgtggcagaaagcagctgtagaaacctttgccacagtttttgtgttattacaccacaacgaaaaatcactctggctgcacccaaccggaaagacatggaagaatggattaacatcataaaaaccatccaacagggagaaatttataagatacctgcagcagaaaacaacccttttcttgttggaatgcattgttggtactccagttacagccaccggacccagcactgcaatgtttgtcgagagagcattcctgccttatctagagatgccatcatctgtgaagtgtgcaaagtgaaatctcacagattgtgtgctttgagagcaagcaaagactgcaagtggaatacattgtctatcactgatgacctccttctgcctgcagatgaagtaaacatgccccatcaatgggtagaaggaaacatgcctgtcagctctcagtgtgcagtgtgtcatgagagctgtggcagttatcaaagacttcaagacttccgctgcctgtggtgtaattctacggtgcatgatgactgtaggagacggttttccaaggaatgttgcttcagaagccatcgctcatcagtcattcctcccactgctctaagcgaccccaaaggcgatggccaattagtagtatcttcagacttctggaatcttgattggtcatcagcctgttcatgtcccttgctcatcttcatcaactccaaaagtggcgatcatcaggggatcgtcttcctccgaaaattcaagcaataccttaacccatctcaagtgttcgacttattgaagggtggacctgaagcagggctgtctatgttcaagaactttgctcgctttcgcattctggtttgtggtggagatggcagcgtgagctgggtcttatctctgattgatgcctttggattacatgaaaagtgtcagttggcagtcatcccacttggaaccggcaatgatctggctcgtgttctgggctggggtgcattctggaacaaaagcaagtcacctctggacatcctcaacagagtggagcaggctagtgtgaggatcctagacagatggagtgtgatgattcgtgagactcccagacaaaccccgctgctaaaaggacaggttgaaatggatgtaccacgatttgaggctgctgccatccaacacttagaatctgcagccaccgagttgaacaaaatcctgaaggccaagtaccccacagagatgatcatcgcaaccagattcttgtgttcagctgtggaagattttgtggttgatattgtaaaggcctggggtcagataaaacagaacaacactgcaatagtgtctgtgattttgaaaagtgacttaatgtatgataggctcagtgtcctgatcgatgtcctggctgaggaggcagcagctacttctgctgaaaaaagtgctacagaatatgcagacagcagcaaggcagataggaagcccttcattcctcaaatagaccacatagccaagtgcaagttggagctggctacaaaggcccagagtctccagaaatccttgaaactcatcatatttcaagttgaacaagctctggatgaggaaagcagacagacaatatctgttaagaactttagttcaactttcttcctggaagatgacccagaagatattaaccagacaagcccacgacgccgttctcgtcgtggcactttgtcttctatatcttctctcaaaagtgaggacctggacaaccttaacttggatcacttacattttacacctgaatctatacgcttcaaagaaaaatgtgtcatgaacaactacttcggaattggactggatgctaaaatttctctggacttcaacaccagaagagatgaacacccagggcaatacaatagccgccttaagaacaagatgtggtatggccttctgggaaccaaagaacttttgcagcgctcttacaggaaactggaagaacgagtgcatttggagtgtgatggagaaaccatctccttgccaaacctgcaaggcattgtagtgctcaacattaccagctatgctggaggtatcaacttctggggaagcaacacagcaaccacggaatatgaggctcctgcaatcgatgatgggaaactggaggtggtggcaatctttggttctgtgcagatggcaatgtcccgtatcatcaacctgcatcatcatcgcattgcccagtgccatgaggtgatgataaccattgatggtgaagaaggtatcccagtgcaggtggatggggaggcctggattcagagaccaggccttatcaaaattagatacaagaacgctgcccagatgctgacaagagatcgggactttgagaactcaatgaaaatgtgggaatacaagcatactgaaattcaagctgcccctcaaccccagctggacttccaggactctcaagagagcctctctgacgaggagtatgcccagatgcagcacttagctcggcttgcagaaaacctcatcagcaaacttaatgacctgagcaagatccaccagcatgtgtctgtcctcatgggttctgtgaatgccagcgctaacatcctgaatgatatattttacggccaagacagtggcaatgagatgggtgcagcttcctgtattcccattgaaactctaagcagaaatgatgccgtagatgttacatttagtcttaaaggtctctacgatgacaccacagctttcctggatgaaaagctgctgagaagtgctgaggatgagactgcactacaaagcgccctggatgccatgaataaggagttcaaaaagctatctgagattgactggatgaatccaatctttgttccagaggaaaaatcttcggacactgacagtagaagcctcaggctgaaaattaagttccccaaattgggaaagaaaaaggtagaagaggaacgcaagcctaaatcaggccagagtgtccagagttttattggcaatttatggcaccgcagacatcgtgaagatgaagcagagggtgatgatcctctaacaccatcgagatctcaactgtagcccttgaaagctggaagaactcacaacattgagaattctact

SEQ ID NO: 2268 - protein, 1271 aa, Homo sapiens
MDRGAAAAQGTAPPQDGEQPAESPEPPPPWPPPPPPPAPPPAPPLLSEASPEPIPEPCPELAPGPCPEATSESATELYTEPTPEPATEPASEPAPEPATEPAPEPATEPAPEPAPEPATESAPEPTPEPALESVPEPAPELTPEVAPELAPEPTPEPVTELAPEFCPEAAPEFRPSPAPCLLQCPVDTRERGLKTSPSPSPSPSPRTPMSWSRIKKILKEGPMLKNCNSFKRWKLRYFLVQGQKLYFAHHPAFAHFETIDLSQATVAESSCRNLCHSFCVITPQRKITLAAPNRKDMEEWINIIKTIQQGEIYKIPAAENNPFLVGMHCWYSSYSHRTQHCNVCRESIPALSRDAIICEVCKVKSHRLCALRASKDCKWNTLSITDDLLLPADEVNMPHQWVEGNMPVSSQCAVCHESCGSYQRLQDFRCLWCNSTVHDDCRRRFSKECCFRSHRSSVIPPTALSDPKGDGQLVVSSDFWNLDWSSACSCPLLIFINSKSGDHQGIVFLRKFKQYLNPSQVFDLLKGGPEAGLSMFKNFARFRILVCGGDGSVSWVLSLIDAFGLHEKCQLAVIPLGTGNDLARVLGWGAFWNKSKSPLDILNRVEQASVRILDRWSVMIRETPRQTPLLKGQVEMDVPRFEAAAIQHLESAATELNKILKAKYPTEMIIATRFLCSAVEDFVVDIVKAWGQIKQNNTAIVSVILKSDLMYDRLSVLIDVLAEEAAATSAEKSATEYADSSKADRKPFIPQIDHIAKCKLELATKAQSLQKSLKLIIFQVEQALDEESRQTISVKNFSSTFFLEDDPEDINQTSPRRRSRRGTLSSISSLKSEDLDNLNLDHLHFTPESIRFKEKCVMNNYFGIGLDAKISLDFNTRRDEHPGQYNSRLKNKMWYGLLGTKELLQRSYRKLEERVHLECDGETISLPNLQGIVVLNITSYAGGINFWGSNTATTEYEAPAIDDGKLEVVAIFGSVQMAMSRIINLHHHRIAQCHEVMITIDGEEGIPVQVDGEAWIQRPGLIKIRYKNAAQMLTRDRDFENSMKMWEYKHTEIQAAPQPQLDFQDSQESLSDEEYAQMQHLARLAENLISKLNDLSKIHQHVSVLMGSVNASANILNDIFYGQDSGNEMGAASCIPIETLSRNDAVDVTFSLKGLYDDTTAFLDEKLLRSAEDETALQSALDAMNKEFKKLSEIDWMNPIFVPEEKSSDTDSRSLRLKIKFPKLGKKKVEEERKPKSGQSVQSFIGNLWHRRHREDEAEGDDPLTPSRSQL

SEQ ID NO: 2269 - DNA, 2402 bp, Homo sapiens
ggcggtcggagatccgagagctctgcttctctgaaaagcgtgtggctttctggacttgtttcaggccacccacgagccagcgggaaaggattgccagccagagaaagacgaactccgaagtcccaatgcacagatcagcccccagtcaaaccaccaagaggagccgatcgccattttccactactcgtcgtagttgggacgacagcgagagttcgggaaccaacctgaatattgataatgaggactattccaggtatccgccaagagagtacagagcttcgggtagcagaagaggaatggcctatggacatattgactcttatggggcagatgatagtgaggaggagggggctgggcctgttgagcgaccgccagtgagagggaaaactggcaagtttaaagatgataagctgtatgacccagagaaaggggcaaggtctttggctgggccacctccacatttctctagttttagccgtgatgtgagagaggagcgagacaagttagacccagtccctgcagcaagatgctcagctagcagagctgacttcctgccacaaagtagtgtggcctcacagtcgtcttctgaaggcaagctggctacaaaaggtgacagctcggagagggagagaagggagcaaaatttacctgcacgtcccagcagggctcctgtgagtatttgtggtggtggggaaaacacctcaaagagtgcagaggaacctgtggtcaggcccaaaatcagaaacctggcaagtccaaactgcgtgaaaccaaaaattttttttgatactgatgatgatgacgatatgccacacagtacttccaggtggagggataccgccaatgacaatgagggccactcggatggcctggcaagaagagggagaggcgagagttcaagtggctatcccgagccaaagtaccctgaagacaaacgggaagcgaggagtgaccaagtgaaaccagaaaaggtgccgagacgacgacgcaccatggccgaccctgacttctggacgcacagtgatgattactacaaatactgcgacgaagactctgacagtgacaaagagtggattgctgctctgcgtcggaaatatcgaagccgagagcaaaccctgtcctccagtggcgaaagctgggagactctgccggggaaagaagagcgggaacctccacaggctaaggtgagtgccagcactggcaccagccctggccccggtgctagtgccagtgccggggctggcgccggggccagtgctggcagcaatggcagcaattaccttgaagaagttcgagaaccatctcttcaggaagagcaggcatccctggaagaaggagaaattccttggctccagtaccatgagaatgacagtagcagtgagggggataatgattctggtcacgagttgatgcaacctggggtattcatgctggatggaaacaacaaccttgaagatgactccagtgtgagcgaagacctagaagtggattggagcctctttgatggatttgcagatgggttaggagtggctgaagccatttcctatgtggaccctcagttcctcacctacatggcacttgaagaacgcctggcccaggcaatggaaactgcccttgcgcacttggagtctctcgcagtggatgtagaggtggccaatccaccagcaagcaaggagagcattgacgctcttcccgagatcctggtcactgaagatcatggcgcagttggtcaggagatgtgctgccccatctgctgtagcgaatatgtgaagggggaggtggcaactgagctgccgtgccaccactatttccacaagccgtgtgtgtccatctggcttcagaagtcaggcacctgccccgtgtgccgctgcatgttccctcccccactctaaagaccaaggccgtttactcctggtctgattattttccccatctgaaatccacaatactgcaggagccctcttgaaattaacaatggaaataaaaccaatcagtcagttagcctaaacctattgattcctcgtgattatttccaatgtgaaaacagttgtgtatgattgcattaaaaatcatatcatcttttagaggttagaaaagggaaaactaaactttctaaatgctacttgagattgcagtaagaagatacgttttctaacctgaaagttaaatcgcatttgttttcttcagtagaatgggaatgtgttgctgttacttgtaatgtcaagtttatctgttaaatatgtccaaaaggcaaaatcatttttgttgcatgttatgggtcgatgttcctgtaattgcagtgccgtaaaagcttattaaagttgttcttttggttttaaaaaaaaaaaaaaaaaaaaaaaaaaaaaaaaaaaaaaaaaaaaaaaaaaaaaaaaaaaaaaaaa

SEQ ID NO: 2270 - protein, 588 aa, Homo sapiens
MHRSAPSQTTKRSRSPFSTTRRSWDDSESSGTNLNIDNEDYSRYPPREYRASGSRRGMAYGHIDSYGADDSEEEGAGPVERPPVRGKTGKFKDDKLYDPEKGARSLAGPPPHFSSFSRDVREERDKLDPVPAARCSASRADFLPQSSVASQSSSEGKLATKGDSSERERREQNLPARPSRAPVSICGGGENTSKSAEEPVVRPKIRNLASPNCVKPKIFFDTDDDDDMPHSTSRWRDTANDNEGHSDGLARRGRGESSSGYPEPKYPEDKREARSDQVKPEKVPRRRRTMADPDFWTHSDDYYKYCDEDSDSDKEWIAALRRKYRSREQTLSSSGESWETLPGKEEREPPQAKVSASTGTSPGPGASASAGAGAGASAGSNGSNYLEEVREPSLQEEQASLEEGEIPWLQYHENDSSSEGDNDSGHELMQPGVFMLDGNNNLEDDSSVSEDLEVDWSLFDGFADGLGVAEAISYVDPQFLTYMALEERLAQAMETALAHLESLAVDVEVANPPASKESIDALPEILVTEDHGAVGQEMCCPICCSEYVKGEVATELPCHHYFHKPCVSIWLQKSGTCPVCRCMFPPPL

SEQ ID NO: 2271 - DNA, 2182 bp, Homo sapiens
gccgcccgccccgctgctgtctggcgggggaggagctcgggaccgggagcagcggctctggcggtcgtggcggtcggagatccgagagctctgcttctctgaaaagcgtgtggctttctggacttggtctacacctgacagtcactggaatgctactccaggccttagaagaaagtgaaactaattttaaaggccccttattctttctgttacctgcctgctgaagtgaaaataaatctccctgctcctttattctaaactgattttactttcccatctcaaaaacgtgtgcagggagcaggagccctcctacccgagccccagctgtattggaaaccctcctaagtcagagtgatgggtcaggaatctagcaagcctgtatggcccaatccaacaggagggtatcagtccaatacaggtaggaggtatggaagaaggcatgcttatgtcagtttcaggccacccacgagccagcgggaaaggattgccagccagagaaagacgaactccgaagtcccaatgcacagatcagcccccagtcaaaccaccaagaggagccgatcgccattttccactactcgtcgtagttgggacgacagcgagagttcgggaaccaacctgaatattgataatgaggactattccagtacttccaggtggagggataccgccaatgacaatgagggccactcggatggcctggcaagaagagggagaggcgagagttcaagtggctatcccgagccaaagtaccctgaagacaaacgggaagcgaggagtgaccaagtgaaaccagaaaaggtgccgagacgacgacgcaccatggccgaccctgacttctggacgcacagtgatgattactacaaatactgcgacgaagactctgacagtgacaaagagtggattgctgctctgcgtcggaaatatcgaagccgagagcaaaccctgtcctccagtggcgaaagctgggagactctgccggggaaagaagagcgggaacctccacaggctaaggtgagtgccagcactggcaccagccctggccccggtgctagtgccagtgccggggctggcgccggggccagtgctggcagcaatggcagcaattaccttgaagaagttcgagaaccatctcttcaggaagagcaggcatccctggaagaaggagaaattccttggctccagtaccatgagaatgacagtagcagtgagggggataatgattctggtcacgagttgatgcaacctggggtattcatgctggatggaaacaacaaccttgaagatgactccagtgtgagcgaagacctagaagtggattggagcctctttgatggatttgcagatgggttaggagtggctgaagccatttcctatgtggaccctcagttcctcacctacatggcacttgaagaacgcctggcccaggcaatggaaactgcccttgcgcacttggagtctctcgcagtggatgtagaggtggccaatccaccagcaagcaaggagagcattgacgctcttcccgagatcctggtcactgaagatcatggcgcagttggtcaggagatgtgctgccccatctgctgtagcgaatatgtgaagggggaggtggcaactgagctgccgtgccaccactatttccacaagccgtgtgtgtccatctggcttcagaagtcaggcacctgccccgtgtgccgctgcatgttccctcccccactctaaagaccaaggccgtttactcctggtctgattattttccccatctgaaatccacaatactgcaggagccctcttgaaattaacaatggaaataaaaccaatcagtcagttagcctaaacctattgattcctcgtgattatttccaatgtgaaaacagttgtgtatgattgcattaaaaatcatatcatcttttagaggttagaaaagggaaaactaaactttctaaatgctacttgagattgcagtaagaagatacgttttctaacctgaaagttaaatcgcatttgttttcttcagtagaatgggaatgtgttgctgttacttgtaatgtcaagtttatctgttaaatatgtccaaaaggcaaaatcatttttgttgcatgttatgggtcgatgttcctgtaattgcagtgccgtaaaagcttattaaagttgttcttttggttttacatggtaaaaaaaa

SEQ ID NO: 2272 - protein, 455 aa, Homo sapiens
MGQESSKPVWPNPTGGYQSNTGRRYGRRHAYVSFRPPTSQRERIASQRKTNSEVPMHRSAPSQTTKRSRSPFSTTRRSWDDSESSGTNLNIDNEDYSSTSRWRDTANDNEGHSDGLARRGRGESSSGYPEPKYPEDKREARSDQVKPEKVPRRRRTMADPDFWTHSDDYYKYCDEDSDSDKEWIAALRRKYRSREQTLSSSGESWETLPGKEEREPPQAKVSASTGTSPGPGASASAGAGAGASAGSNGSNYLEEVREPSLQEEQASLEEGEIPWLQYHENDSSSEGDNDSGHELMQPGVFMLDGNNNLEDDSSVSEDLEVDWSLFDGFADGLGVAEAISYVDPQFLTYMALEERLAQAMETALAHLESLAVDVEVANPPASKESIDALPEILVTEDHGAVGQEMCCPICCSEYVKGEVATELPCHHYFHKPCVSIWLQKSGTCPVCRCMFPPPL

SEQ ID NO: 2273 - DNA, 2728 bp, Homo sapiens
ggcggtcggagatccgagagctctgcttctctgaaaagcgtgtggctttctggacttggtctacacctgacagtcactggaatgctactccaggccttagaagaaagtgaaactaattttaaaggccccttattctttctgttacctgcctgctgaagtgaaaataaatctccctgctcctttattctaaactgattttactttcccatctcaaaaacgtgtgcagggagcaggagccctcctacccgagccccagctgtattggaaaccctcctaagtcagagtgatgggtcaggaatctagcaagcctgtatggcccaatccaacaggagggtatcagtccaatacaggtaggaggtatggaagaaggcatgcttatgtcagtttcaggccacccacgagccagcgggaaaggattgccagccagagaaagacgaactccgaagtcccaatgcacagatcagcccccagtcaaaccaccaagaggagccgatcgccattttccactactcgtcgtagttgggacgacagcgagagttcgggaaccaacctgaatattgataatgaggactattccaggtatccgccaagagagtacagagcttcgggtagcagaagaggaatggcctatggacatattgactcttatggggcagatgatagtgaggaggagggggctgggcctgttgagcgaccgccagtgagagggaaaactggcaagtttaaagatgataagctgtatgacccagagaaaggggcaaggtctttggctgggccacctccacatttctctagttttagccgtgatgtgagagaggagcgagacaagttagacccagtccctgcagcaagatgctcagctagcagagctgacttcctgccacaaagtagtgtggcctcacagtcgtcttctgaaggcaagctggctacaaaaggtgacagctcggagagggagagaagggagcaaaatttacctgcacgtcccagcagggctcctgtgagtatttgtggtggtggggaaaacacctcaaagagtgcagaggaacctgtggtcaggcccaaaatcagaaacctggcaagtccaaactgcgtgaaaccaaaaattttttttgatactgatgatgatgacgatatgccacacagtacttccaggtggagggataccgccaatgacaatgagggccactcggatggcctggcaagaagagggagaggcgagagttcaagtggctatcccgagccaaagtaccctgaagacaaacgggaagcgaggagtgaccaagtgaaaccagaaaaggtgccgagacgacgacgcaccatggccgaccctgacttctggacgcacagtgatgattactacaaatactgcgacgaagactctgacagtgacaaagagtggattgctgctctgcgtcggaaatatcgaagccgagagcaaaccctgtcctccagtggcgaaagctgggagactctgccggggaaagaagagcgggaacctccacaggctaaggtgagtgccagcactggcaccagccctggccccggtgctagtgccagtgccggggctggcgccggggccagtgctggcagcaatggcagcaattaccttgaagaagttcgagaaccatctcttcaggaagagcaggcatccctggaagaaggagaaattccttggctccagtaccatgagaatgacagtagcagtgagggggataatgattctggtcacgagttgatgcaacctggggtattcatgctggatggaaacaacaaccttgaagatgactccagtgtgagcgaagacctagaagtggattggagcctctttgatggatttgcagatgggttaggagtggctgaagccatttcctatgtggaccctcagttcctcacctacatggcacttgaagaacgcctggcccaggcaatggaaactgcccttgcgcacttggagtctctcgcagtggatgtagaggtggccaatccaccagcaagcaaggagagcattgacgctcttcccgagatcctggtcactgaagatcatggcgcagttggtcaggagatgtgctgccccatctgctgtagcgaatatgtgaagggggaggtggcaactgagctgccgtgccaccactatttccacaagccgtgtgtgtccatctggcttcagaagtcaggcacctgccccgtgtgccgctgcatgttccctcccccactctaaagaccaaggccgtttactcctggtctgattattttccccatctgaaatccacaatactgcaggagccctcttgaaattaacaatggaaataaaaccaatcagtcagttagcctaaacctattgattcctcgtgattatttccaatgtgaaaacagttgtgtatgattgcattaaaaatcatatcatcttttagaggttagaaaagggaaaactaaactttctaaatgctacttgagattgcagtaagaagatacgttttctaacctgaaagttaaatcgcatttgttttcttcagtagaatgggaatgtgttgctgttacttgtaatgtcaagtttatctgttaaatatgtccaaaaggcaaaatcatttttgttgcatgttatgggtcgatgttcctgtaattgcagtgccgtaaaagcttattaaagttgttcttttggttttaaaaaaaaaaaaaaaaaaaaaaaaaaaaaaaaaaaaaaaaaaaaaaaaaaaaaaaaaaaaaaaaa

SEQ ID NO: 2274 - protein, 643 aa, Homo sapiens
MGQESSKPVWPNPTGGYQSNTGRRYGRRHAYVSFRPPTSQRERIASQRKTNSEVPMHRSAPSQTTKRSRSPFSTTRRSWDDSESSGTNLNIDNEDYSRYPPREYRASGSRRGMAYGHIDSYGADDSEEEGAGPVERPPVRGKTGKFKDDKLYDPEKGARSLAGPPPHFSSFSRDVREERDKLDPVPAARCSASRADFLPQSSVASQSSSEGKLATKGDSSERERREQNLPARPSRAPVSICGGGENTSKSAEEPVVRPKIRNLASPNCVKPKIFFDTDDDDDMPHSTSRWRDTANDNEGHSDGLARRGRGESSSGYPEPKYPEDKREARSDQVKPEKVPRRRRTMADPDFWTHSDDYYKYCDEDSDSDKEWIAALRRKYRSREQTLSSSGESWETLPGKEEREPPQAKVSASTGTSPGPGASASAGAGAGASAGSNGSNYLEEVREPSLQEEQASLEEGEIPWLQYHENDSSSEGDNDSGHELMQPGVFMLDGNNNLEDDSSVSEDLEVDWSLFDGFADGLGVAEAISYVDPQFLTYMALEERLAQAMETALAHLESLAVDVEVANPPASKESIDALPEILVTEDHGAVGQEMCCPICCSEYVKGEVATELPCHHYFHKPCVSIWLQKSGTCPVCRCMFPPPL

SEQ ID NO: 2275 - DNA, 2232 bp, Homo sapiens
atggctgtctccgcatctccagtgatctctgcaacttccagcggcgccggcgtcccggggggcttattccgggccgaacccctgtactcgactcccagagagccccctcgtcttactcctaatatgatcaatagtttcgtggttaataaccacagcaacagtgccggaggcggcggcaggggcaacaccaacaccaacgagtgccgcatggtcgacatgcacgggatgaaggtggcttcgttcctgatggacggccaggaactgatctgcctgccgcaagtctttgatctttttctcaagcacctggtgggaggcttgcacactgtgtacaccaagctgaagagactggatatatcccccgtggtgtgtactgttgagcaggtccggatcctccgcgggctgggggccatccagcccggggtaaaccgctgcaaactcatcaccaggaaagacttcgaaactttgttcaccgattgcaccaatgccagaaggaagaggcaaatgacaagaaaacaagctgttaacagttcaagacccggcaggccccctaagcgttctttgggagtgttgcaggaaaatgcccgccttctgacccatgcagtcccaggcctcttatcgccaggacttatcactccgacaggtataacagctgcagcgatggctgaggcgatgaaacttcagaagatgaagcttatggctatgaacactcttcagggaaatggaagccaaaatgggaccgaatcagagcctgatgatcttaattctaacacaggtggaagtgaatcctcctgggataaagataagatgcagtctccatttgctgcacctggaccccaacatggaattgctcatgcagccctagctggccagccaggcattgggggtgctccaaccctcaatccactgcagcagaaccacctgctaaccaatagactggatctgccatttatgatgatgcctcatcccctacttccagtcagcttacctcctgcatcagttgccatggcaatgaatcagatgaaccatctcaatactattgccaacatggctgctgcagcacagattcacagtccactctccagagctggtacctctgttataaaggagcggatcccagagagtccttctcctgctccttctctagaagagaatcatcgtcctgggagccagacctcttcccacaccagcagcagtgtgtccagctctccctctcagatggatcatcatttggaaagaatggaagaggtaccagttcaaattccaataatgaagtcacccttggacaagatacagctgactcctgggcaggcattgcccgctggattccctggaccattcatttttgctgatagtctgtcctccgtggagactctgttgaccaacattcagggtctgctgaaagttgctttggataatgctcgcatccaggagaagcagattcaacaagaaaagaaggagctgcgactggagctctatagagagagagaaattagagaaaaccttgaaagacaacttgcagttgagcttcaaagcagaactactatgcaaaagcgcctgaagaaggagaaaaaaaccaagagaaaattgcaggaagccttggaatttgaatcaaagcgccgggagcaagtggagcaggcacttaagcaagccaccactagtgacagtggcctgaggatgttaaaagatactggaattccagatattgaaatagaaaacaatgggactcctcatgatagtgctgctatgcaaggaggtaactattactgtttagaaatggcacaacagttgtattcagcctgaaaggtcctcgctggctttacataaatgaagatgcttgtgattccagtttatctctgaaactattcaacatggagttatttcagttttgtttatcagcaaagctttgtttactgaaggagctatttaatctatgttacattaaaaaagaaacgcgtgtacattttaaaagcaatgatgtaaactttgttcttgcattagactgaccagtttaaaaatatgaactaaaacctaatggctaaagtaacttgaccatatttgatgcttttctatgctcatttcaacttggctttttgtcttttaaatttttaaaaaatgcagtagtgtgttagagactagaaagttatatgtatggtttccctgttctactatacataacgttaaagtacaccttctttgttaaaaatgtacttgctaaacttcagcgtaaataaa

SEQ ID NO: 2276 - protein, 599 aa, Homo sapiens
MAVSASPVISATSSGAGVPGGLFRAEPLYSTPREPPRLTPNMINSFVVNNHSNSAGGGGRGNTNTNECRMVDMHGMKVASFLMDGQELICLPQVFDLFLKHLVGGLHTVYTKLKRLDISPVVCTVEQVRILRGLGAIQPGVNRCKLITRKDFETLFTDCTNARRKRQMTRKQAVNSSRPGRPPKRSLGVLQENARLLTHAVPGLLSPGLITPTGITAAAMAEAMKLQKMKLMAMNTLQGNGSQNGTESEPDDLNSNTGGSESSWDKDKMQSPFAAPGPQHGIAHAALAGQPGIGGAPTLNPLQQNHLLTNRLDLPFMMMPHPLLPVSLPPASVAMAMNQMNHLNTIANMAAAAQIHSPLSRAGTSVIKERIPESPSPAPSLEENHRPGSQTSSHTSSSVSSSPSQMDHHLERMEEVPVQIPIMKSPLDKIQLTPGQALPAGFPGPFIFADSLSSVETLLTNIQGLLKVALDNARIQEKQIQQEKKELRLELYREREIRENLERQLAVELQSRTTMQKRLKKEKKTKRKLQEALEFESKRREQVEQALKQATTSDSGLRMLKDTGIPDIEIENNGTPHDSAAMQGGNYYCLEMAQQLYSA

SEQ ID NO: 2277 - DNA, 1609 bp, Homo sapiens
aaaaggggtcaagaaggcaggaccccgtgaagcacacctttcctaaggattttgacgaatgagaatgaagataaactgtgagttgaaagtgaaagagaaagcataagggatcttaggtgcatctgacaagccttagatgacctccagcaacttcagttctcaccgaattactgcatttcagccttactgagaagcagccagtcatactatcctcaaattttaacccaggatgagttctcctactaaagaaggaagtgatacagctggaaatgctcacaaaaattctgaaaatgagcctcctaatgactgtagtacagacatagagtctccatctgctgatcccaatatgatctatcaggtagaaaccaacccaataaacagggagccaggcacagcaacctcccaggaagatgttgttcctcaagcagcagaaaacagcgagctcgaaacagagatccaaaaagatcaacgagaagaagatctaaaagaagagcttcttctacttcagacccccattcccagaaaattggtctctcacaagcccttaaatgatagatcaagatcccactcagggaaagttgagatgaaagcaaacaatttccccataaatcacaaaactcgttttcgactttcaacttcatggagagtcccatttattaacagtcatgagataagaagtatgattctccatctgctatgtgatagatatttctctcaggctgcagggtgtcagaataccatgtgggtaaagcgaaaatatatagcatgtctttaccatccaaatagtttcacccatcacgagagagccataacatttagaaggccttcgagggtgcactactaccgtcccctcactgagagaatgacatcaggaaaattttgcaaatcaactgacactaaagggaaatgtagattccgtgctattgtgaggtctgtgctctttgtgtcacagatacaaattgaaagtatttttaatataaaaggttttgtggatatattgacatatatccataccatgaatgttatgatcacaaacaccaataatggttggaaatacttttgtcccatctgtggaaggctttttaacacttactctgaattaagacaacattcatgcagctcttctgggaattaagttaaattggggtaaattcattttaaaatataacttctaaaattcataatttgactactaaagtaagacaaaattgcatgaacataaattttagtattattagagggagtagcagaaaggaacacaaactaatagtacctctcagtaagaaatacctatggggagtgaggaaacatctgtttatactttgcttttacaagtacatcattgaaatatcagacctgtcatctatattgagtcagcatttgaaccaagtaaatgttttcactgtcttaacatctatttctgtagatgtaaatattgttaacataaaagaatccaagttaacaggatcctgactaagatagcaaacatatattggaaggccagacaaagttctaccaagtgtttccagagattctgctacatgtattatctgaaatgttctccatatattcaataaaaaccaatttgaagacaaaaaaaaaaaaaaaa

SEQ ID NO: 2278 - protein, 301 aa, Homo sapiens
MSSPTKEGSDTAGNAHKNSENEPPNDCSTDIESPSADPNMIYQVETNPINREPGTATSQEDVVPQAAENSELETEIQKDQREEDLKEELLLLQTPIPRKLVSHKPLNDRSRSHSGKVEMKANNFPINHKTRFRLSTSWRVPFINSHEIRSMILHLLCDRYFSQAAGCQNTMWVKRKYIACLYHPNSFTHHERAITFRRPSRVHYYRPLTERMTSGKFCKSTDTKGKCRFRAIVRSVLFVSQIQIESIFNIKGFVDILTYIHTMNVMITNTNNGWKYFCPICGRLFNTYSELRQHSCSSSGN

SEQ ID NO: 2279 - DNA, 1029 bp, Homo sapiens
cgcacaaccttgctggtctggcccaggcggggggcggggccagcacgatgagcgccccgggcagccccgaccaggcctacgacttcctgctcaagttcctgctggtgggcgacagggacgtaggcaagagtgagatcctggagagcctgcaggacggcacggccgagtccccgtacagtcacctggggggaatcgactacaagacgaccaccatcctgctggacggccagcgggtgaagctgaagctctgggatacgtcggggcagggaagattttgtaccatattccgctcctactctcgtggtgcacaaggagtgatcctggtctacgacattgcaaaccgctggtctttcgagggtatggatcgatggattaagaagattgaggaacatgcccctggtgtccctaaaatcctggtggggaatcgcctacatctggcattcaagaggcaggtgcccagggagcaggcccaggcctacgccgagcgcctgggcgtgaccttctttgaggtcagccctctgtgcaatttcaacatcatagagtctttcacggagctggccaggatagtgctgctgcggcacaggttgaactggctcgggaggccgagcaaggtactgagcttgcaagacctctgctgccgcaccatcgtgtcctgcacacctgtgcatctggtggacaagctcccgctccccattgccttaagaagccacctcaagtccttctccatggctaagggcctgaatgccaggatgatgcgaggcctctcctactccctcaccaccagctccactcacaaaaggagcagcctctgcaaagtgaagatcgtctgcccaccccagagcccacccaaaaactgcaccagaaacagctgcaaaatttcttaaggaaggcaccaaaaggaaacaagctggaatcgctccaggaaaaactctgaatggttacacctggaagagggaagatgcattctagattcaaagaaatacgttttcagtttctcatgggaacaatgctgcttgggaatgtgtgtga

SEQ ID NO: 2280 - protein, 278 aa, Homo sapiens
MSAPGSPDQAYDFLLKFLLVGDRDVGKSEILESLQDGTAESPYSHLGGIDYKTTTILLDGQRVKLKLWDTSGQGRFCTIFRSYSRGAQGVILVYDIANRWSFEGMDRWIKKIEEHAPGVPKILVGNRLHLAFKRQVPREQAQAYAERLGVTFFEVSPLCNFNIIESFTELARIVLLRHRLNWLGRPSKVLSLQDLCCRTIVSCTPVHLVDKLPLPIALRSHLKSFSMAKGLNARMMRGLSYSLTTSSTHKRSSLCKVKIVCPPQSPPKNCTRNSCKIS

SEQ ID NO: 2281 - DNA, 862 bp, Homo sapiens
cttggcggtgacgcacggccctcacgtgaccgggagctgcagagctacgcagccttcggtgcagtcgtcactcgtgtctcgctaccagctccccgctgccctgcgctcggcgggctggcatccggcccgggggaaagcggaccagcccttctgcaggtctgcggggccaagtgtcccggcggcgcacctcgtggcgagaatcgggagaaggaggagactacaaggataggcccaggagtaatggagtccaaagagaaacgagcagtaaacagtctcagcatggaaaatgccaaccaagaaaatgaagaaaaggagcaagttgctaataaaggggagcccttggccctccctttggatgctggtgaatactgtgtgcctagaggaaatcgtaggcggttccgcgttaggcagcccatcctgcagtatagatgggatatgatgcataggcttggagaaccacaggcaaggatgagagaagagaatatggaaaggattggggaggaggtgagacagctgatggaaaagctgagggaaaagcagttgagtcatagtctgcgggcagtcagcactgacccccctcaccatgaccatcatgatgagttttgccttatgccctgaatcctgatggtttccctaaagttattacggaaacagacccctgctttcgaatttacatgttcatgatgtgcccttgttgtaaacctttacctgtcacttgtttacgtgggtctcctattaccagcttctaattgaatattgtgtttttgaaccagtctgtaagatttttgttagcagaagaattttacctattgcatggaaagatgctcattatagtgaagttaataaagcacctttaaaaagc

SEQ ID NO: 2282 - protein, 125 aa, Homo sapiens
MESKEKRAVNSLSMENANQENEEKEQVANKGEPLALPLDAGEYCVPRGNRRRFRVRQPILQYRWDMMHRLGEPQARMREENMERIGEEVRQLMEKLREKQLSHSLRAVSTDPPHHDHHDEFCLMP

SEQ ID NO: 2283 - DNA, 1915 bp, Homo sapiens
atcttctccaaactcccgtccccaggccacacagattctcctcaagagagccctataaggacattggtaaaatgtcactgccttcaggacacactacgggtcacactgatcaagttgttcaaagaagagcaagatgttgggatatttaccaaaggagatttagcagtaggtctgaacctgtcaatcctggcatgcattcttcatcccatcagcagcaagatggagatgcagcaatgcatggtgcccacatggactctccagtaagatacactccctatactatttcaccctataatcggaaaggcagttttcgtaaacaagaccaaacccacgttaacatggagagagagcaaaaacctccagagagaagaatggaggggaacatgccggatgggaccttagggagctggttcaagatcacagttccctttggcataaaatacaatgagaagtggctgctgaatttgattcagaatgaatgcagtgtacccttcgtcccagttgagtttcactatgaaaacatgcatgccagcttctttgtggagaatgccagcatcgcctatgcactgaagaatgtcagtggcaagatttgggatgaggataatgaaaagatatcaatctttgtcaaccctgctggcataccccactttgtgcacagggagctgaagtcagaaaaggtggagcagataaagctggccatgaaccaacagtgtgatgtctcccaggaagctcttgatatccagagactcccattttacccagacatggtgaaccgtgatactaagatggcatcgaatcctagaaagtgcatggctgcctccctggacgtccatgaagagaacatacctacagtgatgtctgcaggggagatggacaagtggaaagggatagagccaggagagaagtgtgcggacagaagcccagtgtgcacgaccttctcggatacctccagcaacataaactccatcctggaattgttccccaaattattatgcctggatggccagcagtcacccagagcaactttatgtggtactgaagcccacaagaggttaccaacctgtaagggaagcttctttggatctgagatgttgaagaatctggtcctgcaattcctgcagcagtattacttgatctatgactctggagatcgacagggtctccttagtgcttaccacgatgaggcctgcttctccctgagcattcccttcaatcctgaggactcagccccgagcagcttctgcaagttcttcaaggatagcaggaatataaaaattctcaaggacccctaccttcggggggagctgctgaagcacacaaaacttgatattgtggactccctcagtgcgttgcctaaaactcagcatgacctcagctccttcctggtggacatgtggtaccagacggaatggatgctctgcttttctgtcaacggggtgttcaaggaagtggaaggacagtctcagggttctgttctcgccttcacccggaccttcattgctacccctggcagcagttccagtctgtgcatcgtgaatgacaagctctttgtgcgggataccagccaccaagggacccagagtgccttgttcaccctagtgcccacagccttctccagctccgtgcctgccttctcccaggagcagcagaaaatgctgccttcgtaacaaccagtgtgactacgtcagagctcctcatgttcttgcatggcccaagatgtatttccctgtgactgaaccaggagatctggctggggctaagaagccgaagcccaactcacagggctgactctcatccttccaaaggggccagttgttctgtgcacttgtccacccctgttacccccaggatctctgttccttttcacaataaagtatggtgtcttgttatgtcaaaaaaaaaaaaaaaaaaaaaa

SEQ ID NO: 2284 - protein, 531 aa, Homo sapiens
MSLPSGHTTGHTDQVVQRRARCWDIYQRRFSSRSEPVNPGMHSSSHQQQDGDAAMHGAHMDSPVRYTPYTISPYNRKGSFRKQDQTHVNMEREQKPPERRMEGNMPDGTLGSWFKITVPFGIKYNEKWLLNLIQNECSVPFVPVEFHYENMHASFFVENASIAYALKNVSGKIWDEDNEKISIFVNPAGIPHFVHRELKSEKVEQIKLAMNQQCDVSQEALDIQRLPFYPDMVNRDTKMASNPRKCMAASLDVHEENIPTVMSAGEMDKWKGIEPGEKCADRSPVCTTFSDTSSNINSILELFPKLLCLDGQQSPRATLCGTEAHKRLPTCKGSFFGSEMLKNLVLQFLQQYYLIYDSGDRQGLLSAYHDEACFSLSIPFNPEDSAPSSFCKFFKDSRNIKILKDPYLRGELLKHTKLDIVDSLSALPKTQHDLSSFLVDMWYQTEWMLCFSVNGVFKEVEGQSQGSVLAFTRTFIATPGSSSSLCIVNDKLFVRDTSHQGTQSALFTLVPTAFSSSVPAFSQEQQKMLPS

SEQ ID NO: 2285 - DNA, 1245 bp, Homo sapiens
tggcgtcagagccgtcgtggctcgttccattctcggcggtggtacctgctcccggtggccctgaggacgtgtgggccaggggcggccccgaaattaggaagcggagggggagcagtctgcaggtctgcggggctaagtgtcgcggcggcgcacctcgcgtcaagaatccggaggaggagactgcaaggataggcccaggagtaatggagtccaaagaggaactagcggcaaacaatctcaacggggaaaatgcccaacaagaaaacgaaggaggggagcaggcccccacgcagaatgaagaagaatcccgccatttgggagggggtgaaggccagaagcctggaggaaatatcaggcgggggcgagttaggcgacttgtccctaattttcgatgggccatacctaataggcatattgagcacaatgaagcgagagatgatgtagaaaggtttgtagggcagatgatggaaatcaagagaaagactagggaacagcagatgaggcactatatgcgcttccaaactcctgaacctgacaaccattatgacttttgcctcataccttgaatcctaaaagttttcgctgaggttaatgtgaacactgctttacaagcttgtatttttgtgatttactttttctgtaagccttttggggtttacacttaccagtttctaatggaaattagaattctaattgaatattgttttgtctcagcctaaaagttacggtcagcatggcaattcacctattttaggaaaaatactcttttcataatatgaaatgcataaagcagttcaaaaagcagtctgtattccatcatcttcctttttcattccagtccttatttttgtaagtattacttttcctcctccggctacctggactcaaaatctcagttgtctttgacagtttttttcttgtccctgaccaaaaaagaatgatcatacccagaattcaatgtttgatattttaagaatgtatgttctagtgtttttcagagtgagtctaccatctgtataaaaacaccttgggggcaggcaggggcatttaaaaatgtaggacctatcgtccagactcacagagtggggctccagaatctccatttttaacaaactctcttaagtaattctgatgtgtaccaaaatcagtgccattggtgtgtgtgtacgtaactatatacatatgtgtgtgtgtgtatatatataatgtgtcataaccgtaaacaataaacaatatcaagataaa

SEQ ID NO: 2286 - protein, 120 aa, Homo sapiens
MESKEELAANNLNGENAQQENEGGEQAPTQNEEESRHLGGGEGQKPGGNIRRGRVRRLVPNFRWAIPNRHIEHNEARDDVERFVGQMMEIKRKTREQQMRHYMRFQTPEPDNHYDFCLIP

SEQ ID NO: 2287 - DNA, 1158 bp, Homo sapiens
cgactctcacgtgaccaggagtcgacgtgtgcagaagtccttatagtccagggcctgtttccctgtagcagctccttattgctggagaaggagaaaagtgcccaagatcctttcaggattaatttattcaaaaaggaaataaaaaatactcaatatgcaaaagtcttgtgaagaaaatgagggaaaaccacagaacatgccaaaggccgaggaagatcgccctttggaggatgtaccacaggaggcagaaggaaatcctcaaccttccgaagaaggcgtaagccaggaagcagaaggaaaccccagaggagggccgaatcagcctggccagggatttaaagaggacacacccgttaggcatttggaccctgaagaaatgataagaggagtagatgagcttgaaaggcttagggaagagataagaagagtaagaaacaagtttgtgatgatgcattggaagcaaagacattcacgcagccgtccttatcctgtgtgctttaggccttgaattcatttttgcctaatattaaaatctggccccagctttctttctgttagcattttctgatgtatctttgacctccattttacttttaatcatctgatgaaattttgttttaggtaatttccttggtaccagcatctcattggattttggattttgacccattttccaggtctatttttcaattggaaactttcacacatttgcatgggaatatgttcattccatgttgtaaagtaaaacataacaggttatggcaaagcagcatatttaatatcagctcacatatgtaggataaaattccaaactttgtgtgtgtgcgtgtgtgtatacatacatccatataacatatatcacaaacttaaccaagcttatttctgtgtggtgtgaaattttatttgttttcttctttttgttctttttgcttatatgtactttttaatgaacacgtgtctcacacacaaaaagaattaaggattttttttacaagtaagagtcaaataatttgcaaccagcttatgagggcaatgggggcacctaaactcttgatgaaagaactttaaaaagaaatgtaaacctcaaattacctctggatctcttagccagaggaataaactggcaattattacagataaaaaaaaaaaaaaaaaaaa

SEQ ID NO: 2288 - protein, 117 aa, Homo sapiens
MQKSCEENEGKPQNMPKAEEDRPLEDVPQEAEGNPQPSEEGVSQEAEGNPRGGPNQPGQGFKEDTPVRHLDPEEMIRGVDELERLREEIRRVRNKFVMMHWKQRHSRSRPYPVCFRP

SEQ ID NO: 2289 - DNA, 1231 bp, Homo sapiens
cgactctcacgtgaccaggagtcgacgtgtgcagaagtccttatagtccagggcctgtttccctgtagcagctccttattgctggagaaggagaaaagtgcccaagatcctttcaggatatttggttttttgggcgcgacacaaatcgaggtgagggaagagagaggaaaatcccctgaatccctgcaggattaatttattcaaaaaggaaataaaaaatactcaatatgcaaaagtcttgtgaagaaaatgagggaaaaccacagaacatgccaaaggccgaggaagatcgccctttggaggatgtaccacaggaggcagaaggaaatcctcaaccttccgaagaaggcgtaagccaggaagcagaaggaaaccccagaggagggccgaatcagcctggccagggatttaaagaggacacacccgttaggcatttggaccctgaagaaatgataagaggagtagatgagcttgaaaggcttagggaagagataagaagagtaagaaacaagtttgtgatgatgcattggaagcaaagacattcacgcagccgtccttatcctgtgtgctttaggccttgaattcatttttgcctaatattaaaatctggccccagctttctttctgttagcattttctgatgtatctttgacctccattttacttttaatcatctgatgaaattttgttttaggtaatttccttggtaccagcatctcattggattttggattttgacccattttccaggtctatttttcaattggaaactttcacacatttgcatgggaatatgttcattccatgttgtaaagtaaaacataacaggttatggcaaagcagcatatttaatatcagctcacatatgtaggataaaattccaaactttgtgtgtgtgcgtgtgtgtatacatacatccatataacatatatcacaaacttaaccaagcttatttctgtgtggtgtgaaattttatttgttttcttctttttgttctttttgcttatatgtactttttaatgaacacgtgtctcacacacaaaaagaattaaggattttttttacaagtaagagtcaaataatttgcaaccagcttatgagggcaatgggggcacctaaactcttgatgaaagaactttaaaaagaaatgtaaacctcaaattacctctggatctcttagccagaggaataaactggcaattattacagataaaaaaaaaaaaaaaaaaaa

SEQ ID NO: 2290 - protein, 117 aa, Homo sapiens; identical to SEQ ID NO: 2288

SEQ ID NO: 2291 - DNA, 684 bp, Homo sapiens
atggaggactcgggtcctgcgcgtcgctgcaggcccttttccgccccctgctggagaagctgtgtagtgccgacttggcagacgagtccattccaggccctgcagagggaaacgcctagcccccggcagggtttgaccaagcgaaggagccccggccctctgggaacggccctgacacacccacttgtccgcgaactgggatcatgcaaactgctcgcttggtctcagggctccggggagccacgtaggagactcgaggctggggcacaaacaggacaggaggggggtccggaaaggcagaacatctgcccagcagccttaaagcatcatccaacagccaccccctcccccgcggtagcccgggtgcagttagtcgcgggatttacctgccacggatccagccaccccgtcaagacctttcctctacctccgagcgctccagctggcggggctggggagccgcagccccgcggccgcagccgcagccccgggcccagcccgctccccctggctcttctcccgcccccgcacactggctcgaggcggggaaaagctgcagcccccagtgcgagatcccagacggttagctggcacagctgcccgcccgcggtagagcccctgctcggcaaccgctccctagcccttctctgctattacgtcacccgagctctgcaccttacctag

SEQ ID NO: 2292 - protein, 227 aa, Homo sapiens
MEDSGPARRCRPFSAPCWRSCVVPTWQTSPFQALQRETPSPRQGLTKRRSPGPLGTALTHPLVRELGSCKLLAWSQGSGEPRRRLEAGAQTGQEGGPERQNICPAALKHHPTATPSPAVARVQLVAGFTCHGSSHPVKTFPLPPSAPAGGAGEPQPRGRSRSPGPSPLPLALLPPPHTGSRRGKAAAPSARSQTVSWHSCPPAVEPLLGNRSLALLCYYVTRALHLT

SEQ ID NO: 2293 - DNA, 4775 bp, Homo sapiens
acccgcgcgaggtaggcgctctggtgcttgcggaggacgcttccttcctcagatgcaccgatcttcccgatactgcctttggagcggctagattgctagccttggctgctccattggcctgccttgccccttacctgccgattgcatatgaactcttcttctgtctgtacatcgttgtcgtcggagtcgtcgcgatcgtcgtggcgctcgtgtgatggccttcgtccgtttagagtagtgtagttagttaggggccaacgaagaagaaagaagacgcgattagtgcagagatgctggaggtggtcagttactaagctagagtaagatagcggagcgaaaagagccaaacctagccggggggcgcacggtcacccaaaggaggtcgactcgccggcgcttcctatcgcgccgagctccctccattcctctccctccgccgaggcgcgaggttgcggcgcgcagcgcagcgcagctcagcgcaccgactgccgcgggctccgctgggcgattgcagccgagtccgtttctcgtctagctgccgccgcggcgaccgctgcctggtcttcctcccggacgctagtgggttatcagctaacacccgcgagcatctataacataggccaactgacgccatccttcaaaaacaactaaaggatgatatgatgaacctagcctgttaatttcgtcttctcaattttaaactttggttgcttaagactgaagcaatcatggtgaacctgaggaatgcggtgcattcattccttgtgcacctaattggcctattggtttggcaatgtgatatttctgtgagcccagtagcagctatagtaactgacattttcaatacctccgatggtggacgcttcaaattcccagacggggtacaaaactggccagcactttcaatcgtcatcataataatcatgacaataggtggcaacatccttgtgatcatggcagtaagcatggaaaagaaactgcacaatgccaccaattacttcttaatgtccctagccattgctgatatgctagtgggactacttgtcatgcccctgtctctcctggcaatcctttatgattatgtctggccactacctagatatttgtgccccgtctggatttctttagatgttttattttcaacagcgtccatcatgcacctctgcgctatatcgctggatcggtatgtagcaatacgtaatcctattgagcatagccgtttcaattcgcggactaaggccatcatgaagattgctattgtttgggcaatttctataggtgtatcagttcctatccctgtgattggactgagggacgaagaaaaggtgttcgtgaacaacacgacgtgcgtgctcaacgacccaaatttcgttcttattgggtccttcgtagctttcttcataccgctgacgattatggtgattacgtattgcctgaccatctacgttctgcgccgacaagctttgatgttactgcacggccacaccgaggaaccgcctggactaagtctggatttcctgaagtgctgcaagaggaatacggccgaggaagagaactctgcaaaccctaaccaagaccagaacgcacgccgaagaaagaagaaggagagacgtcctaggggcaccatgcaggctatcaacaatgaaagaaaagcttcgaaagtccttgggattgttttctttgtgtttctgatcatgtggtgcccatttttcattaccaatattctgtctgttctttgtgagaagtcctgtaaccaaaagctcatggaaaagcttctgaatgtgtttgtttggattggctatgtttgttcaggaatcaatcctctggtgtatactctgttcaacaaaatttaccgaagggcattctccaactatttgcgttgcaattataaggtagagaaaaagcctcctgtcaggcagattccaagagttgccgccactgctttgtctgggagggagcttaatgttaacatttatcggcataccaatgaaccggtgatcgagaaagccagtgacaatgagcccggtatagagatgcaagttgagaatttagagttaccagtaaatccctccagtgtggttagcgaaaggattagcagtgtgtgagaaagaacagcacagtcttttcctacggtacaagctacatatgtaggaaaattttcttctttaatttttctgttggtcttaactaatgtaaatattgctgtctgaaaaagtgtttttacatatagctttgcaaccttgtactttacaatcatgcctacattagtgagatttagggttctatatttactgtttataataggtggagactaacttattttgattgtttgatgaataaaatgtttatttttgctctccctcccttctttccttccttttttcctttcttccttcctttctctctttcttttgtgcatatggcaacgttcatgttcatctcaggtggcatttgcaggtgaccagaatgaggcacatgacagtggttatatttcaaccacacctaaattaacaaattcagtggacatttgttctgggttaacagtaaatatacactttacattcttgctctgctcatctacacatataaacacagtaagataggttctgctttctgatacatctgtcagtgagtcagaggcagaacctagtcttgttgttcatataggggcaaaaatttgacattgtcagaatgttgtgttggtatttactgcaatgtctgtccctaaacatagtggtattttaacatagcagctggttaaccgggactacagaagtggaaggataatgagatgtaatacaccaaatagcttttcacttcttaaggacagtgttcaaattctgattattacaacaagcaaactgaaattagtgttttcattctggtccttagtaaattcctaattctatgattaaactgggaaatgagatcccagagttatttcccaacccaggattcaacatcaattgggttttgatctcagcatcctggaaatttgtgtgcttcacacaaagtgaaattagtattttgagccttattaaaatattttcttaattatggtacctctgtctataggacttaatttagcagtccatttttgagtaaaacttgtattggaagtatagatggtagaaactttggaagttttacttgattaaggactacagaattgggcccttagaatgtgaaaaaaaaaagtaattaaaaagacacttttaccgaactcgggattacagaaacacggagtttccatttggattttaaacaaaatttatgtcattttcagatccttccaaactctctagtgcaggaaaaggctgcagctaatttgtgaaagtggcaagctcttcattgcactgcagttatttaccagaagtttaaatctttgttaaaatatagtgttgtgttacaataagtgttggccatcatttcattcgtgggcctgctgctctctaagaattcagtagcattttaatagtttctaaaccatgaaaagttttcaagcattgctaaagtcaggccattcagtctatgctgtgtgcagagtatacaagtgtttctagtaacagtatttccatacgtgcccatttcacacaactgtggataaattttggaagaattcatgatgctagttcttacgcttgacagttacttacacacctgagaatgtgcctctcagtatcttaaaattggttaatgaaaaatctgaatttctaaaacccttggtctgtgttctcaacacacagtatagataaatccaatagtctgccacaagggcagtggaagagctgctgtatttgaggaaactcatacagtctctatttgatttgcaacactggccaaacatcagtcatttgcttgagcatgcccaaatattacatgaaagtcaagtctacctgccttgcctgttaggtctgttgaagtgcatgttaaaataattatatgaagcagaatgagatgatttaattcttaccgaaatgaaaatggctgaagaaacacagcatgcatttagcatgagttctgcacatacagatggtgtcctgcatgtatgccatgtatgttgcatgaatccatcgatttgtattaatgtagggcagaatagctgatagaagaaggactgaagaaaatccttcagcaatccttaaaaagaccatgcattcagatctgaagtagtgtgagtgttagaaaaaactggaaacatctgatttctgaactatcagggcaagctcatagcacatgttttacaaagaaacaaaatataaatcacagatttccaaaagtactagcaataagttgaatgataatagctcacagcacatttgttaatgattcttgtgtcatcaagtagtagtacttaatagtacccaacctggtaattatcctcaagttgtgtgctattcgtaagttctgtgcagtttggtatgaaacaaatatactcatttggatataaatcttacccttcaatgttaaatctacaaacttttataaatgttttaaagaagtccatgtgataattgtaaaggtgatgaatttaccatcaaacaaatcattttgatgtattattatatatgtatatctgtgtaagacacgtgcaacagactgccttatattattttctgtaattcttctcctttgtcaaatggtattttttgtgaatggttgcaaagtgttgtcttattcctaattcctgtatgttatccactacaggttttatgagacttcctattaatttattaaatttattaaatgttgaaaaaaaaaaaaaaaaaaaaaaa

SEQ ID NO: 2294 - protein, 458 aa, Homo sapiens
MVNLRNAVHSFLVHLIGLLVWQCDISVSPVAAIVTDIFNTSDGGRFKFPDGVQNWPALSIVIIIIMTIGGNILVIMAVSMEKKLHNATNYFLMSLAIADMLVGLLVMPLSLLAILYDYVWPLPRYLCPVWISLDVLFSTASIMHLCAISLDRYVAIRNPIEHSRFNSRTKAIMKIAIVWAISIGVSVPIPVIGLRDEEKVFVNNTTCVLNDPNFVLIGSFVAFFIPLTIMVITYCLTIYVLRRQALMLLHGHTEEPPGLSLDFLKCCKRNTAEEENSANPNQDQNARRRKKKERRPRGTMQAINNERKASKVLGIVFFVFLIMWCPFFITNILSVLCEKSCNQKLMEKLLNVFVWIGYVCSGINPLVYTLFNKIYRRAFSNYLRCNYKVEKKPPVRQIPRVAATALSGRELNVNIYRHTNEPVIEKASDNEPGIEMQVENLELPVNPSSVVSERISSV

SEQ ID NO: 2295 - DNA, 597 bp, Homo sapiens
atggctgatatgtacgtaaacttcttcatgaaaaatttaaactctggagcccagatatcttttttcattaccgtgtatgtgaggtcgcaattgtctgcaaactggggagctcagaggttactcagtgcgccgcatttcctcaccccccgccccccaaatcatcttagctcaaccatatatgaacgtccctcggttagcctgcctaaaagtcggtcctgcaactcagttgcatcttccgcagcccgaccctctactcagcgacattgcgttcagtttccctcctttctctcctcccactcctcacttcttgagaccccacccccgccttccgtttctgtctcggcttcccccgcgccaggttctctagacccccgcctccgcccagcgtcttcatctcgagcccccgctcccaatccccttagagacttctatgctccttccgtggaacctaagctcctctcttcttccagagactcagtctcctcgcgatttgcgcgttcagagtccctccccccaacctccgctagggccagtgcggtcctgcaggctgcagccatccgggacctgtccccgctccccaccccatcccccgcctaa

SEQ ID NO: 2296 - protein, 198 aa, Homo sapiens
MADMYVNFFMKNLNSGAQISFFITVYVRSQLSANWGAQRLLSAPHFLTPRPPNHLSSTIYERPSVSLPKSRSCNSVASSAARPSTQRHCVQFPSFLSSHSSLLETPPPPSVSVSASPAPGSLDPRLRPASSSRAPAPNPLRDFYAPSVEPKLLSSSRDSVSSRFARSESLPPTSARASAVLQAAAIRDLSPLPTPSPA

SEQ ID NO: 2297 - DNA, 128 bp, Homo sapiens
cagcactgccaagtgacccattgggctccatcttgaccaactgggcatcaagcggtgcaaaagcaaatccctctcaaagctgggagagtcacaccgtgggctactcctgcatgcagctgggtacatat

SEQ ID NO: 2298 - DNA, 1376 bp, Homo sapiens
gtaagaacactctcgtgagtctaacggtcttccggatgaaggctatttgaagtcgccataacctggtcagaagtgtgcctgtcggcggggagagaggcaatatcaaggttttaaatctcggagaaatggctttcgtttgcttggctatcggatgcttatatacctttctgataagcacaacatttggctgtacttcatcttcagacaccgagataaaagttaaccctcctcaggattttgagatagtggatcccggatacttaggttatctctatttgcaatggcaacccccactgtctctggatcattttaaggaatgcacagtggaatatgaactaaaataccgaaacattggtagtgaaacatggaagaccatcattactaagaatctacattacaaagatgggtttgatcttaacaagggcattgaagcgaagatacacacgcttttaccatggcaatgcacaaatggatcagaagttcaaagttcctgggcagaaactacttattggatatcaccacaaggaattccagaaactaaagttcaggatatggattgcgtatattacaattggcaatatttactctgttcttggaaacctggcataggtgtacttcttgataccaattacaacttgttttactggtatgagggcttggatcatgcattacagtgtgttgattacatcaaggctgatggacaaaatataggatgcagatttccctatttggaggcatcagactataaagatttctatatttgtgttaatggatcatcagagaacaagcctatcagatccagttatttcacttttcagcttcaaaatatagttaaacctttgccgccagtctatcttacttttactcgggagagttcatgtgaaattaagctgaaatggagcatacctttgggacctattccagcaaggtgttttgattatgaaattgagatcagagaagatgatactaccttggtgactgctacagttgaaaatgaaacatacaccttgaaaacaacaaatgaaacccgacaattatgctttgtagtaagaagcaaagtgaatatttattgctcagatgacggaatttggagtgagtggagtgataaacaatgctgggaaggtgaagacctatcgaagaaaactttgctacgtttctggctaccatttggtttcatcttaatattagttatatttgtaaccggtctgcttttgcgtaagccaaacacctacccaaaaatgattccagaatttttctgtgatacatgaagactttccatatcaagagacatggtattgactcaacagtttccagtcatggccaaatgttcaatatgagtctcaataaactgaatttttcttgcgaatgttgaaaaa

SEQ ID NO: 2299 - protein, 380 aa, Homo sapiens
MAFVCLAIGCLYTFLISTTFGCTSSSDTEIKVNPPQDFEIVDPGYLGYLYLQWQPPLSLDHFKECTVEYELKYRNIGSETWKTIITKNLHYKDGFDLNKGIEAKIHTLLPWQCTNGSEVQSSWAETTYWISPQGIPETKVQDMDCVYYNWQYLLCSWKPGIGVLLDTNYNLFYWYEGLDHALQCVDYIKADGQNIGCRFPYLEASDYKDFYICVNGSSENKPIRSSYFTFQLQNIVKPLPPVYLTFTRESSCEIKLKWSIPLGPIPARCFDYEIEIREDDTTLVTATVENETYTLKTTNETRQLCFVVRSKVNIYCSDDGIWSEWSDKQCWEGEDLSKKTLLRFWLPFGFILILVIFVTGLLLRKPNTYPKMIPEFFCDT

SEQ ID NO: 2300 - DNA, 1201 bp, Homo sapiens
atgtcggacaaggacaagcagcaggagcaaactatcgccaaggacctggtcgtgaccaagtataagatggggggggggcgacatcgctaaccaggtactacggtccttggtagaagcatctagctcaggtgtgttggtactgagcctgtgtgagaaagatgatgccatgattatggaagaaatagggaaaatcttcaagaaaaaaatagaaatgagaaaaggtattgcttttcccaccagcatttcagtaaataactgtatatgtcacttctcccctttgaagagcaaccaggattatattctcaaggaaggtgacttggtaaaaattgaccttggggtccatgtggatggcttcatcgctaatgtagctcatacttttgtggttgatgtagctcaggggacccaagtaacagggaggaaagcagatgtcattaaggcaattcacctttgtgatgaagctgtcctacgcctggtcaaacctggaaaccagaacacacaagtgacagaagccctgaacaaagctgcccactcacttaactgcacgccaatagaaggtatgctgtcacatcagttgaagcagcatgtcatcgatggagaaaaaaccattatccagaatctcacagaccagaagaagaaggaccatgaaaaagcggaattggcggtacatgaagtatatgctgtggatgttctcgtcagctcaggagagggcaagagcaaggatgcaggacagagaaccactatttacaaatgagacccctctaaacagcacggactgaagatgaaaacttcacatgccttcttcagtgaggtggaaaagtgttttgatgccatgccgtttactttaagagcatttgaagatgagaagaaggctcagattggtgtggtgaagtgcaccaaacatgaactggtgcaaactatttaatgttctctatgagaaggaaggtgaatttgttgcccagtttaaatgtatagttctgctgatgctcgatggccttatgcagataaccagtggtcccttcgagcctgacctctacaagtctgagatggaagtccaggatgcagagctaaaggctctcctctagagttctgcaagtcaaaaaacccagaaaaagaaaaaaaaaaaaaaaagaagaaggcctacaagactgcagagaaagccaccagtggggaaacattagaagaaaatgaagctggggactga

SEQ ID NO: 2301 - DNA, 900 bp, Homo sapiens
atgtctgccacaggggaccgacacccgacccaaggggaccaggaggccccggtaagccaggagggagcacaggccgaggcggccggagctggtaaccaggagggcggcgactccggccccgacagcagcgacatggtgcctgcggccgaggtggtcggagtcgcagggcccgtggaaggcctcggggaggaggagggtgagcaggcggcaggcctggccgcagtcccccagggcgggagcgccgaggaggactcagatatcgggcccgcgacggaggaagaggaggaggaggaagaggggaacgaggcggccaacttcgacttggcggtggccacccgtcggtacccggcggcgggcattggcttcgtgttcctgtacctggtccactcccttctccgccgcctctatcacaacgaccacatccagatagcgaaccgtcacctcagccgcctgatggtggggccccacgctgctgtgcccaacctctgggacaaccctcccctgctgctgctgtcccagaggctgggtgcaggggctgcagccccagaaggcgagggcctcggcctgatccaggaggctgcgtcggtccaggaggccgcgtcggtcccagagcctgcagtgccagctgacctggccgagatggccagggagcccgcggaggaggccgcagatgagaaacccccagaggaggccgcagaggagaagctcacagaggaggccacagaggaaccggccgcagaggaaccgacctcagaggaggccgtggcccccgaggaagtcactaaatctcagcccgaaaagtgggatgaagaggcccaagatgctgcaggcgaggaagagaaagaacaagaaaaagagaaggatgtggaaaacaaggtgaagaactccaaagggacctag

SEQ ID NO: 2302 - protein, 299 aa, Homo sapiens
MSATGDRHPTQGDQEAPVSQEGAQAEAAGAGNQEGGDSGPDSSDMVPAAEVVGVAGPVEGLGEEEGEQAAGLAAVPQGGSAEEDSDIGPATEEEEEEEEGNEAANFDLAVATRRYPAAGIGFVFLYLVHSLLRRLYHNDHIQIANRHLSRLMVGPHAAVPNLWDNPPLLLLSQRLGAGAAAPEGEGLGLIQEAASVQEAASVPEPAVPADLAEMAREPAEEAADEKPPEEAAEEKLTEEATEEPAAEEPTSEEAVAPEEVTKSQPEKWDEEAQDAAGEEEKEQEKEKDVENKVKNSKGT

SEQ ID NO: 2303 - DNA, 1300 bp, Homo sapiens
gctgaccagaatctttcccaacttgtctaagtcctctcaggccagccttggtgggaggtttctaggattcgctccctgcccttcccatcttagggtgtcgtctgagacagactcttattccctcaataaagagagagactcttattccctcagcggccagctcctcgcctcccctcggccgtagccacctcagtggtcaccgtcttcaccgtggtcgcctcagcccgctcgccaccccagttgaggcgctgctggtgtcatgtctgccacaggggaccgacacccgacccaaggggaccaggaggccccggtaagccaggagggagcacaggccgaggcggccggagctggtaaccaggagggcggcgactccggccccgacagcagcgacgtggtgcctgcggccgaggtggtcggagtcgcagggcccgtggaaggcctcggggaggaggagggtgagcaggcggcaggcctggccgcagtcccccggggcgggagcgccgaggaggactcagatatcgggcccgcgacggaggaagaggaggaggaagaggggaacgaggcggccaacttcgacttggcggtggtcgcccgtcgctacccggcgtcgggcattcacttcgtgctcctggacatggtccactcccttctccaccgcctctctcacaacgaccacatcctcatagagaaccgtcaactcagccgcctgatggtggggccacacgctgctgcgcgcaacccctggggcaacctccccccgctgctgctgccccagaggctgggtgcaggggccgcagcccgggcgggcgagggcctgggcctgatccaggaggccgcatcggtcccagagcctgcagtgccagctgacctggccgagatggccagggagcccgcggaggaggccgcagaggagaagctctcagaggaggccacagaggaaccagacgcagaggaaccggccacagaagaaccgaccgcacaggaggccacggccccagaggaagtcactaaatctcagcccgaaaagtgggatgaagaggcccaagatgctgcaggcgaggaagagaaagaacaagaaaaagagaaggatgcggaaaacaaggtgaagaactccaaagggacctagacgcagcagaggtgaagccaagaaaatccagatgcctgtgggaattgtaacacatatcattccaaagttcgttacatcaaaagtgatatccagtgacatctaactttcatggatgtatgtgacagtgttcaagttaaaaaataaaagtttgttttaaatgaaaaaaaaaaaaaa

SEQ ID NO: 2304 - protein, 288 aa, Homo sapiens [sequence omitted]

SEQ ID NO: 2305 - DNA, 1288 bp, Homo sapiens
gccaaccagaatctttcccaacttgtctaagtcctctcaggccagccttggtgggaggtttctaggattcgctccctgcccttcccatcttagggtgtcgtctgagacagactcttattccctcaataaagagagagactcttattccctcagcggccagctcctcgcctcccctcggccgtagccacctcagtggtcaccgtcttcaccgtggtcgcctcagcccgctcgccaccccagttgaggcgctgctggtgtcatgtctgccacaggggaccgacacccgacccaaggggaccaggaggccccggtaagccaggagggagcacaggccgaggcggccggagctggtaaccaggagggcggcgactccggccccgacagcagcgacgtggtgcctgcggccgaggtggtcggagtcgcagggcccgtggaaggcctcggggaggaggagggtgagcaggcggcaggcctggccgcagtcccccggggcgggagcgccgaggaggactcagatatcgggcccgcgacggaggaagaggaggaggaagaggggaacgaggcggccaacttcgacttggcggtggtcgcccgtcgctacccggcgtcgggcattcacttcgtgctcctggacatggtccactcccttctccaccgcctctctcacaacgaccacatcctcatagagaaccgtcaactcagccgcctgatggtggggccacacgctgctgcgcgcaacctctggggcaacctccccccgctgctgctgccccagaggctgggtgcaggggccgcagcccgggcgggcgagggcctgggcctgatccaggaggccgcatcggtcccagagcctgcagtgccagctgacctggccgagatggccagggagcccgcggaggaggccgcagaggagaagctctcagaggaggccacagaggaaccagacgcagaggaaccggccacagaagaaccgaccgcacaggaggccacggccccagaggaagtcactaaatctcagcccgaaaagtgggatgaagaggcccaagatgctgcaggcgaggaagagaaagaacaagaaaaagagaaggatgcggaaaacaaggtgaagaactccaaagggacctagacgcagcagaggtgaagccaagaaaatccagatgcctgtgggaattgtaacacatatcattccaaagttcgttacatcaaaagtgatatccagtgacatctaactttcatggatgtatgtgacagtgttcaagttaaaaaataaaagtttgttttaaatgaa

SEQ ID NO: 2306 - protein, 288 aa, Homo sapiens
MSATGDRHPTQGDQEAPVSQEGAQAEAAGAGNQEGGDSGPDSSDVVPAAEVVGVAGPVEGLGEEEGEQAAGLAAVPRGGSAEEDSDIGPATEEEEEEEGNEAANFDLAVVARRYPASGIHFVLLDMVHSLLHRLSHNDHILIENRQLSRLMVGPHAAARNLWGNLPPLLLPQRLGAGAAARAGEGLGLIQEAASVPEPAVPADLAEMAREPAEEAAEEKLSEEATEEPDAEEPATEEPTAQEATAPEEVTKSQPEKWDEEAQDAAGEEEKEQEKEKDAENKVKNSKGT

SEQ ID NO: 2307 - DNA, 1288 bp, Homo sapiens; identical to SEQ ID NO: 2305

SEQ ID NO: 2308 - protein, 288 aa, Homo sapiens; identical to SEQ ID NO: 2306

SEQ ID NO: 2309 - DNA, 1288 bp, Homo sapiens; identical to SEQ ID NO: 2305

SEQ ID NO: 2310 - protein, 288 aa, Homo sapiens; identical to SEQ ID NO: 2306

SEQ ID NO: 2311 - DNA, 1288 bp, Homo sapiens
gccaaccagaatctttcccgccttatctaagtcctctcaggccagacttggtgggaggttcctaggattcgctccctgcccttcccaccttagggtgtcctctgagacagactcttatttcctcaataaagagaaagactcttattccctcagcggccagctcctcgcctcccctcggccgtagccacctcagtggtcaccgtcttcaccgtggtcgcctcagcccgctcgccaccccagttgaggcgctgctggtgtcatgtctgccacaggggaccgacacccgacccaaggggaccaggaggccccggtaagccaggagggagcacaggccgaggcggccggagctggtaaccaggagggcggcgactccggccccgacagcagcgacgtggtgcctgcggccgaggtggtcggagtcgcagggcccgtggaaggcctcggggaggaggagggtgagcaggcggcaggcctggccgcagtcccccggggcgggagcgccgaggaggactcagatatcgggcccgcgacggaggaagaggaggaggaagaggggaacgaggcggccaacttcgacttggcggtggtcgcccgtcgctacccggcgtcgggcattcacttcgtgctcctggacatggtccactcccttctccaccgcctctctcacaacgaccacatcctcatagagaaccgtcaactcagccgcctgatggtggggccacacgctgctgcgcgcaacctctggggcaacctccccccgctgctgctgccccagaggctgggtgcaggggccgcagcccgggcgggcgagggcctgggcctgatccaggaggccgcatcggtcccagagcctgcagtgccagctgacctggccgagatggccagggagcccgcggaggaggccgcagaggagaagctctcagaggaggccacagaggaaccagacgcagaggaaccggccacagaagaaccgaccgcacaggaggccacggccccagaggaagtcactaaatctcagcccgaaaagtgggatgaagaggcccaagatgctgcaggcgaggaagagaaagaacaagaaaaagagaaggatgcggaaaacaaggtgaagaactccaaagggacctagacgcagcagaggtgaagccaagaaaatccagatgcctgtgggaattgtaacacatatcattccaaagttcgttacatcaaaagtgatatccagtgacatctaactttcatggatgtatgtgacagtgttcaagttaaaaaataaaagtttgttttaaatgaa

SEQ ID NO: 2312 - protein, 288 aa, Homo sapiens; identical to SEQ ID NO: 2306

SEQ ID NO: 2313 - DNA, 1288 bp, Homo sapiens
gccaaccagaatctttcccaacttgtctaagtcctctcaggccagccttggtgggaggtttctaggattcgctccctgcccttcccatcttagggtgtcgtctgagacagactcttattccctcaataaagagagagactcttattccctcagcggccagctcctcgcctcccctcggccgtagccacctcagtggtcaccgtcttcaccgtggtcgcctcagcccgctcgccaccccagttgaggcgctgctggtgtcatgtctgccacaggggaccgacacccgacccaaggggaccaggaggccccggtaagccaggagggagcacaggccgaggcggccggagctggtaaccaggagggcggcgactccggccccgacagcagcgacgtggtgcctgcggccgaggtggtcggagtcgcagggcccgtggaaggcctcggggaggaggagggtgagcaggcggcaggcctggccgcagtcccccggggcgggagcgccgaggaggactcagatatcgggcccgcgacggaggaagaggaggaggaagaggggaacgaggcggccaacttcgacttggcggtggtcgcccgtcgctacccggcgtcgggcattcacttcgtgctcctggacatggtccactcccttctccaccgcctctctcacaacgaccacatcctcatagagaaccgtcaactcagccgcctgatggtggggccacacgctgctgcgcgcaacctctggggcaacctccccccgctgctgctgccccagaggctgggtgcaggggccgcagcccgggcgggcgagggcctgggcctgatccaggaggccgcatcggtcccagagcctgcagtgccagctgacctggccgagatggccagggagcccgcggaggaggccgcagaggagaagctctcagaggaggccacagaggaaccagacgcagaggaaccagccacagaagaaccgaccgcacaggaggccacggccccagaggaagtcactaaatctcagcccgaaaagtgggatgaagaggcccaagatgctgcaggcgaggaagagaaagaacaagaaaaagagaaggatgcagaaaacaaggtgaagaactccaaagggacctagacgcagcagaggtgaagccaagaaaatccagatgcctgtgggaattgtaacacatatcattccaaagttcgttacatcaaaagtgatatccagtgacatctaactttcatggatgtatgtgacagtgttcaagttaaaaaataaaagtttgttttaaatgaa

SEQ ID NO: 2314 - protein, 288 aa, Homo sapiens; identical to SEQ ID NO: 2306

SEQ ID NO: 2315 - DNA, 1288 bp, Homo sapiens; identical to SEQ ID NO: 2305

SEQ ID NO: 2316 - protein, 288 aa, Homo sapiens; identical to SEQ ID NO: 2306

SEQ ID NO: 2317 - DNA, 1288 bp, Homo sapiens; identical to SEQ ID NO: 2305

SEQ ID NO: 2318 - protein, 288 aa, Homo sapiens; identical to SEQ ID NO: 2306

SEQ ID NO: 2319 - DNA, 1288 bp, Homo sapiens; identical to SEQ ID NO: 2305

SEQ ID NO: 2320 - protein, 288 aa, Homo sapiens; identical to SEQ ID NO: 2306

SEQ ID NO: 2321 - DNA, 1288 bp, Homo sapiens; identical to SEQ ID NO: 2305

SEQ ID NO: 2322 - protein, 288 aa, Homo sapiens; identical to SEQ ID NO: 2306

SEQ ID NO: 2323 - DNA, 1288 bp, Homo sapiens
gccaaccagaatctttcccaacttgtctaagtcctctcaggccagccttggtgggaggtttctaggattcgctccctgcccttcccatcttagggtgtcgtctgagacagactcttattccctcaataaagagagagactcttattccctcagcggccagctcctcgcctcccctcggccgtagccacctcagtggtcaccgtcttcaccgtggtcgcctcagcccgctcgccaccccagttgaggcgctgctggtgtcatgtctgccacaggggaccgacacccgacccaaggggaccaggaggccccggtaagccaggagggagcacaggccgaggcggccggagctggtaaccaggagggcggcgactccggccccgacagcagcgacgtggtgcctgcggccgaggtggtcggagtcgcagggcccgtggaaggcctcggggaggaggagggtgagcaggcggcaggcctggccgcagtcccccggggcgggagcgccgaggaggactcagatatcgggcccgcgacggaggaagaggaggaggaagaggggaacgaggcggccaacttcgacttggcggtggtcgcccgtcgctacccggcgtcgggcattcacttcgtgctcctggacatggtccactcccttctccaccgcctctctcacaacgaccacatcctcatagagaaccgtcaactcagccgcctgatggtggggccacacgctgctgcgcgcaacctctggggcaacctccccccgctgctgctgccccagaggctgggtgcaggggccgcagcccgggcgggcgagggcctgggcctgatccaggaggccgcatcggtcccagagcctgcagtgccagctgacctggccgagatggccagggagcccgcggaggaggccgcagaggagaagctctcagaggaggccacagaggaaccagacgcagaggaaccggccacagaagaaccgaccgcacaggaggccacggccccagaggaagtcactaaatctcagcccgaaaagtgggatgaagaggcccaagatgctgcaggcgaggaagagaaagaacaagaaaaagagaaggatgcagaaaacaaggtgaagaactccaaagggacctagacgcagcagaggtgaagccaagaaaatccagatgcctgtgggaattgtaacacatatcattccaaagttcgttacatcaaaagtgatatccagtgacatctaactttcatggatgtatgtgacagtgttcaagttaaaaaataaaagtttgttttaaatgaa

SEQ ID NO: 2324 - protein, 288 aa, Homo sapiens; identical to SEQ ID NO: 2306

SEQ ID NO: 2325 - DNA, 2348 bp, Homo sapiens
ttccttcctagtcgcggggagtctgagaaagcgcacctgttccgcgaccgtcacgcacccctcctccgcctgccgcgatgtaccgctacctggccaaagcgctgctgccgtcccgggccgggcccgctgccctgggctccgcggccaaccactcggccgcgttgctgggccggggccgcggacagcccgccgccgcctcgcagccggggctcgcattggccgcccggcgccactacagcgagttggtggccgaccgcgaggacgaccccaacttcttcaagatggtggagggcttcttcgatcgcggcgccagcatcgtggaggacaagttggtgaaggacctgaggacccaggaaagcgaggagcagaagcggaaccgggtgcgcggcatcctgcggatcatcaagccctgcaaccatgtgctgagtctctccttccccatccggcgcgacgacggctcctgggaggtcatcgaaggctaccgggcccagcacagccagcaccgcacgccctgcaagggaggtatccgttacagcactgatgtgagtgtagatgaagtaaaagctttggcttctctgatgacatacaagtgtgcagtggttgatgtgccgtttgggggtgctaaagctggtgttaagatcaatcccaagaactataccgaaaatgaattggaaaagatcacaaggaggttcaccatggagctagcaaagaagggctttattggtcctggcgttgatgtgcctgctccagacatgaacacaggtgagcgggagatgtcctggattgctgatacctatgccagcaccatagggcactatgatattaatgcacacgcctgtgttactggtaaacccatcagccaagggggaatccatggacgcatctctgctactggccgtggtgtcttccatgggattgaaaacttcatcaatgaagcttcttacatgagcattttaggaatgacaccagggtttagagataaaacatttgttgttcagggatttggtaatgtgggcctacactctatgagatatttacatcgttttggtgctaaatgtattgctgttggtgagtctgatgggagtatatggaatccagatggtattgacccaaaggaactggaagacttcaaattgcaacatgggtccattctgggcttccccaaggcaaagccctatgaaggaagcatcttggaggtcgactgtgacatactgatcccagctgccactgagaagcagttgaccaaatccaacgcacccagagtcaaagccaagatcattgctgaaggtgccaatgggccaacaactccagaagctgataagatcttcctggagagaaacattttggttattccagatctctacttgaatgctggaggagtgacagtatcttactttgagtggctgaagaatctaaatcatgtcagctatggccgtttgaccttcaaatatgaaagggattctaactaccacttgctcctgtctgttcaagagagtttagaaagaaaatttggaaagcatggtggaactattcccattgtacccacggcagagttccaagacagtatatcgggtgcatctgagaaagacattgtgcactctgccttggcatacacaatggagcgttctgccaggcaaattatgcacacagccatgaagtataacctgggattggacctgagaacagctgcctatgtcaatgccattgaaaaagtcttcaaagtgtacagtgaagctggtgtgaccttcacatagatggatcatggctgacttcctcactaacctcttcacgtgtaacttctgcagacctaccacaagtttacatgtaaccacagaaatccctttctctcctgactcattactaatggataccattctcaacaagtcaatccaaatcagcccgttaaggagaaagaaattaatatacaagctgagtgtgaaagtagaaatcacctacaccagagagctattttggtattttgcctttaaataaaaagcctcctccatatggctgtgcagccttgctctgtggcttttcccagcacaatcagtgctagtgctggggaagggacagtcaagagcagtcagttgcttacttattttgctctggatgagtctgggacacgctgtaactttaacacatttaagaagaaggtgtgtggccttttcagaaggtggcatggtcctcaagtgagttcttagtattttatatcagcaaaataactcaattttgcagattgcaaacaaatataaaagctgtttctgtttatgaattttattcttttagaatagaataagtacatgctgctgtaataaaattgcctttaatcacttaaaaaaaaaaaaaaa

SEQ ID NO: 2326 - protein, 558 aa, Homo sapiens
MYRYLAKALLPSRAGPAALGSAANHSAALLGRGRGQPAAASQPGLALAARRHYSELVADREDDPNFFKMVEGFFDRGASIVEDKLVKDLRTQESEEQKRNRVRGILRIIKPCNHVLSLSFPIRRDDGSWEVIEGYRAQHSQHRTPCKGGIRYSTDVSVDEVKALASLMTYKCAVVDVPFGGAKAGVKINPKNYTENELEKITRRFTMELAKKGFIGPGVDVPAPDMNTGEREMSWIADTYASTIGHYDINAHACVTGKPISQGGIHGRISATGRGVFHGIENFINEASYMSILGMTPGFRDKTFVVQGFGNVGLHSMRYLHRFGAKCIAVGESDGSIWNPDGIDPKELEDFKLQHGSILGFPKAKPYEGSILEVDCDILIPAATEKQLTKSNAPRVKAKIIAEGANGPTTPEADKIFLERNILVIPDLYLNAGGVTVSYFEWLKNLNHVSYGRLTFKYERDSNYHLLLSVQESLERKFGKHGGTIPIVPTAEFQDSISGASEKDIVHSALAYTMERSARQIMHTAMKYNLGLDLRTAAYVNAIEKVFKVYSEAGVTFT

SEQ ID NO: 2327 - DNA, 567 bp, Homo sapiens
atggagcaattgcgcagacagccggcccgaactgccccgcggcgatcggctcggtccaaggggagggtcccggaggaggcgcggcccgagccccaatctggaaatgccaactccgctctgcggcttggccccagcctaggtgaaggaaacggaagtcccttcgtctccctcacgcgcctctaccggccggcccatcccctggagaaacccggagtcgtgaaacccgaagtgtgtccacgtcagggcctcaaagagacaccgggcgcggtccgtcagtctcccagcccgggctgcgccactgggccccggcgtgtccctcccacccccggccgggaggtcagcctcctgccctgcaaagcccctccttcttcccccctccgccatttttcaacttaccacttgggccgggcgtccctcgatgagcgccacgccggctccgggcgccgccaaggtcccgccacctccccgaaccggatgggggcagtaagaaaaaatgaggcccttgcaacccctacccccacccccacccgacccccccgcccggctggaaccgagaagctgacctag

SEQ ID NO: 2328 - protein, 188 aa, Homo sapiens
MEQLRRQPARTAPRRSARSKGRVPEEARPEPQSGNANSALRLGPSLGEGNGSPFVSLTRLYRPAHPLEKPGVVKPEVCPRQGLKETPGAVRQSPSPGCATGPRRVPPTPGREVSLLPCKAPPSSPLRHFSTYHLGRASLDERHAGSGRRQGPATSPNRMGAVRKNEALATPTPTPTRPPRPAGTEKLT

SEQ ID NO: 2329 - DNA, 8413 bp, Homo sapiens
tttccagattggggctcgggccgcgcctcctccgggaccctccccttggaccgagccgatcgccgcggggcagttcgggccggctgtcctggcgcgaaaaggtggacaagtcctattttcaagagaagatgacttttaacagttttgaaggatctaaaacttgtgtacctgcagacatcaataaggaagaagaatttgtagaagagtttaatagattaaaaacttttgctaattttccaagtggtagtcctgtttcagcatcaacactggcacgagcagggtttctttatactggtgaaggagataccgtgcggtgctttagttgtcatgcagctgtagatagatggcaatatggagactcagcagttggaagacacaggaaagtatccccaaattgcagatttatcaacggcttttatcttgaaaatagtgccacgcagtctacaaattctggtatccagaatggtcagtacaaagttgaaaactatctgggaagcagagatcattttgccttagacaggccatctgagacacatgcagactatcttttgagaactgggcaggttgtagatatatcagacaccatatacccgaggaaccctgccatgtatagtgaagaagctagattaaagtcctttcagaactggccagactatgctcacctaaccccaagagagttagcaagtgctggactctactacacaggtattggtgaccaagtgcagtgcttttgttgtggtggaaaactgaaaaattgggaaccttgtgatcgtgcctggtcagaacacaggcgacactttcctaattgcttctttgttttgggccggaatcttaatattcgaagtgaatctgatgctgtgagttctgataggaatttcccaaattcaacaaatcttccaagaaatccatccatggcagattatgaagcacggatctttacttttgggacatggatatactcagttaacaaggagcagcttgcaagagctggattttatgctttaggtgaaggtgataaagtaaagtgctttcactgtggaggagggctaactgattggaagcccagtgaagacccttgggaacaacatgctaaatggtatccagggtgcaaatatctgttagaacagaagggacaagaatatataaacaatattcatttaactcattcacttgaggagtgtctggtaagaactactgagaaaacaccatcactaactagaagaattgatgataccatcttccaaaatcctatggtacaagaagctatacgaatggggttcagtttcaaggacattaagaaaataatggaggaaaaaattcagatatctgggagcaactataaatcacttgaggttctggttgcagatctagtgaatgctcagaaagacagtatgcaagatgagtcaagtcagacttcattacagaaagagattagtactgaagagcagctaaggcgcctgcaagaggagaagctttgcaaaatctgtatggatagaaatattgctatcgtttttgttccttgtggacatctagtcacttgtaaacaatgtgctgaagcagttgacaagtgtcccatgtgctacacagtcattactttcaagcaaaaaatttttatgtcttaatctaactctatagtaggcatgttatgttgttcttattaccctgattgaatgtgtgatgtgaactgactttaagtaatcaggattgaattccattagcatttgctaccaagtaggaaaaaaaatgtacatggcagtgttttagttggcaatataatctttgaatttcttgatttttcagggtattagctgtattatccattttttttactgttatttaattgaaaccatagactaagaataagaagcatcatactataactgaacacaatgtgtattcatagtatactgatttaatttctaagtgtaagtgaattaatcatctggattttttattcttttcagataggcttaacaaatggagctttctgtatataaatgtggagattagagttaatctccccaatcacataatttgttttgtgtgaaaaaggaataaattgttccatgctggtggaaagatagagattgtttttagaggttggttgttgtgttttaggattctgtccattttcttttaaagttataaacacgtacttgtgcgaattatttttttaaagtgatttgccatttttgaaagcgtatttaatgatagaatactatcgagccaacatgtactgacatggaaagatgtcaaagatatgttaagtgtaaaatgcaagtggcaaaacactatgtatagtctgagccagatcaaagtatgtatgtttttaatatgcatagaacaaaagatttggaaagatatacaccaaactgttaaatgtggtttctcttcggggagggggggattgggggaggggccccagaggggttttataggggccttttcactttctacttttttcattttgttctgttcgaattttttataagtatgtattacttttgtaatcagaatttttagaaagtattttgctgatttaaaggcttaggcatgttcaaacgcctgcaaaactacttatcactcagctttagtttttctaatccaagaaggcagggcagttaacctttttggtgccaatgtgaaatgtaaatgattttatgtttttcctgctttgtggatgaaaaatatttctgagtggtagttttttgacaggtagaccatgtcttatcttgtttcaaaataagtatttctgattttgtaaaatgaaatataaaatatgtctcagatcttccaattaattagtaaggattcatccttaatccttgctagtttaagcctgcctaagtcactttactaaaagatctttgttaactcagtattttaaacatctgtcagcttatgtaggtaaaagtagaagcatgtttgtacactgcttgtagttatagtgacagctttccatgttgagattctcatatcatcttgtatcttaaagtttcatgtgagtttttaccgttaggatgattaagatgtatataggacaaaatgttaagtctttcctctacctacatttgttttcttggctagtaatagtagtagatacttctgaaataaatgttctctcaagatccttaaaacctcttggaaattataaaaatattggcaagaaaagaagaatagttgtttaaatattttttaaaaaacacttgaataagaatcagtagggtataaactagaagtttaaaaatgcttcatagaacgtccagggtttacattacaagattctcacaacaaacctattgtagaggtgagtaaggcatgttactacagaggaaagtttgagagtaaaactgtaaaaaattatatttttgttgtactttctaagagaaagagtattgttatgttctcctaacttctgttgattactactttaagtgatattcatttaaaacattgcaaatttattttatttatttaattttctttttgagatggagtcttgcttgtcacccaggctggagtgcagtggagtgatctctgctcactgcaacctccgccttctgggttcaagcgattctcgtgcctcagcttcctgagtagctggaattacaggcaggtgccaccatgcccgactaatttttttttatttttagtagagacggggtttcaccatgttggccaggctggtatcaaactcctgacctcaagagatccactcgccttgccctcccaaagtgctgggattacaggcttgagccaccacgcccggctaaaacattgcaaatttaaatgagagttttaaaaattaaataatgactgccctgtttctgttttagtatgtaaatcctcagttcttcacctttgcactgtctgccacttagtttggttatatagtcattaacttgaatttggtctgtatagtctagactttaaatttaaagttttctacaaggggagaaaagtgttaaaatttttaaaatatgttttccaggacacttcacttccaagtcaggtaggtagttcaatctagttgttagccaaggactcaaggactgaattgttttaacataaggcttttcctgttctgggagccgcacttcattaaaattcttctaaaacttgtatgtttagagttaagcaagactttttttcttcctctccatgagttgtgaaatttaatgcacaacgctgatgtggctaacaagtttattttaagaattgtttagaaatgctgttgcttcaggttcttaaaatcactcagcactccaacttctaatcaaatttttggagacttaacagcatttgtctgtgtttgaactataaaaagcaccggatcttttccatctaattccgcaaaaattgatcatttgcaaagtcaaaactatagccatatccaaatcttttccccctcccaagagttctcagtgtctacatgtagactattccttttctgtataaagttcactctaggatttcaagtcaccacttattttacattttagtcatgcaaagattcaagtagttttgcaataagtacttatctttatttgtaataatttagtctgctgatcaaaagcattgtcttaatttttgagaactggttttagcatttacaaactaaattccagttaattaattaatagctttatattgcctttcctgctacatttggttttttcccctgtccctttgattacgggctaaggtagggtagagtgggtgtagtgagtgtatataatgtgatttggccctgtgtattatgatattttgttatttttgttgttatattatttacatttcagtagttgttttttgtgtttccattttagtggataaaatttgtattttgaactatgaatggagactaccgccccagcattagtttcacatgatataccctttaaacccgaatcattgttttatttcctgattacacaggtgttgaatggggaaaggggctagtatatcagtaggatatactatgggatgtatatatatcattgctgttagagaaatgaaataaaatggggctgggctcagtggctcacgcctgtaatcccagcactttgggaggctgaggcaggtggatcacgaggtcaggagatcgagaccatcctggctaacacggtgaaaccccgtctctactaaaaaacagaaaattagccgggcgtggtggcgggcgcctgtagtcccagctactcgggaggctgaggcaggagaatggtgtgaacccgggaggcagagcttgcagtgagccgagatctcgccactgcactccagcctgggcaacagagcaagactctgtctcaaaaaaaaaaaaaaaagaaataagaaaatgggaagcaatatttgacatagttctttttagtcaaatctacttgttaaaaaaagggtagcagtttattcatctgtgaaaggaaaataatacttatcttacaaggttgcaagagctcaaggagaccatgtatgtaaagttcctgctgtaaatatgaactcccatcctaatacccttttacctctctgtgggtttgtcttgacctggaaatttgggctaaaacttagaaaaaattcttacatgataactcagtgatgcttactcatagtttttggtgtttctcatagataagatataaatcagctgggcgcggtggctcatgcctgtaatcccagcactttgggaggccgaggcgggcagatcacctgaggtcgggaggtcgagaccagcctgaccaacatggagaaaccccgtctctactaaaaatacaaaattagctgggcgtggtggctcatgcctgtaatcccagctacttgggaggctgaggcaggagaatcgcttgaacccaggaggcggaggttgtggtgagcgaagatcgtgccattgcactccagcctgggcaacaagagcaaaactctgtctcaaaaaaaaaaaaagatataaatcacaataaataaataggtcaatacaaatgttagccaggcgtggtggcacatgcccatagtcgcagctactctggaggcagaggcaggaggatcacttgagcccatgaatttgaggcagcagtgagctatgattgtgccactgtactccagtctgggtgacagagtgagaccccatctctaaataaataggtcaaacccttaaaaatatttaaattcttaaaaaattgaaaagattattcttctcaaatttagttgagctttctaagagaagcaattggctttttcccacttcaataatcattttcagtttgactcatacagttaacacaatgtgaatttcttcctcagcataacagagttatagaatgacagggctggaagtgaccttagagagtatccagttctttcattttacaggtgaggcaactgagactcaaaggtgatgtaatttgtgcaaagattatagctaattagtagcagagccctgactgggacatagtttgaaggtgaaaaacttcaccaagctacctttcttgaaaggtccaaatgtttatgttttcaactactctttccactgtaccataactttcactacatattaaatgacactttataactaatataataggacaatcatcaatgcatatatagccagcccttcatatctgtgggttttgcatccatggattcaaccaaggaggaattgaaaacactgagaaaaaaaaaaaagaccacacaataaaaaaaaaaaatacaaaataatacaaagaaaaagccaaaattgtcatactgttgttaagcaacagtataacaactatttacatagcattaaggttggtgcaaaaatgcaaaaaaaaaaaaagcaattatttttaaaccaacctaatatattgtattaggtattaaagtcatctggacatgaattaaagtatatgatgccagcctggacaaaaggcaaaaccctgtctctacaaaaaatacaaaaattagctgggcatggtggtgtgtgcctgtagtcctggctactccggagcctgaggtgggaggatcgcttgagtctgggaggcagaggctgcattgagctatgatcatggcactgcattccagcctgggtgacagtgcaagaccttgtctcagaataaataaagtatgtgatgaagatgtgcatacattatatgcaaatactgttttttttttttttaatttaaacagtctcactgtgttgcccaggatggagtgcaatggcacaatcttggctcatggcaaactctgcctcgcaagcagctgggactacaggcatgctccacggtgcccagttaattttttttgtattcttagtagagacagggtttcaccatgttggccaggctagtcttgaatttctgacctcaagtgattcatctcccaaagtgctgggattacaggcgtgagccaccacggccggctaatttttgtattttttagtagtgactggtttcgcggtgttgaccaggctggtctcgaactcctgatctcaggtgatctgcctgcctcggcctcacaaagtgctgggattacaggtgtgaaccactgctcccggccttgtgtgattttatctaagggacttaagcgtcctcaggtcctagggggtcgtgaaaccaaaaccccagggatagcaagggacaattgtatcttcaaagtagacaaatggcgccgggcacggtggctcacgcctgtaatcccagcagtttccgaggctgaggcaggcggctcacctgaggtcaggagttggagaccagcctggccaacatgctgaaaccctgtctgtacaaaaatacaaaaatagctgggcatggtggcgcatgcctgtagtcccagctactagagcgactgaggcaggagaattgcttgaacctgggaggcggaggttgcagggagccaagatggcgccaccgcactccagcctaggtgatagagtgagactccctctcaaaaacaaaacaaaacaaaaaaattagacaaatgctacattaatgtttgggtggtcagattctactttgaatctgaagtttgcagatatgcctatagatttttggagtttaccactttcttattctgtatcattaatgtaatattttaaattactatatatgttaccatttttctggatttagtaagaaatttgcagttttggtttgatgtaacaagggttttaatgtaatttatgttagattttgcatttttttcattactgttatattttaacctgactgactgatctaattgtattagtattgtgaataatcatgtgaaatgttttgagacagagtactatatttgtgaatataattttatggtttttttcacttagaacctttctgtgtggaaaactaagaaaattgctttctgctgtataatctggcattcattgtagattaaagcttatttttctgtgaataaaacgtattcaataaaatactattctttaaaatta

SEQ ID NO: 2330 - protein, 497 aa, Homo sapiens
MTFNSFEGSKTCVPADINKEEEFVEEFNRLKTFANFPSGSPVSASTLARAGFLYTGEGDTVRCFSCHAAVDRWQYGDSAVGRHRKVSPNCRFINGFYLENSATQSTNSGIQNGQYKVENYLGSRDHFALDRPSETHADYLLRTGQVVDISDTIYPRNPAMYSEEARLKSFQNWPDYAHLTPRELASAGLYYTGIGDQVQCFCCGGKLKNWEPCDRAWSEHRRHFPNCFFVLGRNLNIRSESDAVSSDRNFPNSTNLPRNPSMADYEARIFTFGTWIYSVNKEQLARAGFYALGEGDKVKCFHCGGGLTDWKPSEDPWEQHAKWYPGCKYLLEQKGQEYINNIHLTHSLEECLVRTTEKTPSLTRRIDDTIFQNPMVQEAIRMGFSFKDIKKIMEEKIQISGSNYKSLEVLVADLVNAQKDSMQDESSQTSLQKEISTEEQLRRLQEEKLCKICMDRNIAIVFVPCGHLVTCKQCAEAVDKCPMCYTVITFKQKIFMS

SEQ ID NO: 2331 - DNA, 10805 bp, Homo sapiens
gactgcttgcattaaaggacttcctcatcctttttttcatgaaactgagcttgcttaatcagagatggagcaaactgactgcaaaccctaccagcctctaccaaaagtcaagcatgaaatggatctagcttacaccagttcttctgatgagagtgaagatggaagaaaaccaagacagtcatacaactccagggagaccctgcacgagtataaccaggagctgaggatgaattacaatagccagagtagaaagaggaaagaagtagaaaaatctactcaagagatggaattctgtgaaacctctcacactctgtgctctggctaccaaacagacatgcacagcgtttctcggcatggctaccagctagagatgggatctgatgtggacacagagacagaaggtgctgcctcacctgaccatgcactaagaatgtggataaggggaatgaaatcagagcatagttcctgtttgtccagccgggccaactctgcattatccttgactgacactgaccatgaaaggaagtctgatggggaaaatggtttcaaattctctcctgtttgttgtgacatggaggctcaagctgggtctactcaagatgtgcagagcagcccacacaaccagttcaccttcagacccctcccaccgccacctccgcctcctcatgcctgcacctgtgccaggaagccaccccctgcagcggactctcttcagaggagatcaatgactacccgcagccagcccagcccagctgctccagctcccccaaccagcacgcaggattcagtccatctgcataacagctgggtcctgaacagcaacataccattggagaccaggcatttcctgttcaaacatggatctggttcctctgcgatcttcagtgcagccagtcagaactaccctctgacatccaataccgtgtactcgccccctcccaggcctcttcctcgaagcaccttttcccgacctgcctttacctttaacaaaccttacaggtgctgcaactggaagtgcacagcattgagcgccactgcaatcacagtgactttggccttgttactagcctatgtgattgcagtgcatttgttcggcctgacttggcagttgcaaccagttgaaggagagctgtatgcaaatggagttagcaaagggaacagggggaccgagtccatggacactacttactctccaattggaggaaaagtttctgataaatcagagaaaaaagtgtttcagaagggacgggcgatagacactggagaagttgacattggtgcacaggtcatgcagaccattccacctggtttattctggcgtttccagattactatccaccatccaatatatctgaagttcaatatttctttagccaaggactctctgctgggaatttatggcagaagaaacattccacctacacatactcagtttgattttgtaaaactaatggatggcaaacagctggtcaagcaggactccaagggctctgatgatacacagcactcccctcggaacctgatcttaacttcgcttcaggagacaggtttcatagagtatatggatcaaggaccttggtatctggcgttttacaatgatggaaaaaagatggagcaagtattcgtgttaactacagcaattgaaataatggatgactgttcaaccaattgcaatggaaatggagagtgtatctctggccattgtcattgtttcccaggattccttggacctgactgtgctagagattcctgccctgtgctgtgtggtgggaatggagaatacgagaaaggacactgtgtctgccggcatggctggaaggggccagagtgtgacgttccggaagaacaatgcattgatccaacatgctttggccacggcacctgcatcatgggagtctgcatctgtgtgccaggatacaaaggagaaatatgcgaggaagaggactgcctagacccaatgtgttccaaccatggcatctgtgtaaaaggagaatgtcactgttctactggctggggaggagttaactgtgaaacaccacttcctgtatgtcaagagcagtgctcaggacacggaacttttcttctggacgctggagtatgcagctgtgatcccaagtggacaggatctgactgctcaacagagctgtgtaccatggagtgtggtagccatggagtctgctcaagaggaatttgccagtgtgaagaaggctgggtaggaccaacatgtgaggaacgctcctgtcattctcattgtactgagcatggccaatgcaaagatggaaaatgtgagtgtagccctggatgggagggcgaccactgcacaattgctcactacttagatgctgtccgagatggctgcccagggctctgctttggaaatggacgatgtaccctggatcaaaatggttggcactgtgtgtgtcaggtgggttggagtgggacaggctgcaatgttgtcatggaaatgctttgtggagataacttggacaatgatggagatggtttaaccgactgtgtggatcctgactgttgtcaacaaagcaactgttatataagtcctctctgccagggctcaccagatcctcttgacctcattcagcaaagccaaactctcttctctcagcacacttcaagacttttttatgatcgaatcaaattcctcattggcaaggacagtactcatgtcattcctcctgaggtgtcatttgacagcaggcgtgcctgtgtgattcgaggccaagtggtggccatagatggaactcctctagtgggagtgaatgtcagtttcttgcaccacagtgattatgggtttaccatcagccggcaagatggaagctttgacctcgtggccatcggtggcatctctgtcatcttaatcttcgaccgatcccctttcctgcctgagaagagaacactctggttgccttggaatcagtttattgtggtagagaaagtcaccatgcagagagttgtatcagacccgccatcctgcgatatctccaactttatcagcccaaaccctattgtgcttccttcaccgctcacatcatttggagggtcctgtccagagaggggaactattgttcctgagctgcaggttgtacaggaggaaattcccattccctccagctttgtgaggctgagttacctgagcagccgcacccctgggtataaaaccctgctacggatccttctgacacattcaacgattcctgtaggcatgataaaagtacacctcacagtagctgtggaagggcgactcacacagaagtggtttcccgccgcaattaatcttgtctacacatttgcttggaacaagaccgacatctatggacagaaggtttggggcctggcagaggctttggtatctgtgggatatgaatatgaaacgtgccctgactttattctctgggagcaaaggacagtcgttttacaaggttttgagatggatgcttctaacctaggaggctggtctttgaataagcatcacattttgaatcctcaaagtggaatcatacataaagggaatggagaaaatatgttcatttcccagcagcccccagtcatatcaaccataatgggtaatggacaccaaaggagtgtagcctgcaccaactgcaatggcccagcccacaacaacaaactctttgctcctgtcgccttagcttctggccctgatggcagtgtgtatgttggcgacttcaattttgtaaggagaatatttccctcgggaaactccgttagtattttggaattaagcacaagtcctgctcacaaatactatctggctatggaccctgtgtctgaatcactctatctatcagacaccaatactcgcaaagtctacaagttgaaatctcttgtggagacgaaagatctgtccaagaattttgaagtggtggcaggaactggtgatcagtgccttccctttgaccagagtcattgtggagatggtgggagagcatcggaagcttcactgaatagccctcgaggcatcacagttgataggcatggatttatttactttgtggatgggactatgattcgcaaaattgatgagaatgctgtgatcacaactgtaatcggctcaaatggtctgacttccacacaaccactgagctgtgactcaggaatggacatcactcaggtgcgattagagtggccaacagaccttgcagtaaatcctatggacaattcattgtatgtcttggataacaacattgtgctgcaaatttctgagaacaggcgtgttcggatcatcgcaggacgccccattcactgccaggtgccaggcatcgatcatttcctggtcagcaaggtagcaattcactccactctagagtcagcgagggccatcagtgtctcccacagcgggctgctcttcatagctgaaacagacgagaggaaagtaaaccgcattcagcaagtaaccaccaatggggagatctacatcatcgctggtgcccccactgactgtgactgcaaaattgatccaaactgtgactgtttttcaggtgatggtggctatgccaaagatgcaaagatgaaagccccttcctccttagcagtgtcgcctgatggaaccctctatgtggcagacctcggaaatgttcgaattcgtaccatcagcaggaaccaagcccacctgaatgacatgaacatttatgagattgcttcacccgctgatcaggaactgtaccagttcactgtaaatggaacccacctacacaccctgaacttgataacaagggactatgtttataacttcacctacaattctgaaggtgacttgggcgcgattaccagcagcaatggcaattcagtgcacattcgccgtgatgcaggcggaatgccgctatggcttgtggtgcctggcggacaagtatactggctgactataagcagcaatggagtcctgaaaagagtgtcagcccaaggctataatctggccttaatgacctatccaggaaacacagggcttctggctaccaaaagtaacgaaaatggatggacaaccgtttatgagtatgaccccgagggacacctgaccaatgcaacgtttcccactggagaggtcagcagcttccacagtgacctggagaagctgacaaaagtggagctagatacttccaaccgtgaaaatgtcctcatgtcaaccaacttgacggcaactagtaccatatatattttaaaacaagaaaatactcaaagtacctatcgggtgaatccagatggttccctgcgtgtcacttttgccagcgggatggagatcggcctcagctcagagccccacatcctggcaggggcagtcaaccctaccctgggcaaatgcaacatctcattgcccggagagcacaatgcaaacctcatcgagtggcggcagaggaaggagcaaaacaaaggcaatgtttcggcttttgaaaggaggctgagggcccacaacagaaacctactctccatagattttgatcatataacccgcacaggaaagatctatgatgaccatcgaaaattcacccttcgaattctttatgaccagactgggcgacccattctgtggtctcctgtaagcagatataatgaagtgaacatcacatattcaccttcgggattggtgacgtttattcaaagaggaacgtggaatgaaaaaatggaatatgaccagagtgggaaaattatttcaagaacttgggctgatgggaaaatttggagctatacctacttagaaaaatctgtgatgcttctcctacacagccagcggcgttacatctttgagtatgaccaaccagattgtctgctctcagtcaccatgcctagcatggtgcgtcacagcttacaaaccatgctttcagtgggctactaccggaacatctacaccccaccggacagtagcacttcttttatccaagactatagtcgagatggccgattgctacagaccctgcatctggggacagggcgcagagtcttatacaagtacaccaagcaagcaaggctttctgaggttctctatgataccactcaggtcacattaacatatgaagagtcttctggagtgattaagacaatacacctgatgcatgacggattcatctgcacaatcagatacaggcaaacaggacctcttattggacgccagattttcagattcagtgaagaaggccttgtgaatgcacggttcgactacagctacaacaatttccgagtcacaagcatgcaagctgtaatcaatgaaacccctttgcctatagatctttaccgatatgttgatgtctctggcagaacagagcagtttggaaaattcagtgtaattaattacgatttaaatcaggtcataactactacagtgatgaaacacaccaaaatcttcagtgccaatggacaagtcattgaagtccaatatgaaatcctaaaggcaattgcctactggatgaccattcaatatgataatgtgggccgcatggtaatatgtgacataagggtaggagtagatgccaatataacaaggtacttctatgaatacgatgctgatgggcaacttcagactgtttctgtaaatgacaaaacccagtggcgttatagttacgatctgaatggaaacatcaacctcttaagccatgggaagagtgctcgtcttactcctctccgatatgacctccgagaccgcatcaccagattaggagaaattcagtataaaatggatgaagatggctttctgaggcagaggggaaatgatatttttgaatataattctaatggcctgctgcagaaagcctacaataaggcttctggctggactgtgcagtattactatgatgggcttgggcgacgtgtcgcgagtaagtccagcctagggcagcaccttcagttcttttatgcagaccttaccaaccccataagagttactcatttgtacaaccacacaagctcggagattacatctctgtattatgatctccaaggtcaccttattgccatggagttaagcagtggtgaagaatattatgtagcctgtgataatacaggtaccccactagctgtgttcagcagccgaggtcaggtcataaaggagatactatacacaccttatggcgatatctatcatgacacttaccctgactttcaggtcattattggttttcatggaggactctatgatttccttactaaattagtgcacctggggcaaagggattatgatgttgttgctggcagatggacaacgcctaatcatcacatatggaaacagttgaacctccttcctaaaccattcaacctctactcctttgaaaataactacccagttggcaaaattcaagatgttgcaaagtataccacagacatcagaagttggttggagctatttggtttccaattacacaatgtactacctggatttcccaaacctgaattagaaaatttagaattaacttacgagcttctacggcttcagacaaaaactcaagagtgggatcctggaaagactatcctgggcattcagtgtgaactccagaaacagctcaggaatttcatttccttggaccaactacctatgactccccgatacaatgatggacggtgccttgaaggagggaagcaaccaaggtttgctgctgtcccttctgtttttgggaaaggtataaaatttgccatcaaggatggcatagtaacagctgatattataggagtagccaatgaagatagcaggcggcttgctgccattctcaataatgcccattacctggaaaacctacattttaccatagaggggagggacactcactacttcattaagcttgggtctctggaggaagacctggtgctcatcggtaacactggggggaggcggattctggagaatggtgtcaatgtcactgtgtcccagatgacttctgtgttgaatgggaggactagacggtttgcagatattcagctccagcatggagccctgtgcttcaacatccggtatgggacaactgtcgaagaggaaaagaatcacgtgttggagattgccagacagcgcgcagtggcccaggcctggactaaggaacaaagaaggctgcaagagggggaagaggggattagggcatggacagaaggggaaaagcagcagcttttgagcactgggcgggtacaaggttacgatgggtattttgttttgtctgttgagcagtatttagaactttctgacagtgccaataatattcactttatgagacagagcgaaataggcaggaggtaacaaaaatatctctgcctttgcgtcaccaaagactgcctgtttttaaaacataaaatggtttattgtattggttttctagatcagaactctgtatatgtaaatatggaggaaaaacatatccaactgcctttcaatgtgacggaagatggtattttaatattgtttgtttaaactctttaagaaatgacagagatttttagttcttgtgtggcagtattcaaaataacacaagtagaactcaaacagctaaaaacagttttcagaaagcaccactttcaatttgccgagccatgcatatgttccaatatccagaaagaacccaaggttctctatctctattgtgagaagcagtttcatccttaactgttggcagaacttacgggctatttgaataggtggtgcaatagtatctgaaacttgcctttcgaaagactgccagccctttgacgttttccagatctgttataggaaacttaaaaacaggtgtaaaatgtcttcagccaccatctcctagagtgaggacccaattgcccttccttcttgattattcctccttgcttgttaaagtaaatgccatattgttgtgctgtgttttggcgtgtggtggctgggttctgtctaccatgcttccctgtgggtgtggtaaccagactgtatagccgctatttgctcgtgtgtacatgataccaaagcagctggccagcgtgacctctctcacacgacctgttttgactcaattttttactaaaagttgttcagctgtattggtatcatgtaaacatagcttttattaacctgggtaggaatttctcatttatatataggatgtgttttggtcatagtttcacattagtgattcagtatctatacactgacccaatggttttgtgcacatgaacggtaatttacttaaaagtatgattctggtacaaaaacaaacaaaggctttagcaggcatacgtgtctgggatgccgatacatacattaactactactgcagaaattcataagagccaaaaccttaaaaaaatagacctggtacttaagtgaaagtactaaagggaagaccagaccaaacatcacagcagttgctgccacattgtttcagcccacttagatttatctttcaaatgtacaattctgtattgaacatctcccagccatcttcaggaaatcgaatcaagtaaatcctttccaaccgaaaacatttcaactaactatagagaggcagactcatttttactaaaataatttatacagttagttattttcgttctccgtacttacccatttatctttatttaatcgtctctactgcctaggaaaataactattttccaggacgggttatttgttctgcgatcatttaaaatttggagaaaggtcaggattagtgttaatatcagctgcagtttctcaatctctaggaatcctgcagtaaaacaagccccttggtgagctggaagatttgtgcccagtgacaaagagatagtttgtaaaatgctgtgtaattgtaagttaccacaaatgaaaatacatgacagcacaatgtggcccgtagaaaattcccctgagccagcttctgcactttcatcaccgaatctgaacatttgctatgtctgaaggcaaatttatgatggaatgttagtttggattctttccagatgctacctaaatgcagtgtggggtcattgccttgctttgcgatgacagtttctttgaaaatatgcaaagtcataagctcatgttaaggtttttcaagagtctgcctcctactacacaaaggaaagcaagggaaaggaaatgaccctggcaaacagtagggaagggtgtattcaaacatttcattttcaaaaccttcgggttagaataccacttacacatgtattctgagagacagaattcatgaggaactcatctctctttataactggaaacacaccagcttgatatattgctaatccatactaaaatcatattattgggttttttctgaatcaggcctgtattaatggtacagtatttattcagaatggaattctaaaattactaacaaacttgttgaaaatttgaatacctccacaccaacctaaaaatggaccttaagttcctagaacctctgatgttcttttaaattaatggaaaaataatttgtgaactgtatatagagagtgcattcataaatgtgattatgtattttatcacaaatccaaaatgtcaatattagagtctattttgcttatattttaagcaattatacgtttttgcaattcattgatgatgtatcattttcaaactgctttaaatatccattagaaacaaatatttgaagcttttacttaatagtgattaccttgaactgtgcatttctagtttgtaatacgtatttggttggttcgtgcctttagtttgttaaagttacatttgtattatattcaggaaatgcactttttattacttacagctgtggttttaatactgccttgaactattattattctttttacaactcctaaagcttgagggaggaaagaaaaaaaaaacaaaactactaatcagtagt

SEQ ID NO: 2332 - protein, 2725 aa, Homo sapiens
MEQTDCKPYQPLPKVKHEMDLAYTSSSDESEDGRKPRQSYNSRETLHEYNQELRMNYNSQSRKRKEVEKSTQEMEFCETSHTLCSGYQTDMHSVSRHGYQLEMGSDVDTETEGAASPDHALRMWIRGMKSEHSSCLSSRANSALSLTDTDHERKSDGENGFKFSPVCCDMEAQAGSTQDVQSSPHNQFTFRPLPPPPPPPHACTCARKPPPAADSLQRRSMTTRSQPSPAAPAPPTSTQDSVHLHNSWVLNSNIPLETRHFLFKHGSGSSAIFSAASQNYPLTSNTVYSPPPRPLPRSTFSRPAFTFNKPYRCCNWKCTALSATAITVTLALLLAYVIAVHLFGLTWQLQPVEGELYANGVSKGNRGTESMDTTYSPIGGKVSDKSEKKVFQKGRAIDTGEVDIGAQVMQTIPPGLFWRFQITIHHPIYLKFNISLAKDSLLGIYGRRNIPPTHTQFDFVKLMDGKQLVKQDSKGSDDTQHSPRNLILTSLQETGFIEYMDQGPWYLAFYNDGKKMEQVFVLTTAIEIMDDCSTNCNGNGECISGHCHCFPGFLGPDCARDSCPVLCGGNGEYEKGHCVCRHGWKGPECDVPEEQCIDPTCFGHGTCIMGVCICVPGYKGEICEEEDCLDPMCSNHGICVKGECHCSTGWGGVNCETPLPVCQEQCSGHGTFLLDAGVCSCDPKWTGSDCSTELCTMECGSHGVCSRGICQCEEGWVGPTCEERSCHSHCTEHGQCKDGKCECSPGWEGDHCTIAHYLDAVRDGCPGLCFGNGRCTLDQNGWHCVCQVGWSGTGCNVVMEMLCGDNLDNDGDGLTDCVDPDCCQQSNCYISPLCQGSPDPLDLIQQSQTLFSQHTSRLFYDRIKFLIGKDSTHVIPPEVSFDSRRACVIRGQVVAIDGTPLVGVNVSFLHHSDYGFTISRQDGSFDLVAIGGISVILIFDRSPFLPEKRTLWLPWNQFIVVEKVTMQRVVSDPPSCDISNFISPNPIVLPSPLTSFGGSCPERGTIVPELQVVQEEIPIPSSFVRLSYLSSRTPGYKTLLRILLTHSTIPVGMIKVHLTVAVEGRLTQKWFPAAINLVYTFAWNKTDIYGQKVWGLAEALVSVGYEYETCPDFILWEQRTVVLQGFEMDASNLGGWSLNKHHILNPQSGIIHKGNGENMFISQQPPVISTIMGNGHQRSVACTNCNGPAHNNKLFAPVALASGPDGSVYVGDFNFVRRIFPSGNSVSILELSTSPAHKYYLAMDPVSESLYLSDTNTRKVYKLKSLVETKDLSKNFEVVAGTGDQCLPFDQSHCGDGGRASEASLNSPRGITVDRHGFIYFVDGTMIRKIDENAVITTVIGSNGLTSTQPLSCDSGMDITQVRLEWPTDLAVNPMDNSLYVLDNNIVLQISENRRVRIIAGRPIHCQVPGIDHFLVSKVAIHSTLESARAISVSHSGLLFIAETDERKVNRIQQVTTNGEIYIIAGAPTDCDCKIDPNCDCFSGDGGYAKDAKMKAPSSLAVSPDGTLYVADLGNVRIRTISRNQAHLNDMNIYEIASPADQELYQFTVNGTHLHTLNLITRDYVYNFTYNSEGDLGAITSSNGNSVHIRRDAGGMPLWLVVPGGQVYWLTISSNGVLKRVSAQGYNLALMTYPGNTGLLATKSNENGWTTVYEYDPEGHLTNATFPTGEVSSFHSDLEKLTKVELDTSNRENVLMSTNLTATSTIYILKQENTQSTYRVNPDGSLRVTFASGMEIGLSSEPHILAGAVNPTLGKCNISLPGEHNANLIEWRQRKEQNKGNVSAFERRLRAHNRNLLSIDFDHITRTGKIYDDHRKFTLRILYDQTGRPILWSPVSRYNEVNITYSPSGLVTFIQRGTWNEKMEYDQSGKIISRTWADGKIWSYTYLEKSVMLLLHSQRRYIFEYDQPDCLLSVTMPSMVRHSLQTMLSVGYYRNIYTPPDSSTSFIQDYSRDGRLLQTLHLGTGRRVLYKYTKQARLSEVLYDTTQVTLTYEESSGVIKTIHLMHDGFICTIRYRQTGPLIGRQIFRFSEEGLVNARFDYSYNNFRVTSMQAVINETPLPIDLYRYVDVSGRTEQFGKFSVINYDLNQVITTTVMKHTKIFSANGQVIEVQYEILKAIAYWMTIQYDNVGRMVICDIRVGVDANITRYFYEYDADGQLQTVSVNDKTQWRYSYDLNGNINLLSHGKSARLTPLRYDLRDRITRLGEIQYKMDEDGFLRQRGNDIFEYNSNGLLQKAYNKASGWTVQYYYDGLGRRVASKSSLGQHLQFFYADLTNPIRVTHLYNHTSSEITSLYYDLQGHLIAMELSSGEEYYVACDNTGTPLAVFSSRGQVIKEILYTPYGDIYHDTYPDFQVIIGFHGGLYDFLTKLVHLGQRDYDVVAGRWTTPNHHIWKQLNLLPKPFNLYSFENNYPVGKIQDVAKYTTDIRSWLELFGFQLHNVLPGFPKPELENLELTYELLRLQTKTQEWDPGKTILGIQCELQKQLRNFISLDQLPMTPRYNDGRCLEGGKQPRFAAVPSVFGKGIKFAIKDGIVTADIIGVANEDSRRLAAILNNAHYLENLHFTIEGRDTHYFIKLGSLEEDLVLIGNTGGRRILENGVNVTVSQMTSVLNGRTRRFADIQLQHGALCFNIRYGTTVEEEKNHVLEIARQRAVAQAWTKEQRRLQEGEEGIRAWTEGEKQQLLSTGRVQGYDGYFVLSVEQYLELSDSANNIHFMRQSEIGRR

SEQ ID NO: 2333 - DNA, 828 bp, Homo sapiens
atggcctcaaagcctgagaagagtgtggcatcgtctgtctttatcacccttgcacccctgtgccacgatttagctgtggttgaggaagggggcaggcggtttgtgaggcctgatgtggcctcccctgggaggctcctgcccccatgaaggcacccggagctggcttagcgggaaagcccagcccctgggcaccccctggcagggctgcagccacagtgccagctgcacctctgcagctctccaatggagacatctgtgccttctgccacaaaaccgtgtcccccgcaagagctggctgtggaggccataaagaggcagtaccatgcccagtgcttcacgtggcacacctgccaccgccagctagctgggcagagcttctaccaggatgggcgacccctctgcaaaccctgctaccaggacacactggagaagtgcggcaagtgtggccaggtggtccgggagcacatcatcagggccctgggccaggccttccacccctcctgcttcatgtgtgtgacctgtgcccggtgcatccaggatgagagctctgccctgggcagccaaaacgagatgtactgcctagacgaattctacaagaaatttgctcccgtatgcagcatctgtgagaatcccattattcctcgggatgggaaagatgccttcaaaatcaagtgcatgggaagaaacttccatgtaaattgctacaggtgtgaggactgcaggatcctcctgtctgtggagcccaggaaccaaggctgctaccccctggacaaccatctcttctgcaagcagtgccacgtgaagcagagtgctgctgggtgctgctga

SEQ ID NO: 2334 - DNA, 3714 bp, Homo sapiens
gcctggcaccggggaccgttgcctgacgcgaggcccagctctacttttcgccccgcgtctcctccgcctgctcgcctcttccaccaactccaactccttctccctccagctccactcgctagtccccgactccgccagccctcggcccgctgccgtagcgccgcttcccgtccggtcccaaaggtgggaacgcgtccgccccggcccgcaccatggcacggttcggcttgcccgcgcttctctgcaccctggcagtgctcagcgccgcgctgctggctgccgagctcaagtcgaaaagttgctcggaagtgcgacgtctttacgtgtccaaaggcttcaacaagaacgatgcccccctccacgagatcaacggtgatcatttgaagatctgtccccagggttctacctgctgctctcaagagatggaggagaagtacagcctgcaaagtaaagatgatttcaaaagtgtggtcagcgaacagtgcaatcatttgcaagctgtctttgcttcacgttacaagaagtttgatgaattcttcaaagaactacttgaaaatgcagagaaatccctgaatgatatgtttgtgaagacatatggccatttatacatgcaaaattctgagctatttaaagatctcttcgtagagttgaaacgttactacgtggtgggaaatgtgaacctggaagaaatgctaaatgacttctgggctcgcctcctggagcggatgttccgcctggtgaactcccagtaccactttacagatgagtatctggaatgtgtgagcaagtatacggagcagctgaagcccttcggagatgtccctcgcaaattgaagctccaggttactcgtgcttttgtagcagcccgtactttcgctcaaggcttagcggttgcgggagatgtcgtgagcaaggtctccgtggtaaaccccacagcccagtgtacccatgccctgttgaagatgatctactgctcccactgccggggtctcgtgactgtgaagccatgttacaactactgctcaaacatcatgagaggctgtttggccaaccaaggggatctcgattttgaatggaacaatttcatagatgctatgctgatggtggcagagaggctagagggtcctttcaacattgaatcggtcatggatcccatcgatgtgaagatttctgatgctattatgaacatgcaggataatagtgttcaagtgtctcagaaggttttccagggatgtggaccccccaagcccctcccagctggacgaatttctcgttccatctctgaaagtgccttcagtgctcgcttcagaccacatcaccccgaggaacgcccaaccacagcagctggcactagtttggaccgactggttactgatgtcaaggagaaactgaaacaggccaagaaattctggtcctcccttccgagcaacgtttgcaacgatgagaggatggctgcaggaaacggcaatgaggatgactgttggaatgggaaaggcaaaagcaggtacctgtttgcagtgacaggaaatggattagccaaccagggcaacaacccagaggtccaggttgacaccagcaaaccagacatactgatccttcgtcaaatcatggctcttcgagtgatgaccagcaagatgaagaatgcatacaatgggaacgacgtggacttctttgatatcagtgatgaaagtagtggagaaggaagtggaagtggctgtgagtatcagcagtgcccttcagagtttgactacaatgccactgaccatgctgggaagagtgccaatgagaaagccgacagtgctggtgtccgtcctggggcacaggcctacctcctcactgtcttctgcatcttgttcctggttatgcagagagagtggagataattctcaaactctgagaaaaagtgttcatcaaaaagttaaaaggcaccagttatcacttttctaccatcctagtgactttgctttttaaatgaatggacaacaatgtacagtttttactatgtggccactggtttaagaagtgctgactttgttttctcattcagttttgggaggaaaagggactgtgcattgagttggttcctgctcccccaaaccatgttaaacgtggctaacagtgtaggtacagaactatagttagttgtgcatttgtgattttatcactctattatttgtttgtatgtttttttctcatttcgtttgtgggtttttttttccaactgtgatctcgccttgtttcttacaagcaaaccagggtcccttcttggcacgtaacatgtacgtatttctgaaatattaaatagctgtacagaagcaggttttatttatcatgttatcttattaaaagaaaaagcccaaaaagcagtaaaatttccatttctccctgttattttagttgccttatctggagagacgtggaggtgattttcttttttttaaattattattaagacagaatgtgagggcacaagcaggcttctgagccacttgtcagattgtattcaaagcatcaatccaagaaggaggttatgtgtacttcatttattggtgatagttggaagagactgcagactactgctttgaatgagttgaattacataagctaagatcactataggtccatttcttgaacccacttatacataaaatgtaacccatttagaaaaagattctggatatcatcccccttgaaagatagaaagcattcaggatgtcccagttatcacatgttcacacttgggtttaggggtgtttttttttaaaaccaggcaggttagctagcccaccctgtgctagttttcatgttcacactgaccctatttgaattaatatcctttgttagagtggtcgagatttcaaacccaattatgtacagggagctgtctgagagctagccagaactggggtacagcctgggctcagggaatagctgtcaacactcgggcaaagtttttgtctgtgcatgtgtatctccatttgttttgggatcccagtttttgttttaagagagtataaggtgtctcatttgagtctttttcttacctagccccctcttatcagtaaaacaaaggacttgccatggttcacagcaatgtgctacgatccaagatatcagccaaggagcccacttaggggagaactaggtgtccagatttttgtatgtgttgtttttcttgggggatggggtggggtgggagtaggtagagctgagaatactacatcttagtggtgacctttagccacgtgggtgaagtggcaaaggccatggccatatctgttgtcccaggccaaagactaacaactgccttgggaatcccttccttgtgtccttaccaaatgatagctcataaaactctgataatgtaacaaatcactttcaaaggagttcccagaagtcttcagaaagactaaaattctgtctcttcctgctttagacagccattaagatcccaactaattttaccgaacctaaaacccacaaagaggttgtttgtgttattgttcaatcttcagttgtaagagtaattctctatttttatattgaaacataattacttgatagctcagggtctacatttcattcaactttttacaccaaattctgcagagtggtcaaaatggaatattgggggctgttgtaaacagaggcttaattttattagaagtagccagttatttattaaagcatgatgttaataaaataggcatattc

SEQ ID NO: 2335 - protein, 556 aa, Homo sapiens
MARFGLPALLCTLAVLSAALLAAELKSKSCSEVRRLYVSKGFNKNDAPLHEINGDHLKICPQGSTCCSQEMEEKYSLQSKDDFKSVVSEQCNHLQAVFASRYKKFDEFFKELLENAEKSLNDMFVKTYGHLYMQNSELFKDLFVELKRYYVVGNVNLEEMLNDFWARLLERMFRLVNSQYHFTDEYLECVSKYTEQLKPFGDVPRKLKLQVTRAFVAARTFAQGLAVAGDVVSKVSVVNPTAQCTHALLKMIYCSHCRGLVTVKPCYNYCSNIMRGCLANQGDLDFEWNNFIDAMLMVAERLEGPFNIESVMDPIDVKISDAIMNMQDNSVQVSQKVFQGCGPPKPLPAGRISRSISESAFSARFRPHHPEERPTTAAGTSLDRLVTDVKEKLKQAKKFWSSLPSNVCNDERMAAGNGNEDDCWNGKGKSRYLFAVTGNGLANQGNNPEVQVDTSKPDILILRQIMALRVMTSKMKNAYNGNDVDFFDISDESSGEGSGSGCEYQQCPSEFDYNATDHAGKSANEKADSAGVRPGAQAYLLTVFCILFLVMQREWR

SEQ ID NO: 2336 - DNA, 2382 bp, Homo sapiens
ccctgccccgcgccgccaagcggttcccgccctcgcccagcgcccaggtagctgcgaggaaacttttgcagcggctgggtagcagcacgtctcttgctcctcagggccactgccaggcttgccgagtcctgggactgctctcgctccggctgccactctcccgcgctctcctagctccctgcgaagcaggatggccgggaccgtgcgcaccgcgtgcttggtggtggcgatgctgctcagcttggacttcccgggacaggcgcagcccccgccgccgccgccggacgccacctgtcaccaagtccgctccttcttccagagactgcagcccggactcaagtgggtgccagaaactcccgtgccaggatcagatttgcaagtatgtctccctaagggcccaacatgctgctcaagaaagatggaagaaaaataccaactaacagcacgattgaacatggaacagctgcttcagtctgcaagtatggagctcaagttcttaattattcagaatgctgcggttttccaagaggcctttgaaattgttgttcgccatgccaagaactacaccaatgccatgttcaagaacaactacccaagcctgactccacaagcttttgagtttgtgggtgaatttttcacagatgtgtctctctacatcttgggttctgacatcaatgtagatgacatggtcaatgaattgtttgacagcctgtttccagtcatctatacccagctaatgaacccaggcctgcctgattcagccttggacatcaatgagtgcctccgaggagcaagacgtgacctgaaagtatttgggaatttccccaagcttattatgacccaggtttccaagtcactgcaagtcactaggatcttccttcaggctctgaatcttggaattgaagtgatcaacacaactgatcacctgaagttcagtaaggactgtggccgaatgctcaccagaatgtggtactgctcttactgccagggactgatgatggttaaaccctgtggcggttactgcaatgtggtcatgcaaggctgtatggcaggtgtggtggagattgacaagtactggagagaatacattctgtcccttgaagaacttgtgaatggcatgtacagaatctatgacatggagaacgtactgcttggtctcttttcaacaatccatgattctatccagtatgtccagaagaatgcaggaaagctgaccaccactattggcaagttatgtgcccattctcaacaacgccaatatagatctgcttattatcctgaagatctctttattgacaagaaagtattaaaagttgctcatgtagaacatgaagaaaccttatccagccgaagaagggaactaattcagaagttgaagtctttcatcagcttctatagtgctttgcctggctacatctgcagccatagccctgtggcggaaaacgacaccctttgctggaatggacaagaactcgtggagagatacagccaaaaggcagcaaggaatggaatgaaaaaccagttcaatctccatgagctgaaaatgaagggccctgagccagtggtcagtcaaattattgacaaactgaagcacattaaccagctcctgagaaccatgtctatgcccaaaggtagagttctggataaaaacctggatgaggaagggtttgaaagtggagactgcggtgatgatgaagatgagtgcattggaggctctggtgatggaatgataaaagtgaagaatcagctccgcttccttgcagaactggcctatgatctggatgtggatgatgcgcctggaaacagtcagcaggcaactccgaaggacaacgagataagcacctttcacaacctcgggaacgttcattccccgctgaagcttctcaccagcatggccatctcggtggtgtgcttcttcttcctggtgcactgactgcctggtgcccagcacatgtgctgccctacagcaccctgtggtcttcctcgataaagggaaccactttcttatttttttctatttttttttttttgttatcctgtatacctcctccagccatgaagtagaggactaaccatgtgttatgttttcgaaaatcaaatggtatcttttggaggaagatacattttagtggtagcatatagattgtccttttgcaaagaaagaaaaaaaaccatcaagttgtgccaaattattctcctatgtttggctgctagaacatggttaccatgtctttctctctcactccctccctttctatcgttctctctttgcatggatttctttgaaaaaaaataaattgctcaaataaaaaaaaaaaaaaaaaaaaaaaaaaaaaaaaaaaaaaaaaaaaaaaaaaaaaaaaaaaaaaaaaaaaaaaaaaa

SEQ ID NO: 2337 - protein, 580 aa, Homo sapiens
MAGTVRTACLVVAMLLSLDFPGQAQPPPPPPDATCHQVRSFFQRLQPGLKWVPETPVPGSDLQVCLPKGPTCCSRKMEEKYQLTARLNMEQLLQSASMELKFLIIQNAAVFQEAFEIVVRHAKNYTNAMFKNNYPSLTPQAFEFVGEFFTDVSLYILGSDINVDDMVNELFDSLFPVIYTQLMNPGLPDSALDINECLRGARRDLKVFGNFPKLIMTQVSKSLQVTRIFLQALNLGIEVINTTDHLKFSKDCGRMLTRMWYCSYCQGLMMVKPCGGYCNVVMQGCMAGVVEIDKYWREYILSLEELVNGMYRIYDMENVLLGLFSTIHDSIQYVQKNAGKLTTTIGKLCAHSQQRQYRSAYYPEDLFIDKKVLKVAHVEHEETLSSRRRELIQKLKSFISFYSALPGYICSHSPVAENDTLCWNGQELVERYSQKAARNGMKNQFNLHELKMKGPEPVVSQIIDKLKHINQLLRTMSMPKGRVLDKNLDEEGFESGDCGDDEDECIGGSGDGMIKVKNQLRFLAELAYDLDVDDAPGNSQQATPKDNEISTFHNLGNVHSPLKLLTSMAISVVCFFFLVH

SEQ ID NO: 2338 - DNA, 859 bp, Homo sapiens
aggcagcggcggcggcggcagcggtggggaaaagcggattccgccccgaaccacaccgaggggagctcgtggtcgagacttgccgccctaagcactctcccaagtccgacccgctcggcgaggacttccgtcttctgagcgaaccttgtcaagcaagctgggatctatgagtggaaaggtgaccaagcccaaagaggagaaagatgcttctaaggttctggatgacgccccccctggcacacaggaatacattatgttacgacaagattccatccaatctgcggaattaaagaaaaaagagtccccctttcgtgctaagtgtcacgaaatcttctgctgcccgctgaagcaagtacaccacaaagagaacacagagccggaagttgcccttttgcatcattatgggaatccttatgataattgtctttctgatatgggagagactggcatgtgggttaaaattcgaaaaataattaggattctccataagcgtgtggtaatctgccaccttgtgaccaacattctttcttgcaagcaattgttgaaacacttgttctgctctcagaatctgatgcagcttgcaagtatgggtcaaagagtttctcagactgtacttaaacaagaagatggagaaggagaaaagggtgtcacgatatgccagaaaagtactgacaattctttacttgattgctactgctctagagtaagattgcaaagcttgactcaagcagcttgtagcctgtgtatctgtctctgtgttacaccagaggctgtcatcgaggcattgccctcttatcatctaaatgtaatcggctactgcagcataaaaggattacagcagcccatatgtgaaacttga

SEQ ID NO: 2339 - protein, 230 aa, Homo sapiens
MSGKVTKPKEEKDASKVLDDAPPGTQEYIMLRQDSIQSAELKKKESPFRAKCHEIFCCPLKQVHHKENTEPEVALLHHYGNPYDNCLSDMGETGMWVKIRKIIRILHKRVVICHLVTNILSCKQLLKHLFCSQNLMQLASMGQRVSQTVLKQEDGEGEKGVTICQKSTDNSLLDCYCSRVRLQSLTQAACSLCICLCVTPEAVIEALPSYHLNVIGYCSIKGLQQPICET

SEQ ID NO: 2340 - DNA, 622 bp, Homo sapiens
cgcggagcggctgggaaggaggggctgggaatcttggagccccttggcccgcggggaaagcgggtgacccgccctgcaagtgggatgcccccttcggccttctggagcgcagagcaatgcactctgaagccggagggtagaaagtgctggaatgcgcgcccgggcccaggctgtcgcgagccttcagcaagccagtgcacacagagagggctgcccagagatcccggtcagcgctcgcagttcgaggtggaacatggaggctgtctccccggcaagggtgcccactgcaagcacaggcgtgagaaatggcccagaaaagagtggtcagggcaatgtgttcttggcacgcccagcaagacctgccagagggacctacagacgagtgtctcccagctatcttaccagcggggaccttgaggtccaagtatccagtccggttagaaatggccgcggatccaacaggtgctggtgagtgggagaatacccctgagggaggaagaacagaggccgggagggagctgagtggatgtagatgagaaatacctggacagctgcaagctgtagtcagtgatgggcaactggaaccagagattccagagagagggagggagaaagagggagg

SEQ ID NO: 2341 - protein, 110 aa, Homo sapiens
MPPSAFWSAEQCTLKPEGRKCWNARPGPGCREPSASQCTQRGLPRDPGQRSQFEVEHGGCLPGKGAHCKHRREKWPRKEWSGQCVLGTPSKTCQRDLQTSVSQLSYQRGP

SEQ ID NO: 2342 - DNA, 2421 bp, Homo sapiens
cggccgggtggtggcggtggctgcggcgacggcggtcgcgtcggcgtcagggtcggggtcggtaaggggtgcggcaatgctgcaactgcgggactcggtggactcggccggtacgagccccacggcggtgctggcggccggcgaggaggtgggggcaggcggcggcccgggcggggggcggccgggggcggggacgccgctgcgccagacactctggcctctcagcatccacgaccccacgcgccgcgcccgcgtcaaggagtacttcgtgttccggcccggcagcatcgagcaggcagtggaggagatccgcgtggtggtgcggcccgtggaggacggcgagatccagggagtgtggctgcttaccgaggtggatcactggaacaatgagaaggagcggctggtgctggtcacggagcagtccctgcttatctgtaaatacgacttcatcagtctccagtgccagcaggtggtgcggatagcgctcaacgcagtagacaccatttcctacggagaattccagtttccccctaaatcgctcaacaagcgagaaggttttgggattcgaattcagtgggacaagcaaagtcgtccttccttcataaacagatggaatccctggtctaccaacgtgccctatgccactttcacagaacacccgatggctggcgcagatgagaagacagcatctctgtgtcagttggaaagcttcaaggctctgttaatccaagctgtcaaaaaagcccaaaaagaaagccctttgccaggacaggcgaatggcgtgctgatcctggagcgccccctgctcatcgagacctacgtgggactcatgtccttcattaacaacgaggcgaaactgggctactccatgaccaggggcaaaataggcttttagccgctgcgttctgggagctcctcccccttctgggagctcctccccctccccagaaggccaagggatgtgggggctgggggactgggaggcctggcagtcttcatgctgccctgctgctgctggaaggatggggatctttcacctttagggatctcagcacaattagaatcgtaaagtgaattctatctatttaattggatattggactctgctcatataagctacagacaaaagccaaaagactctcgctgtccctgtgctgctggtatttcattctctgtaacttcagttctggtgttttccttgagtatctacttggcttctcgtggtttttcccaccccagctgccccagcacgcgggacccatagcacaccccttagcgcttgcctaggttgctgaaaacagggaggcacctggtatctcgagtgcctgcagttgcaagtatgtttacacctggtgtccaattttgtattttaaaatgtaatccatttttacttcagctcatccaaaagcagccagcagaccggttgactgagaccggtctgtggctgtgggccccttggtgacccgctgctcttttggaaatgggtgacctgaagtgacactttttccacaattaacccaagttgtgttaatacttcaggtctgtttcccagacccagaaagctttacagaaaatcattgtaagacaatttattaatttgagaaagtcaccttgacagttctttgcacacaagttttacacctctctggattcgaagtttgtattgtattcatagttaaagggaatcgggtactttgcttgttgaataatgcactttaaaacaaggaaccgtatcaggccagcatggtggctcatgcctgtaatcccagcattttgggaggctcaggcagacaaatcgctctagctcagaagttgcagagcagcctgggcaacatggtgaaacccgtctctaccaaacagacaaaaagcagccaggcgtggtggcacatctgtggtcccagctacttgagaggctgagccaggaggatcgcttgagcccaggaggcggaggttgcagtgagctgagatggcaccacttattgcactccagcccgggcgacagagcgagactccatctaccagatccttatgacgcagctgatgcctgccttggttcctaccactctggtgtagacagaggactttgtccaagtctcacactaaacatgcccgggcttcgatgtgcctggaggatttccccacagggacccacgcacctccctgtatctgcgcagcttgctcgtgtggctggaagcgctgtcgataagcttcacgcactggcttgccagttcttcagctctaggacttgtagctttaagcaaacggtgtggcatgggttgagtgtggccacctgcaggatgtgcagggctgcctcagaagctggctggggactctagcctctgtgttcataaagacattaagaagtggatggatgttgttccttttttgaagttgtcattaaagtaggtgcaacaaccaaga

SEQ ID NO: 2343 - protein, 272 aa, Homo sapiens; identical to SEQ ID NO: 4

SEQ ID NO: 2344 - DNA, 2102 bp, Homo sapiens
ggtcggggtcggtaaggggtgcggcaatgctgcaactgcgggactcggtggactcggccggtacgagccccacggcggtgctggcggccggcgaggaggtgggggcaggcggcggcccgggcggggggcggccgggggcggggacgccgctgcgccagacactctggcctctcagcatccacgaccccacgcgccgcgcccgcgtcaaggagtacttcgtgttccgggcgagaaggttttgggattcgaattcagtgggacaagcaaagtcgtccttccttcataaacagatggaatccctggtctaccaacgtgccctatgccactttcacagaacacccgatggctggcgcagatgagaagacagcatctctgtgtcagttggaaagcttcaaggctctgttaatccaagctgtcaaaaaagcccaaaaagaaagccctttgccaggacaggcgaatggcgtgctgatcctggagcgccccctgctcatcgagacctacgtgggactcatgtccttcattaacaacgaggcgaaactgggctactccatgaccaggggcaaaataggcttttagccgctgcgttctgggagctcctcccccttctgggagctcctccccctccccagaaggccaagggatgtgggggctgggggactgggaggcctggcagtcttcatgctgccctgctgctgctggaaggatggggatctttcacctttagggatctcagcacaattagaatcgtaaagtgaattctatctatttaattggatattggactctgctcatataagctacagacaaaagccaaaagactctcgctgtccctgtgctgctggtatttcattctctgtaacttcagttctggtgttttccttgagtatctacttggcttctcgtggtttttcccaccccagctgccccagcacgcgggacccatagcacaccccttagcgcttgcctaggttgctgaaaacagggaggcacctggtatctcgagtgcctgcagttgcaagtatgtttacacctggtgtccaattttgtattttaaaatgtaatccatttttacttcagctcatccaaaagcagccagcagaccggttgactgagaccggtctgtggctgtgggccccttggtgacccgctgctcttttggaaatgggtgacctgaagtgacactttttccacaattaacccaagttgtgttaatacttcaggtctgtttcccagacccagaaagctttacagaaaatcattgtaagacaatttattaatttgagaaagtcaccttgacagttctttgcacacaagttttacacctctctggattcgaagtttgtattgtattcatagttaaagggaatcgggtactttgcttgttgaataatgcactttaaaacaaggaaccgtatcaggccagcatggtggctcatgcctgtaatcccagcattttgggaggctcaggcagacaaatcgctctagctcagaagttgcagagcagcctgggcaacatggtgaaacccgtctctaccaaacagacaaaaagcagccaggcgtggtggcacatctgtggtcccagctacttgagaggctgagccaggaggatcgcttgagcccaggaggcggaggttgcagtgagctgagatggcaccacttattgcactccagcccgggcgacagagcgagactccatctaccagatccttatgacgcagctgatgcctgccttggttcctaccactctggtgtagacagaggactttgtccaagtctcacactaaacatgcccgggcttcgatgtgcctggaggatttccccacagggacccacgcacctccctgtatctgcgcagcttgctcgtgtggctggaagcgctgtcgataagcttcacgcactggcttgccagttcttcagctctaggacttgtagctttaagcaaacggtgtggcatgggttgagtgtggccacctgcaggatgtgcagggctgcctcagaagctggctggggactctagcctctgtgttcataaagacattaagaagtggatggatgttgttccttttttgaagttgtcattaaagtaggtgcaacaaccaaga

SEQ ID NO: 2345 - protein, 110 aa, Homo sapiens
MLQLRDSVDSAGTSPTAVLAAGEEVGAGGGPGGGRPGAGTPLRQTLWPLSIHDPTRRARVKEYFVFRARRFWDSNSVGQAKSSFLHKQMESLVYQRALCHFHRTPDGWRR

SEQ ID NO: 2346 - DNA, 2191 bp, Homo sapiens
cggggtcggtaaggggtgcggcaatgctgcaactgcgggactcggtggactcggccggtacgagccccacggcggtgctggcggccggcgaggaggtgggggcaggcggcggcccgggcggggggcggccgggggcggggacgccgctgcgccagacactctggcctctcagcatccacgaccccacgcgccgcgcccgcgtcaaggagtacttcgtgttccggcccggcagcatcgagcaggcagtggaggagatccgcgtggtggtgcggcccgtggaggacggcgagatccagggagtgtggctgcttaccgagcgagaaggttttgggattcgaattcagtgggacaagcaaagtcgtccttccttcataaacagatggaatccctggtctaccaacgtgccctatgccactttcacagaacacccgatggctggcgcagatgagaagacagcatctctgtgtcagttggaaagcttcaaggctctgttaatccaagctgtcaaaaaagcccaaaaagaaagccctttgccaggacaggcgaatggcgtgctgatcctggagcgccccctgctcatcgagacctacgtgggactcatgtccttcattaacaacgaggcgaaactgggctactccatgaccaggggcaaaataggcttttagccgctgcgttctgggagctcctcccccttctgggagctcctccccctccccagaaggccaagggatgtgggggctgggggactgggaggcctggcagtcttcatgctgccctgctgctgctggaaggatggggatctttcacctttagggatctcagcacaattagaatcgtaaagtgaattctatctatttaattggatattggactctgctcatataagctacagacaaaagccaaaagactctcgctgtccctgtgctgctggtatttcattctctgtaacttcagttctggtgttttccttgagtatctacttggcttctcgtggtttttcccaccccagctgccccagcacgcgggacccatagcacaccccttagcgcttgcctaggttgctgaaaacagggaggcacctggtatctcgagtgcctgcagttgcaagtatgtttacacctggtgtccaattttgtattttaaaatgtaatccatttttacttcagctcatccaaaagcagccagcagaccggttgactgagaccggtctgtggctgtgggccccttggtgacccgctgctcttttggaaatgggtgacctgaagtgacactttttccacaattaacccaagttgtgttaatacttcaggtctgtttcccagacccagaaagctttacagaaaatcattgtaagacaatttattaatttgagaaagtcaccttgacagttctttgcacacaagttttacacctctctggattcgaagtttgtattgtattcatagttaaagggaatcgggtactttgcttgttgaataatgcactttaaaacaaggaaccgtatcaggccagcatggtggctcatgcctgtaatcccagcattttgggaggctcaggcagacaaatcgctctagctcagaagttgcagagcagcctgggcaacatggtgaaacccgtctctaccaaacagacaaaaagcagccaggcgtggtggcacatctgtggtcccagctacttgagaggctgagccaggaggatcgcttgagcccaggaggcggaggttgcagtgagctgagatggcaccacttattgcactccagcccgggcgacagagcgagactccatctaccagatccttatgacgcagctgatgcctgccttggttcctaccactctggtgtagacagaggactttgtccaagtctcacactaaacatgcccgggcttcgatgtgcctggaggatttccccacagggacccacgcacctccctgtatctgcgcagcttgctcgtgtggctggaagcgctgtcgataagcttcacgcactggcttgccagttcttcagctctaggacttgtagctttaagcaaacggtgtggcatgggttgagtgtggccacctgcaggatgtgcagggctgcctcagaagctggctggggactctagcctctgtgttcataaagacattaagaagtggatggatgttgttccttttttgaagttgtcattaaagtaggtgcaacaaccaaga

SEQ ID NO: 2347 - protein, 213 aa, Homo sapiens
MLQLRDSVDSAGTSPTAVLAAGEEVGAGGGPGGGRPGAGTPLRQTLWPLSIHDPTRRARVKEYFVFRPGSIEQAVEEIRVVVRPVEDGEIQGVWLLTEREGFGIRIQWDKQSRPSFINRWNPWSTNVPYATFTEHPMAGADEKTASLCQLESFKALLIQAVKKAQKESPLPGQANGVLILERPLLIETYVGLMSFINNEAKLGYSMTRGKIGF

SEQ ID NO: 2348 - DNA, 1986 bp, Homo sapiens
ggtgcggcccgtggaggacggcgagatccagggagtggtgcggatagcgctcaacgcagtagacaccatttcctacggagaattccagtttccccctaaatcgctcaacaagcgagaaggttttgggattcgaattcagtgggacaagcaaagtcgtccttccttcataaacagatggaatccctggtctaccaacgtgccctatgccactttcacagaacacccgatggctggcgcagatgagaagacagcatctctgtgtcagttggaaagcttcaaggctctgttaatccaagctgtcaaaaaagcccaaaaagaaagccctttgccaggacaggcgaatggcgtgctgatcctggagcgccccctgctcatcgagacctacgtgggactcatgtccttcattaacaacgaggcgaaactgggctactccatgaccaggggcaaaataggcttttagccgctgcgttctgggagctcctcccccttctgggagctcctccccctccccagaaggccaagggatgtgggggctgggggactgggaggcctggcagtcttcatgctgccctgctgctgctggaaggatggggatctttcacctttagggatctcagcacaattagaatcgtaaagtgaattctatctatttaattggatattggactctgctcatataagctacagacaaaagccaaaagactctcgctgtccctgtgctgctggtatttcattctctgtaacttcagttctggtgttttccttgagtatctacttggcttctcgtggtttttcccaccccagctgccccagcacgcgggacccatagcacaccccttagcgcttgcctaggttgctgaaaacagggaggcacctggtatctcgagtgcctgcagttgcaagtatgtttacacctggtgtccaattttgtattttaaaatgtaatccatttttacttcagctcatccaaaagcagccagcagaccggttgactgagaccggtctgtggctgtgggccccttggtgacccgctgctcttttggaaatgggtgacctgaagtgacactttttccacaattaacccaagttgtgttaatacttcaggtctgtttcccagacccagaaagctttacagaaaatcattgtaagacaatttattaatttgagaaagtcaccttgacagttctttgcacacaagttttacacctctctggattcgaagtttgtattgtattcatagttaaagggaatcgggtactttgcttgttgaataatgcactttaaaacaaggaaccgtatcaggccagcatggtggctcatgcctgtaatcccagcattttgggaggctcaggcagacaaatcgctctagctcagaagttgcagagcagcctgggcaacatggtgaaacccgtctctaccaaacagacaaaaagcagccaggcgtggtggcacatctgtggtcccagctacttgagaggctgagccaggaggatcgcttgagcccaggaggcggaggttgcagtgagctgagatggcaccacttattgcactccagcccgggcgacagagcgagactccatctaccagatccttatgacgcagctgatgcctgccttggttcctaccactctggtgtagacagaggactttgtccaagtctcacactaaacatgcccgggcttcgatgtgcctggaggatttccccacagggacccacgcacctccctgtatctgcgcagcttgctcgtgtggctggaagcgctgtcgataagcttcacgcactggcttgccagttcttcagctctaggacttgtagctttaagcaaacggtgtggcatgggttgagtgtggccacctgcaggatgtgcagggctgcctcagaagctggctggggactctagcctctgtgttcataaagacattaagaagtggatggatgttgttccttttttgaagttgtcattaaagtaggtgcaacaaccaaga

SEQ ID NO: 2349 - protein, 77 aa, Homo sapiens
MAGADEKTASLCQLESFKALLIQAVKKAQKESPLPGQANGVLILERPLLIETYVGLMSFINNEAKLGYSMTRGKIGF

SEQ ID NO: 2350 - DNA, 1175 bp, Homo sapiens
gggatgtgggggctgggggactgggaggcctggcagtcttcatgctgccctgctgctgctggaaggatggggatctttcacctttagggatctcagcacaattagaatcgtaaagtgaattctatctatttaattggatattggactctgctcatataagctacagacaaaagccaaaagactctcgctgtccctgtgctgctggtatttcattctctgtaacttcagttctggtgttttccttgagtatctacttggcttctcgtggtttttcccaccccagctgccccagcacgcgggacccatagcacaccccttagcgcttgcctaggttgctgaaaacagggaggcacctggtatctcgagtgcctgcagttgcaagtatgtttacacctggtgtccaattttgtattttaaaatgtaatccatttttacttcagctcatccaaaagcagccagcagaccggttgactgagaccggtctgtggctgtgggccccttggtgacccgctgctcttttggaaatgggtgacctgaagtgacactttttccacaattaacccaagttgtgttaatacttcaggtctgtttcccagacccagaaagctttacagaaaatcattgtaagacaatttattaatttgagaaagtcaccttgacagttctttgcacacaagttttacacctctctggattcgaagtttgtattgtattcatagttaaagggaatcgggtactttgcttgttgaataatgcactttaaaacaaggaaccgtatcaggccagcatggtggctcatgcctgtaatcccagcattttgggaggctcaggcagacaaatcgctctagctcagaagttgcagagcagcctgggcaacatggtgaaacccgtctctaccaaacagacaaaaagcagccaggcgtggtggcacatctgtggtcccagctacttgagaggctgagccaggaggatcgcttgagcccaggaggcggaggttgcagtgagctgagatggcaccacttattgcactccagcccgggcgacagagcgagactccatctaccagatcctcagaagctggctggggactctagcctctgtgttcataaagacattaagaagtggatggatgttgttccttttttgaagttgtcattaaagtaggtgcaacaacc

SEQ ID NO: 2351 - protein, 57 aa, Homo sapiens [sequence omitted]

SEQ ID NO: 2352 - DNA, 2036 bp, Homo sapiens
ggcctcggaggccggcgtcggctgttgcagcctgctgcgcgcccaggggtcccgcgggttttcgggcgcagggtggcgcccgcggcaggcggcggccatgaacttctccgaggtattcaagctctccagcttactctgcaagttctccccggacggcaagtacctggcttcctgtgtccagtaccggttagtggtccgggatgtgaacacccttcagatccttcagctgtacacgtgcctagaccagatccagcacatcgagtggtcggcagactcgctcttcatcctgtgcgccatgtacaagcgagggctggtgcaggtctggtctttagagcagcccgaatggcactgcaaaatagacgagggctcagccgggctggtggcctcgtgctggagcccggacgggcgccacattctcaacaccacggaattccatctgcggataaccgtctggtccttgtgcacaaaatccgtgtcttacatcaaatacccgaaagcttgtctgcagggaatcaccttcaccagggacggccgctacatggcgctggcagaacggcgcgactgcaaagattacgtgagcatcttcgtctgcagtgattggcagctcctgcggcattttgatacggacacccaggatctcacagggattgagtgggccccaaacggctgtgtgctggcagtgtgggacacctgcttggagtacaagattctgctgtactcattggatggccggttgttgtccacgtacagcgcttacgagtggtccctgggcatcaagtctgtggcctggagccccagcagtcagttcctggcagttgggagctatgatggaaaggtgcgcatccttaatcacgtgacttggaaaatgatcacggagtttgggcatcctgcagccattaatgatcccaagatagtggtgtataaggaggccgagaagagcccacagctgggactgggctgcctctccttcccgccgccccgggccggggccggccctctcccgagctcagagagtaaatatgagatcgcctctgtcccagtctccttacagacactgaaacctgttaccgacagagcaaacccgaaaatcggcataggaatgctggcatttagtcctgacagctacttcctggcgacaaggaacgacaacattcccaatgccgtctgggtctgggacattcagaagctgaggctgttcgcggtgctcgagcagctgtccccagtgcgcgcatttcagtgggacccgcagcagccgcggctggccatctgcacgggaggcagcaggctctacctgtggtccccagcgggctgcatgtcggtgcaggtgcctggggaaggtaagcacatccccgaggccacggacgtggcagccttgctgtgtgcagtctggcatcacacgggctgaactgttgaagcccagctgctgtctccggcagcactccagggaaactgccctcagagtctttgcgtaaacctcaagacggacacacaggggacccgctgccctcagctttatgggctagaagcagcctctccctgacttgaggcagctctggggctccaccctggctctgcctatgtgggtcactccaggcactgtgctggcctgcaggacaagggggtgcccatcccccagaatctgggcctcccctgctgtaatcctctggccacctgtctctctctaggcgactttgcagtgctctctctgtgctggcatttaagcggagactcgatggccctcctcagcaaggatcacttctgcctctgcttcctggagacagaggcagtggtcggcacagcctgcagacagctgggcggccacacgtagcagcggtgcactaacgtgtgcagaaacagggctactctgtgtttccagtgtgggaaaaaacacagcttcaccaggaggttctccactgtggtggtctggattcagtgattgattctatttttctatagcaaagcatttttgtaaatatgtatggtataaaactgtagttttattatttaaaataaatacttgctgatttatacaacta

SEQ ID NO: 2353 - protein, 435 aa, Homo sapiens
MNFSEVFKLSSLLCKFSPDGKYLASCVQYRLVVRDVNTLQILQLYTCLDQIQHIEWSADSLFILCAMYKRGLVQVWSLEQPEWHCKIDEGSAGLVASCWSPDGRHILNTTEFHLRITVWSLCTKSVSYIKYPKACLQGITFTRDGRYMALAERRDCKDYVSIFVCSDWQLLRHFDTDTQDLTGIEWAPNGCVLAVWDTCLEYKILLYSLDGRLLSTYSAYEWSLGIKSVAWSPSSQFLAVGSYDGKVRILNHVTWKMITEFGHPAAINDPKIVVYKEAEKSPQLGLGCLSFPPPRAGAGPLPSSESKYEIASVPVSLQTLKPVTDRANPKIGIGMLAFSPDSYFLATRNDNIPNAVWVWDIQKLRLFAVLEQLSPVRAFQWDPQQPRLAICTGGSRLYLWSPAGCMSVQVPGEGKHIPEATDVAALLCAVWHHTG

SEQ ID NO: 2354 - DNA, 1687 bp, Homo sapiens
ggcctcggaggccggcgtcggctgttgcagcctgctgcgcgcccaggggtcccgcgggttttcgggcgcagggtggcgcccgcggcaggcggcggccatgaacttctccgaggtattcaagctctccagcttactctgcaagttctccccggacggcaagtacctggcttcctgtgtccagtaccggttagtggtccgggatgtgaacacccttcagatccttcagctgtacacgtgcctagaccagatccagcacatcgagtggtcggcagactcgctcttcatcctgtgcgccatgtacaagcgagggctggtgcaggtctggtctttagagcagcccgaatggcactgcaaaatagacgagggctcagccgggctggtggcctcgtgctggagcccggacgggcgccacattctcaacaccacggaattccatctgcggataaccgtctggtccttgtgcacaaaatccgtgtcttacatcaaatacccgaaagcttgtctgcagggaatcaccttcaccagggacggccgctacatggcgctggcagaacggcgcgactgcaaagattacgtgagcatcttcgtctgcagtgattggcagctcctgcggcattttgatacggacacccaggatctcacagggattgagtgggccccaaacggctgtgtgctggcagtgtgggacacctgcttggagtacaagattctgctgtactcattggatggccggttgttgtccacgtacagcgcttacgagtggtccctgggcatcaagtctgtggcctggagccccagcagtcagttcctggcagttgggagctatgatggaaaggtgcgcatccttaatcacgtgacttggaaaatgatcacggagtttgggcatcctgcagccattaatgatcccaagatagtggtgtataaggaggccgagaagagcccacagctgggactgggctgcctctccttcccgccgccccgggccggggccggccctctcccgagctcagagagtaaatatgagatcgcctctgtcccagtctccttacagacactgaaacctgttaccgacagagcaaacccgaaaatcggcataggaatgctggcatttagtcctgacagctacttcctggcgacaaggaacgacaacattcccaatgccgtctgggtctgggacattcagaagctgaggctgttcgcggtgctcgagcagctgtccccagtgcgcgcatttcagtgggacccgcagcagccgcggctggccatctgcacgggaggcagcaggctctacctgtggtccccagcgggctgcatgtcggtgcaggtgcctggggaaggcgactttgcagtgctctctctgtgctggcatttaagcggagactcgatggccctcctcagcaaggatcacttctgcctctgcttcctggagacagaggcagtggtcggcacagcctgcagacagctgggcggccacacgtagcagcggtgcactaacgtgtgcagaaacagggctactctgtgtttccagtgtgggaaaaaacacagcttcaccaggaggttctccactgtggtggtctggattcagtgattgattctatttttctatagcaaagcatttttgtaaatatgtatggtataaaactgtagttttattatttaaaataaatacttgctgatttatacaact

SEQ ID NO: 2355 - protein, 460 aa, Homo sapiens
MNFSEVFKLSSLLCKFSPDGKYLASCVQYRLVVRDVNTLQILQLYTCLDQIQHIEWSADSLFILCAMYKRGLVQVWSLEQPEWHCKIDEGSAGLVASCWSPDGRHILNTTEFHLRITVWSLCTKSVSYIKYPKACLQGITFTRDGRYMALAERRDCKDYVSIFVCSDWQLLRHFDTDTQDLTGIEWAPNGCVLAVWDTCLEYKILLYSLDGRLLSTYSAYEWSLGIKSVAWSPSSQFLAVGSYDGKVRILNHVTWKMITEFGHPAAINDPKIVVYKEAEKSPQLGLGCLSFPPPRAGAGPLPSSESKYEIASVPVSLQTLKPVTDRANPKIGIGMLAFSPDSYFLATRNDNIPNAVWVWDIQKLRLFAVLEQLSPVRAFQWDPQQPRLAICTGGSRLYLWSPAGCMSVQVPGEGDFAVLSLCWHLSGDSMALLSKDHFCLCFLETEAVVGTACRQLGGHT

SEQ ID NO: 2356 - DNA, 6076 bp, Homo sapiens
gtgggaagcaagatgattccctggtaggctccacggggtctcagtgggaaatgcaggtggagggacacagcagccctggaagtcccgcggcgctgccacggggagggctggaccacccactgcggtgcctctccctcagcaggcacgccctcgtcggcctggttagaaaatcatcttttggcctcactgtgccagcctagtcagctctcagctccctgagtcagggaaaggggtggaaaagtggacagtccagcagcgcatgttctagaaccctctgcagatgcagccaggccagcgagcacacgcaggaggcagacggacaccttcttgggtgttgagtggctgctcctgcctcagggctgcagatgcaggctcacagccccctggtgagtcccggagtggctgcatccaatctccagatcctctgtcttcccataaaggagactgaacccgtggtggtttctagatcaagatttttctctgagtaactcagggttattataacatgcaacctatggtcactttgaaaaagctaatgaaaaagcacttggatttaactttgtgtcactcaattttggtataaaacaacaacaacagaaaaccaagaacaccaaatttaccgtaaccacagtaaaatacgcatttgaatattccggtaggagggcaggcatcccccaggtcctgatagatccactccagcagtcaggcctgtgcttggggacgcgtgggcgggttgaggattgagacggtctctgatgatgctaaagaagtgtttcctttctctttcccctttcccccaacagctgcggataaccgtctggtccttgtgcacaaaatccgtgtcttacatcaaatacccgaaagcttgtctgcagggaatcaccttcaccagggacggccgctacatggcgctggcagaacggcgcgactgcaaagattacgtgagcatcttcgtctgcagtgattggcagctcctgcgggtaaggcgtcccccagactggaataaagttgtcctgctgactgtggagggatcgagtgaagtagatccttccagattccaggggatctttggtaggatatggagcaaggtgatgttgtattaacaaagggcaggtgcgctgcgaatcacttccagtggcacccggttgtgtgttcaggagacttggtgaaaaggacgcgtgcccaggtgttttaaaagtgaatatgctgtcacatttgagcccttttccttgtcctgtgtgatggtgtttgcgcatgtgtgtgccacgtcgggagttggggggacgtggaagttcaccttgactgagggcctgcattaggcagggcgctctgccaggtgcccaggcacagagggcactgcccccacagcagacatatgaacacgattccagcacaatccatcattaaggtagagcaacctctggaatgctgtcagagtgcagaacccgggatccaggcagtgctctggaagggacttgtctgagctgggtctaaaggagtgagcctggccaggcaaggaaaggtgagggggagagtgtgcacatgagtgcaggtgcggggagaccaagccaccttcgggggctggccaggcaaggaaaggtgagggggagagtgtgcacacgagtgcaggcgcggggagaccaagccgccctcgggggctggccaggcaaggaaaggtgagggggagagtgtgcacacgagtgcaggcgcggggagaccaagccgcccttgggggctggccaggcactgacgctggcatctgtggcggtgcagccccagcagcagctctacagggatttcatgcatttccaggatagagctgttgagattttgtcaatttctatataaggaaattaagtgcgttaagaacatcagtcataaatgcaattatttatttacgaaaatattttccaaatttaatgtttcccccccttcctttggaagcattttgatacggacacccaggatctcacagggattgagtgggccccaaacggctgtgtgctggcagtgtgggacacctgcttggaggtatgaagatgaccaggtgacatgtttgctttcgagagcttttcccggaatttcatgctttctgaatgctgcaatatagtttgctttatcttatttcagataacaagttgagctttgttttaaaagacagggtcttgctctgtcacccaggctggagtgcagtggtgtgatcacggcccactgcagcctcgacctcctggactcaagtgatcctcctacctcagcctcccaagtagctgggaccacaagcatgcaccaccacgcccggctaatttttgtattctttgtagagatggggtttcaccgtgttgcccagactgctcttgaacttctgtgttcaagtgatctgccagcttcggcctcccaaagtgctgggattacaggcgtgagccacagtgcccggccgagttgaacttttatcagcgagccattaggttgacctcccaatttcccctttttcctcatgctctcactgcctctccgtgactatctcagtactagctggcagttccagcttttccacggccacgcggacagtcctgccagctttgtgctatctgcaccaatgtcactctgcagcacccgcgtctgtggtgtgttcctggcgacgggggtgtattcattattaactgaaatgtctcatctgcagtacaagattctgctgtactcattggatggccggttgttgtccacgtacagcgcttacgagtggtccctgggcatcaagtctgtggcctggagccccagcagtcagttcctggcagttgggagctatgatggaaaggtgggaaccagtgcagggcactcaggaagtccgaccgcccagcgggccgggccctgcctcacctgtgcatggtttccttcctcaggtgcgcatccttaatcacgtgacttggaaaatgatcacggagtttgggcatcctgcagccattaatgatcccaagatagtaagtctggaacacgtgtttctgcctgagcaggctgttggggagggcggtgggaaactgctccttcactttgctttcttgattgtggtttattatttaaccgggcacttccatcaccgtaaacttgctactgtgacatttcacgcgtctggccctgccctggcctttgttcttcctcctccacgctgcccaaagggtctgaagtgggccttgccctggcctgtcctctgccgctgccaccccagtccagttttctcctttgtggtctgtctggatgcagatccctgtgctgtacagagtggccagggtctcctgcccccaaacactgggcatctgctgtcgtgccaggcactgtgctctgggccgcagccagagaagaagagacagacccctgcacttgcagagtgcggctggagagacagggaaggggctggagagctgggtgtctccacggggtggcagggagtggccaccagcgagggatcgcaggcacagatgctgcaccagtgatcagggactcggggagggagcgttccaggccaagggaacaggaaatgcaaaggccccgaggagtgggccacgcatccatgtgtgcagcgggcactgcgctgggagccagagacaaatgctgccctcctggtgttgacctgtaaccgacagagctgagtgaaaggcggcttggattcgatgaagaggccagtgagtggctggggctgcgcatgccagatcagccactgccggggatgcatcctggaggggtgtttaagtgaagaccaggaggaggagctgcgcggtgtctgggcagaaagggtgtttcaggcagaggggcctcctgacgtggccagtggcttgtgtggctggaggccagggtgtctggacaggtgagcccgagcagggctggccacacaggtcctgaaggtttgcctgtgattcctgcattctccaaatcccttcgccacacagcagcagagcatgctttaaaggcatgaaccaggccaggtgactcccttacctggggctcttcaggggcgtaggggctgcccgccttccactgagcctgggccgctgtcctttgcttgccaggctctcgggcacagatgcccccacctcgggtctgtgtctgctgctcccggggcctctgctgtgttggtgcaagtgttctctgtatcctcttatcacggagggaaggctgagcccactcccttgctggatgatggtggctgcagtggtctcccgtctgtaatcacagggcacacatttgctgcctgtgtctcaaagggtgggctcctcagcaggacacgagagagggtggctgggtgatctcagctctcgggactgcggggttcgtgcttccgtctctcccggtggcagcaggaccagctgtcatggcaggcacacctgttgaccatgcgctgtcatgggcatttgccacgtccatccttggcttccgggtccctgtcctgagccgggcgtggccaccttgtgtctttcaggtggtgtataaggaggccgagaagagcccacagctgggactgggctgcctctccttcccgccgccccgggccggggccggccctctcccgagctcagagagtaaatgtaagtagcacatgtgatgtcatttgttttccttttttaatgcaagattcctcgttgtccagataaacttcggatgttccttatgtttaaaaaaaaaaactttttttcccttccatgcttccagccagtgtgcccctcagcctgttggctggaggttgactagggtctgaattgcgcagtgggccgtgaaggtgcggcttctgttactgaatatgagccctggagacccggatctgacagcgggagctccgaggggatgtttttccggagctccgagaatgatgtttttcaaagaaacacttttccgtgggtggcgctcagagtgggtctggaacccggcggtgctcccgagcgctgtctccggcttgaggcccggttctgatgcagcctcttgactctgggcatttcctatgtgtctgtttcctcatcgctgaaatgggcatagtaaaagcacccatcccacaggggcatgagggcatctgaaggttgcaggtagaggaagcggtgccccaagtgccgacgggcccaccccggggctcggtgtgtgctcaggatgggggtcaggacaggtgcagcctggcacacaggaggcgctccccaggagcccaggggcgtccttgttccacagcccctgcttctgctgtgatgatggttcttccacagccggaaagtctaagggtactgacgctgaggtggaagggattgtgaactcagatgctggtagtcgacagaaaagtgctgaggagttggagctgctgagattgcagctaggacctgtccatgtccctctccagtcagcccctggcacgtggggtccaccccccacctagtcgggcctggcaggtgatggtgccactctcatccggggcacttgcgggcaggcccctcgctgcggctgccaggctttgcttagctcttcctgcccttgggccgcactttcctcccctttgaacagaggagctgggttcgcgatgcccgatgcaggcacagcagcctctcagccgcgtgcgtacttcccgaaagggtgacaatggcgtgttcttcctgttggtgttctagatgagatcgcctctgtcccagtctccttacagacactgaaacctgttaccgacagagcaaacccgaaaatcggcataggaatgctggcatttagtcctgacagctacttcctggcgacaaggaacggtcagttgtgctgacgcaggtgctgtctcaccctttactgtgtcctgtggccccaggtgtagaagcgactggaaaagaaaatgaagttgggggtttccgacacgtcacctcctttcacgtttctgcagtagccgaggtgctcacagaagctccttggaggcgctgggcctttgtcctgcagcagccgcaggtccgcgcatgagtcaggaggcctccaccctgctcacttgctccactctgctgagtagaaagcagggctgggcacactgcagcccgccttttgttaagggtttctccatttgtaaagggctaaa

SEQ ID NO: 2357 - protein, 115 aa, Homo sapiens
MMLKKCFLSLSPFPQQLRITVWSLCTKSVSYIKYPKACLQGITFTRDGRYMALAERRDCKDYVSIFVCSDWQLLRVRRPPDWNKVVLLTVEGSSEVDPSRFQGIFGRIWSKVMLY

SEQ ID NO: 2358 - DNA, 794 bp, Homo sapiens
agtactagctggcagttccagcttttccacggccacgcggacagtcctgccagctttgtgctatctgcaccaatgtcactctgcagcacccgcgtctgtggtgtgttcctggcgacgggggtgtattcattattaactgaaatgtctcatctgcagtacaagattctgctgtactcattggatggccggttgttgtccacgtacagcgcttacgagtggtccctgggcatcaagtctgtggcctggagccccagcagtcagttcctggcagttgggagctatgatggaaaggtgcgcatccttaatcacgtgacttggaaaatgatcacggagtttgggcatcctgcagccattaatgatcccaagatagtggtgtataaggaggccgagaagagcccacagctgggactgggctgcctctccttcccgccgccccgggccggggccggccctctcccgagctcagagagtaaatgtaagtagcacatgtgatgtcatttgttttccttttttaatgcaagattcctcgttgtccagataaacttcggatgttccttatgtttaaaaaaaaaaactttttttcccttccatgcttccagccagtgtgcccctcagcctgttggctggaggttgactagggtctgaattgcgcagtgggccgtgaaggtgcggcttctgttactgaatatgagccctggagacccggatctgacagcgggagctccgaggggatgtttttccggagctccgagaatgatgtttttcaaagaaacacttttccgtgggtggcgctc

SEQ ID NO: 2359 - protein, 136 aa, Homo sapiens
MSLCSTRVCGVFLATGVYSLLTEMSHLQYKILLYSLDGRLLSTYSAYEWSLGIKSVAWSPSSQFLAVGSYDGKVRILNHVTWKMITEFGHPAAINDPKIVVYKEAEKSPQLGLGCLSFPPPRAGAGPLPSSESKCK

SEQ ID NO: 2360 - DNA, 411 bp, Homo sapiens
gacagtcctgccagctttgtgctatctgcaccaatgtcactctgcagcacccgcgtctgtggtgtgttcctggcgacgggggtgtattcattattaactgaaatgtctcatctgcagtacaagattctgctgtactcattggatggccggttgttgtccacgtacagcgcttacgagtggtccctgggcatcaagtctgtggcctggagccccagcagtcagttcctggcagttgggagctatgatggaaaggtgcgcatccttaatcacgtgacttggaaaatgatcacggagtttgggcatcctgcagccattaatgatcccaagatagtaagtctggaacacgtgtttctgcctgagcaggctgttggggagggcggtgggaaactgctccttcactttgctttcttg

SEQ ID NO: 2361 - protein, 125 aa, Homo sapiens
MSLCSTRVCGVFLATGVYSLLTEMSHLQYKILLYSLDGRLLSTYSAYEWSLGIKSVAWSPSSQFLAVGSYDGKVRILNHVTWKMITEFGHPAAINDPKIVSLEHVFLPEQAVGEGGGKLLLHFAF

SEQ ID NO: 2362 - DNA, 2849 bp, Homo sapiens
aggggacgcagcgaaaccggggcccgcgccaggccagccgggacggacgccgatgcccggggctgcgacggctgcagagcgagctgccctcggaggccggcgtggggaagatggcccagtccaccgccacctcccctgatgggggcaccacgtttgagcacctctggagctctctggaaccagacagcacctacttcgaccttccccagtcaagccgggggaataatgaggtggtgggcggaacggattccagcatggacgtcttccacctggagggcatgactacatctgtcatggcccagttcaatctgctgagcagcaccatggaccagatgagcagccgcgcggcctcggccagcccctacaccccagagcacgccgccagcgtgcccacccactcgccctacgcacaacccagctccaccttcgacaccatgtcgccggcgcctgtcatcccctccaacaccgactaccccggaccccaccactttgaggtcactttccagcagtccagcacggccaagtcagccacctggacgtactccccgctcttgaagaaactctactgccagatcgccaagacatgccccatccagatcaaggtgtccaccccgccacccccaggcaccgccatccgggccatgcctgtttacaagaaagcggagcacgtgaccgacgtcgtgaaacgctgccccaaccacgagctcgggagggacttcaacgaaggacagtctgctccagccagccacctcatccgcgtggaaggcaataatctctcgcagtatgtggatgaccctgtcaccggcaggcagagcgtcgtggtgccctatgagccaccacaggtggggacggaattcaccaccatcctgtacaacttcatgtgtaacagcagctgtgtagggggcatgaaccggcggcccatcctcatcatcatcaccctggagatgcgggatgggcaggtgctgggccgccggtcctttgagggccgcatctgcgcctgtcctggccgcgaccgaaaagctgatgaggaccactaccgggagcagcaggccctgaacgagagctccgccaagaacggggccgccagcaagcgtgccttcaagcagagcccccctgccgtccccgcccttggtgccggtgtgaagaagcggcggcatggagacgaggacacgtactaccttcaggtgcgaggccgggagaactttgagatcctgatgaagctgaaagagagcctggagctgatggagttggtgccgcagccactggtggactcctatcggcagcagcagcagctcctacagaggccgagtcacctacagcccccgtcctacgggccggtcctctcgcccatgaacaaggtgcacgggggcatgaacaagctgccctccgtcaaccagctggtgggccagcctcccccgcacagttcggcagctacacccaacctggggcccgtgggccccgggatgctcaacaaccatggccacgcagtgccagccaacggcgagatgagcagcagccacagcgcccagtccatggtctcggggtcccactgcactccgccacccccctaccacgccgaccccagcctcgtcagttttttaacaggattggggtgtccaaactgcatcgagtatttcacctcccaagggttacagagcatttaccacctgcagaacctgaccattgaggacctgggggccctgaagatccccgagcagtaccgcatgaccatctggcggggcctgcaggacctgaagcagggccacgactacagcaccgcgcagcagctgctccgctctagcaacgcggccaccatctccatcggcggctcaggggaactgcagcgccagcgggtcatggaggccgtgcacttccgcgtgcgccacaccatcaccatccccaaccgcggcggcccaggcggcggccctgacgagtgggcggacttcggcttcgacctgcccgactgcaaggcccgcaagcagcccatcaaggaggagttcacggaggccgagatccactgagggcctcgcctggctgcagcctgcgccaccgcccagagacccaagctgcctcccctctccttcctgtgtgtccaaaactgcctcaggaggcaggaccttcgggctgtgcccggggaaaggcaaggtccggcccatccccaggcacctcacaggccccaggaaaggcccagccaccgaagccgcctgtggacagcctgagtcacctgcagaaccttctggagctgccctagtgctgggcttgtggggcgggggctggcccactctcagccctgccactgccccggcgtgctccatggcaggcgtgggtggggaccgcagcgtcggctccgacttccaggcttcatcctagagactgtcatctcccaaccaggcgaggtccttccaaaggaaaggatcctctttgctgatggactgccaaaaagtattttgcgacatcttttggttctggatagtagtgagcagccaagtgactgtgtctgaaacaccagtgtattttcagggaatgtccctaactgcgtcttgcccgcgccgggggctggggactctctctgctggacttgggactggcctctgcccccagcacgctgtattctgcaggaccgcctccttcctgcccctaacaacaaccacagtgttgctgaaattggagaaaactggggagggcgcaaccccccccaggcgcggggaagcatgtggtaccgcctcagccagtgcccctcagcctggccacagtcgcctctcctcggggacccctcagcagaaagggacagcctgtccttagaggactggaaattgtcaatatttgataaaatgatacccttttctaca

SEQ ID NO: 2363 - protein, 636 aa, Homo sapiens; identical to SEQ ID NO: 10

SEQ ID NO: 2364 - DNA, 756 bp, Homo sapiens
cactacagggaacggcccaggaacccatccacccgtccccagctctcatcactctgacctctggctttttgtttcctggggcatttcacagcaaattccacctatgagaccgtctcatccgtaatacaccagtacatgcttccagcagcttggtgacatgaaaggacctccgtggctggccttactccctgtggatgccacagctgcaggatcctggggccccaacagaagccggtgaaggaagagttcctgctccagcagaacaaaactgccctttgcccagaaatcctgcaaactgaggctggacgacttgaaatactcatcagcgagattaccacgaagcccaggtgcgagggaccctcacgcctgttgctgcgtgggccgcccagacatcgccagagaccaaaccgcagaagatgctcggagcccaacatctacaaacctgccccgccacggcccccaggctcagaaactggtttttagtcagctccaatgattagctttttttttttttcttttgtttccatagaaatgcctcttcaaagcattatgggacaacacacccacccagtttctgtaccgtggagcttcttggggaagtttcagactaggaaacaatggggctcaggacacatcaccccaaagtatgactgtaggagaccagaatacgccacccctaaatatgactataggagaccagaatacgtcaccccaaaatatgactgtaggagaccagaatacgccaccccaaaatat

SEQ ID NO: 2365 - protein, 34 aa, Homo sapiens
MPQLQDPGAPTEAGEGRVPAPAEQNCPLPRNPAN

SEQ ID NO: 2366 - DNA, 2826 bp, Homo sapiens
ggattcagccagttgacagaactaagggagatgggaaaagcgaaaatgccaacaaacggcccgcatgttccccagcatcctcggctcctgcctcactagctgcggagcctctcccgctcggtccacgctgccgggcggccacgaccgtgacccttcccctcgggccgcccagatccatgcctcgtcccacgggacaccagttccctggcgtgtgcagaccccccggcgcctaccatgctgtacgtcggtgaccccgcacggcacctcgccacggcccagttcaatctgctgagcagcaccatggaccagatgagcagccgcgcggcctcggccagcccctacaccccagagcacgccgccagcgtgcccacccactcgccctacgcacaacccagctccaccttcgacaccatgtcgccggcgcctgtcatcccctccaacaccgactaccccggaccccaccactttgaggtcactttccagcagtccagcacggccaagtcagccacctggacgtactccccgctcttgaagaaactctactgccagatcgccaagacatgccccatccagatcaaggtgtccaccccgccacccccaggcaccgccatccgggccatgcctgtttacaagaaagcggagcacgtgaccgacgtcgtgaaacgctgccccaaccacgagctcgggagggacttcaacgaaggacagtctgctccagccagccacctcatccgcgtggaaggcaataatctctcgcagtatgtggatgaccctgtcaccggcaggcagagcgtcgtggtgccctatgagccaccacaggtggggacggaattcaccaccatcctgtacaacttcatgtgtaacagcagctgtgtagggggcatgaaccggcggcccatcctcatcatcatcaccctggagatgcgggatgggcaggtgctgggccgccggtcctttgagggccgcatctgcgcctgtcctggccgcgaccgaaaagctgatgaggaccactaccgggagcagcaggccctgaacgagagctccgccaagaacggggccgccagcaagcgtgccttcaagcagagcccccctgccgtccccgcccttggtgccggtgtgaagaagcggcggcatggagacgaggacacgtactaccttcaggtgcgaggccgggagaactttgagatcctgatgaagctgaaagagagcctggagctgatggagttggtgccgcagccactggtggactcctatcggcagcagcagcagctcctacagaggccgagtcacctacagcccccgtcctacgggccggtcctctcgcccatgaacaaggtgcacgggggcatgaacaagctgccctccgtcaaccagctggtgggccagcctcccccgcacagttcggcagctacacccaacctggggcccgtgggccccgggatgctcaacaaccatggccacgcagtgccagccaacggcgagatgagcagcagccacagcgcccagtccatggtctcggggtcccactgcactccgccacccccctaccacgccgaccccagcctcgtcagttttttaacaggattggggtgtccaaactgcatcgagtatttcacctcccaagggttacagagcatttaccacctgcagaacctgaccattgaggacctgggggccctgaagatccccgagcagtaccgcatgaccatctggcggggcctgcaggacctgaagcagggccacgactacagcaccgcgcagcagctgctccgctctagcaacgcggccaccatctccatcggcggctcaggggaactgcagcgccagcgggtcatggaggccgtgcacttccgcgtgcgccacaccatcaccatccccaaccgcggcggcccaggcggcggccctgacgagtgggcggacttcggcttcgacctgcccgactgcaaggcccgcaagcagcccatcaaggaggagttcacggaggccgagatccactgagggcctcgcctggctgcagcctgcgccaccgcccagagacccaagctgcctcccctctccttcctgtgtgtccaaaactgcctcaggaggcaggaccttcgggctgtgcccggggaaaggcaaggtccggcccatccccaggcacctcacaggccccaggaaaggcccagccaccgaagccgcctgtggacagcctgagtcacctgcagaaccttctggagctgccctagtgctgggcttgtggggcgggggctggcccactctcagccctgccactgccccggcgtgctccatggcaggcgtgggtggggaccgcagcgtcggctccgacttccaggcttcatcctagagactgtcatctcccaaccaggcgaggtccttccaaaggaaaggatcctctttgctgatggactgccaaaaagtattttgcgacatcttttggttctggatagtagtgagcagccaagtgactgtgtctgaaacaccagtgtattttcagggaatgtccctaactgcgtcttgcccgcgccgggggctggggactctctctgctggacttgggactggcctctgcccccagcacgctgtattctgcaggaccgcctccttcctgcccctaacaacaaccacagtgttgctgaaattggagaaaactggggagggcgcaaccccccccaggcgcggggaagcatgtggtaccgcctcagccagtgcccctcagcctggccacagtcgcctctcctcggggacccctcagcagaaagggacagcctgtccttagaggactggaaattgtcaatatttgataaaatgatacccttttctaca

SEQ ID NO: 2367 - protein, 587 aa, Homo sapiens
MLYVGDPARHLATAQFNLLSSTMDQMSSRAASASPYTPEHAASVPTHSPYAQPSSTFDTMSPAPVIPSNTDYPGPHHFEVTFQQSSTAKSATWTYSPLLKKLYCQIAKTCPIQIKVSTPPPPGTAIRAMPVYKKAEHVTDVVKRCPNHELGRDFNEGQSAPASHLIRVEGNNLSQYVDDPVTGRQSVVVPYEPPQVGTEFTTILYNFMCNSSCVGGMNRRPILIIITLEMRDGQVLGRRSFEGRICACPGRDRKADEDHYREQQALNESSAKNGAASKRAFKQSPPAVPALGAGVKKRRHGDEDTYYLQVRGRENFEILMKLKESLELMELVPQPLVDSYRQQQQLLQRPSHLQPPSYGPVLSPMNKVHGGMNKLPSVNQLVGQPPPHSSAATPNLGPVGPGMLNNHGHAVPANGEMSSSHSAQSMVSGSHCTPPPPYHADPSLVSFLTGLGCPNCIEYFTSQGLQSIYHLQNLTIEDLGALKIPEQYRMTIWRGLQDLKQGHDYSTAQQLLRSSNAATISIGGSGELQRQRVMEAVHFRVRHTITIPNRGGPGGGPDEWADFGFDLPDCKARKQPIKEEFTEAEIH

SEQ ID NO: 2368 - DNA, 2677 bp, Homo sapiens
ggattcagccagttgacagaactaagggagatgggaaaagcgaaaatgccaacaaacggcccgcatgttccccagcatcctcggctcctgcctcactagctgcggagcctctcccgctcggtccacgctgccgggcggccacgaccgtgacccttcccctcgggccgcccagatccatgcctcgtcccacgggacaccagttccctggcgtgtgcagaccccccggcgcctaccatgctgtacgtcggtgaccccgcacggcacctcgccacggcccagttcaatctgctgagcagcaccatggaccagatgagcagccgcgcggcctcggccagcccctacaccccagagcacgccgccagcgtgcccacccactcgccctacgcacaacccagctccaccttcgacaccatgtcgccggcgcctgtcatcccctccaacaccgactaccccggaccccaccactttgaggtcactttccagcagtccagcacggccaagtcagccacctggacgtactccccgctcttgaagaaactctactgccagatcgccaagacatgccccatccagatcaaggtgtccaccccgccacccccaggcaccgccatccgggccatgcctgtttacaagaaagcggagcacgtgaccgacgtcgtgaaacgctgccccaaccacgagctcgggagggacttcaacgaaggacagtctgctccagccagccacctcatccgcgtggaaggcaataatctctcgcagtatgtggatgaccctgtcaccggcaggcagagcgtcgtggtgccctatgagccaccacaggtggggacggaattcaccaccatcctgtacaacttcatgtgtaacagcagctgtgtagggggcatgaaccggcggcccatcctcatcatcatcaccctggagatgcgggatgggcaggtgctgggccgccggtcctttgagggccgcatctgcgcctgtcctggccgcgaccgaaaagctgatgaggaccactaccgggagcagcaggccctgaacgagagctccgccaagaacggggccgccagcaagcgtgccttcaagcagagcccccctgccgtccccgcccttggtgccggtgtgaagaagcggcggcatggagacgaggacacgtactaccttcaggtgcgaggccgggagaactttgagatcctgatgaagctgaaagagagcctggagctgatggagttggtgccgcagccactggtggactcctatcggcagcagcagcagctcctacagaggccgccccgggatgctcaacaaccatggccacgcagtgccagccaacggcgagatgagcagcagccacagcgcccagtccatggtctcggggtcccactgcactccgccacccccctaccacgccgaccccagcctcgtcagttttttaacaggattggggtgtccaaactgcatcgagtatttcacctcccaagggttacagagcatttaccacctgcagaacctgaccattgaggacctgggggccctgaagatccccgagcagtaccgcatgaccatctggcggggcctgcaggacctgaagcagggccacgactacagcaccgcgcagcagctgctccgctctagcaacgcggccaccatctccatcggcggctcaggggaactgcagcgccagcgggtcatggaggccgtgcacttccgcgtgcgccacaccatcaccatccccaaccgcggcggcccaggcggcggccctgacgagtgggcggacttcggcttcgacctgcccgactgcaaggcccgcaagcagcccatcaaggaggagttcacggaggccgagatccactgagggcctcgcctggctgcagcctgcgccaccgcccagagacccaagctgcctcccctctccttcctgtgtgtccaaaactgcctcaggaggcaggaccttcgggctgtgcccggggaaaggcaaggtccggcccatccccaggcacctcacaggccccaggaaaggcccagccaccgaagccgcctgtggacagcctgagtcacctgcagaaccttctggagctgccctagtgctgggcttgtggggcgggggctggcccactctcagccctgccactgccccggcgtgctccatggcaggcgtgggtggggaccgcagcgtcggctccgacttccaggcttcatcctagagactgtcatctcccaaccaggcgaggtccttccaaaggaaaggatcctctttgctgatggactgccaaaaagtattttgcgacatcttttggttctggatagtagtgagcagccaagtgactgtgtctgaaacaccagtgtattttcagggaatgtccctaactgcgtcttgcccgcgccgggggctggggactctctctgctggacttgggactggcctctgcccccagcacgctgtattctgcaggaccgcctccttcctgcccctaacaacaaccacagtgttgctgaaattggagaaaactggggagggcgcaaccccccccaggcgcggggaagcatgtggtaccgcctcagccagtgcccctcagcctggccacagtcgcctctcctcggggacccctcagcagaaagggacagcctgtccttagaggactggaaattgtcaatatttgataaaatgatacccttttctaca

SEQ ID NO: 2369 - protein, 426 aa, Homo sapiens
MLYVGDPARHLATAQFNLLSSTMDQMSSRAASASPYTPEHAASVPTHSPYAQPSSTFDTMSPAPVIPSNTDYPGPHHFEVTFQQSSTAKSATWTYSPLLKKLYCQIAKTCPIQIKVSTPPPPGTAIRAMPVYKKAEHVTDVVKRCPNHELGRDFNEGQSAPASHLIRVEGNNLSQYVDDPVTGRQSVVVPYEPPQVGTEFTTILYNFMCNSSCVGGMNRRPILIIITLEMRDGQVLGRRSFEGRICACPGRDRKADEDHYREQQALNESSAKNGAASKRAFKQSPPAVPALGAGVKKRRHGDEDTYYLQVRGRENFEILMKLKESLELMELVPQPLVDSYRQQQQLLQRPPRDAQQPWPRSASQRRDEQQPQRPVHGLGVPLHSATPLPRRPQPRQFFNRIGVSKLHRVFHLPRVTEHLPPAEPDH

SEQ ID NO: 2370 - DNA, 2732 bp, Homo sapiens
ggattcagccagttgacagaactaagggagatgggaaaagcgaaaatgccaacaaacggcccgcatgttccccagcatcctcggctcctgcctcactagctgcggagcctctcccgctcggtccacgctgccgggcggccacgaccgtgacccttcccctcgggccgcccagatccatgcctcgtcccacgggacaccagttccctggcgtgtgcagaccccccggcgcctaccatgctgtacgtcggtgaccccgcacggcacctcgccacggcccagttcaatctgctgagcagcaccatggaccagatgagcagccgcgcggcctcggccagcccctacaccccagagcacgccgccagcgtgcccacccactcgccctacgcacaacccagctccaccttcgacaccatgtcgccggcgcctgtcatcccctccaacaccgactaccccggaccccaccactttgaggtcactttccagcagtccagcacggccaagtcagccacctggacgtactccccgctcttgaagaaactctactgccagatcgccaagacatgccccatccagatcaaggtgtccaccccgccacccccaggcaccgccatccgggccatgcctgtttacaagaaagcggagcacgtgaccgacgtcgtgaaacgctgccccaaccacgagctcgggagggacttcaacgaaggacagtctgctccagccagccacctcatccgcgtggaaggcaataatctctcgcagtatgtggatgaccctgtcaccggcaggcagagcgtcgtggtgccctatgagccaccacaggtggggacggaattcaccaccatcctgtacaacttcatgtgtaacagcagctgtgtagggggcatgaaccggcggcccatcctcatcatcatcaccctggagatgcgggatgggcaggtgctgggccgccggtcctttgagggccgcatctgcgcctgtcctggccgcgaccgaaaagctgatgaggaccactaccgggagcagcaggccctgaacgagagctccgccaagaacggggccgccagcaagcgtgccttcaagcagagcccccctgccgtccccgcccttggtgccggtgtgaagaagcggcggcatggagacgaggacacgtactaccttcaggtgcgaggccgggagaactttgagatcctgatgaagctgaaagagagcctggagctgatggagttggtgccgcagccactggtggactcctatcggcagcagcagcagctcctacagaggccgagtcacctacagcccccgtcctacgggccggtcctctcgcccatgaacaaggtgcacgggggcatgaacaagctgccctccgtcaaccagctggtgggccagcctcccccgcacagttcggcagctacacccaacctggggcccgtgggccccgggatgctcaacaaccatggccacgcagtgccagccaacggcgagatgagcagcagccacagcgcccagtccatggtctcggggtcccactgcactccgccacccccctaccacgccgaccccagcctcgtcaggacctgggggccctgaagatccccgagcagtaccgcatgaccatctggcggggcctgcaggacctgaagcagggccacgactacagcaccgcgcagcagctgctccgctctagcaacgcggccaccatctccatcggcggctcaggggaactgcagcgccagcgggtcatggaggccgtgcacttccgcgtgcgccacaccatcaccatccccaaccgcggcggcccaggcggcggccctgacgagtgggcggacttcggcttcgacctgcccgactgcaaggcccgcaagcagcccatcaaggaggagttcacggaggccgagatccactgagggcctcgcctggctgcagcctgcgccaccgcccagagacccaagctgcctcccctctccttcctgtgtgtccaaaactgcctcaggaggcaggaccttcgggctgtgcccggggaaaggcaaggtccggcccatccccaggcacctcacaggccccaggaaaggcccagccaccgaagccgcctgtggacagcctgagtcacctgcagaaccttctggagctgccctagtgctgggcttgtggggcgggggctggcccactctcagccctgccactgccccggcgtgctccatggcaggcgtgggtggggaccgcagcgtcggctccgacttccaggcttcatcctagagactgtcatctcccaaccaggcgaggtccttccaaaggaaaggatcctctttgctgatggactgccaaaaagtattttgcgacatcttttggttctggatagtagtgagcagccaagtgactgtgtctgaaacaccagtgtattttcagggaatgtccctaactgcgtcttgcccgcgccgggggctggggactctctctgctggacttgggactggcctctgcccccagcacgctgtattctgcaggaccgcctccttcctgcccctaacaacaaccacagtgttgctgaaattggagaaaactggggagggcgcaaccccccccaggcgcggggaagcatgtggtaccgcctcagccagtgcccctcagcctggccacagtcgcctctcctcggggacccctcagcagaaagggacagcctgtccttagaggactggaaattgtcaatatttgataaaatgatacccttttctaca

SEQ ID NO: 2371 - protein, 450 aa, Homo sapiens
MLYVGDPARHLATAQFNLLSSTMDQMSSRAASASPYTPEHAASVPTHSPYAQPSSTFDTMSPAPVIPSNTDYPGPHHFEVTFQQSSTAKSATWTYSPLLKKLYCQIAKTCPIQIKVSTPPPPGTAIRAMPVYKKAEHVTDVVKRCPNHELGRDFNEGQSAPASHLIRVEGNNLSQYVDDPVTGRQSVVVPYEPPQVGTEFTTILYNFMCNSSCVGGMNRRPILIIITLEMRDGQVLGRRSFEGRICACPGRDRKADEDHYREQQALNESSAKNGAASKRAFKQSPPAVPALGAGVKKRRHGDEDTYYLQVRGRENFEILMKLKESLELMELVPQPLVDSYRQQQQLLQRPSHLQPPSYGPVLSPMNKVHGGMNKLPSVNQLVGQPPPHSSAATPNLGPVGPGMLNNHGHAVPANGEMSSSHSAQSMVSGSHCTPPPPYHADPSLVRTWGP

SEQ ID NO: 2372 - DNA, 351 bp, Homo sapiens
cctgggacagccttgggggctggaattggcagcagctggaggtggccggagacagcggagggaggggagtaagctgtggacatggtggggtggtccctcttcagcttttaagggcccaagagtgagttcctctggctgctccagaaagtgaagagagaagagccaaccccggctcgggccacgagccccgaggcgctgaccacagccagagcaggcctgctggaagctccgtccctgctgcagatccctgcgccacatgatatcagcaattgctgcaatttcgccctaagtactcttgtttcccctaataatccacgtttcatctccacaataaacattgttagaactctt

SEQ ID NO: 2373 - protein, 79 aa, Homo sapiens
GPKSEFLWLLQKVKREEPTPARATSPEALTTARAGLLEAPSLLQIPAPHDISNCCNFALSTLVSPNNPRFISTINIVRT

SEQ ID NO: 2374 - DNA, 1349 bp, Homo sapiens
ccaagagaactgaaatgaagcccgttggtctcagcctggcttgagccaacatgaggctctctgctgccttttgttttcttaggttttgctgaagaaactcaagtggggtgccagggccggccacagaggccacgggcttcctgcctgtgaggagccgccctgtttgtctgagccctttggagatttaggttgagtcatgagaaccggtcattggaacatacactttattatgttacaaaaacaaaaatccccactgaaacacagctaaaaaaataacacattttcccaagattacattaccaaaaacagttgttatgtcattggagggcgtccattaatactgctcggagaagcacgatcttacacgaaaaacacggatgggatttcgttttcaccttaaagcattaaagtgctttaactggtaacagaggagtggatgtttgtgcgttggagacactgactgttctgagtgacaagtggctctgtgccaggatactgcgggtcgggctcctgggtacagcaagggcttcccagcagcccaggcctggtgggaacgctgggggaatgggggagagtcgctgtttctgaccagagcgacttggacagatgtgagctgacctgcctggcgagctccttctgccttgcctctctgagcagactcaggaccactgcctgtcccccttggccccaggagtgccagcagcctccctccaacccctgcactgctgggaaaaccatccgccttcaagatttatttgttgatttgtttagttttataaaaacatatcacttaaaggattcttgttcctgggaatttgcattttctcctgaccacggcgaagtctcaactctgtctactttcacagctgcttctccagtgcaaggaggctgcatgggctccctagacaggtgcagctggggccatctggctgctccgtgttctggccggcttccttggacatctggctggggttccagtgacagctgcccctgggcctctcccagcccccccagcccccccagcccttcccaggagcacactacaggggctcttgggacagcctcactggactcagggtggacaggtaacgtacctaagaaacaaatcaacaagccctctggaactgaagcacatctgcgctgggctgaggaaccccgggtgtcaggatgggcccccgcggctcctgaagtggaacatgggggaagagtgggggcttcaggaggtggcctcgggtagcaggtgcccagcccccaagagatgggtgtggtgcctggggcatgggtcttagcctttctggtctcagcttcctcatctacaaaatggcaataagatggagagctgaggtgac

SEQ ID NO: 2375 - protein, 114 aa, Homo sapiens [sequence omitted]

SEQ ID NO: 2376 - DNA, 1869 bp, Homo sapiens
gaaaagcccatattctgttcttgtcacctgaatctaggcttcctctttggatgtgaacgcgggaatgaacagtggctgttttccacccaaaggggcgtggagaccttttggaaacgggctttctcctttccattttgcagccgggggcgggtggaaaccttccttcgaagggtagtgccttggggagcagcagacctgctctgagtccagcttagctttccaaaattctgtgtggaacttactggagatgtttttatatatttgaaaataatggcctgtatttctcacgctatacttaaaaaaaataactaaccttttaaacaaagatattcaaactcacccttgtgctgaaagcactcacatttctgtgttcattcctgaaagggcgttttagagtccccgtttctacgttctatgtggcaccctcttgccgagggaacatccagaatccctccacttcctgtctagtttgaggcctcaacaccttcatgatccagagtcctgcggctatgagggggtgggcccaccaccgcccagccctccttggtggacgtggggacaggtaggagcctagggaaaggggtgggcgggctctggtgtgacggcgtgagcgctagccaggaagatggggccagggcggccacagaggccacgggcttcctgcctgtgaggagccgccctgtttgtctgagccctttggagatttaggttgagtcatgagaaccggtcattggaacatacactttattatgttacaaaaacaaaaatccccactgaaacacagctaaaaaaataacacattttcccaagattacattaccaaaaacagttgttatgtcattggagggcgtccattaatactgctcggagaagcacgatcttacacgaaaaacacggatgggatttcgttttcaccttaaagcattaaagtgctttaactggtaacagaggagtggatgtttgtgcgttggagacactgactgttctgagtgacaagtggctctgtgccaggatactgcgggtcgggctcctgggtacagcaagggcttcccagcagcccaggcctggtgggaacgctgggggaatgggggagagtcgctgtttctgaccagagcgacttggacagatgtgagctgacctgcctggcgagctccttctgccttgcctctctgagcagactcaggaccactgcctgtcccccttggccccaggagtgccagcagcctccctccaacccctgcactgctgggaaaaccatccgccttcaagatttatttgttgatttgtttagttttataaaaacatatcacttaaaggattcttgttcctgggaatttgcattttctcctgaccacggcgaagtctcaactctgtctactttcacagctgcttctccagtgcaaggaggctgcatgggctccctagacaggtgcagctggggccatctggctgctccgtgttctggccggcttccttggacatctggctggggttccagtgacagctgcccctgggcctctcccagcccccccagcccccccagcccttcccaggagcacactacaggggctcttgggacagcctcactggactcagggtggacaggtaacgtacctaagaaacaaatcaacaagccctctggaactgaagcacatctgcgctgggctgaggaaccccgggtgtcaggatgggcccccgcggctcctgaagtggaacatgggggaagagtgggggcttcaggaggtggcctcgggtagcaggtgcccagcccccaagagatgggtgtggtgcctggggcatgggtcttagcctttctggtctcagcttcctcatctacaaaatggcaataagatggagagctgaggtgac

SEQ ID NO: 2377 - protein, 114 aa, Homo sapiens [sequence omitted]

SEQ ID NO: 2378 - DNA, 7335 bp, Homo sapiens
gggttgttgcgggatctcacaggctttaaaccgcggcgccgcggcgcccgggtgtggatccctagatgggagccggggatgggccgggtgcctggtgggtggcagtcggggctgacggcggcggcactttgccgcctcaggccctggacaccttcaccccgccgcctgcccaggcgggccggccctgcccgtccaccggccgccgagagtccccggccttgggtccccggggccgctgactggcctcggtcacctcccggggaaggctcccgcgcctccatctgcccccgcaggaagggaccctcttctcgcccgcgaggcttctccgggtgggatcgtcctggcccccagccctaagggatccgccccctccgagcatccgccgcccctcggagaccactccagctcggacggacccactccagcccccgctgcacgcggaagcgctcatcctccccgcctgccccgttccctcccccttctcctgtgggacaaccagggaccgcagctccccgctccccaggtgtgggggctccgacacgaacgcctctgctcgcagggcggtgagcgcagatcccacgggtccctcggtcgggggtcgaggctgcttccgtttccatcccggacccgacaatgggcgggaaaaagaaggctttacacgactacgcggcggagttcaccgacctggtggtgaagcacctgattgagcacagtgactctggggacacgtctgtggtggagaccctttactgcagggcctgcgagctgcccgtgcgcgtgcggagggaccgcatcctggaacacctgtcctcgggcaggcagcacggcctgcggacgcccattctcatgtaaatgtcagtgccaacgctggtgtttcaggagtcatcccagcgggctgcgggctattttaggattctctgccctgcaaacgtttccaaagtacgtggacaggccgcctgatgacactacgtttacgggatctgctagtggcttgcctacttagggagtaaaccctgtgaagtctcgcagttttgttaaagtgtgcgtggccacctgaatgctgccttatcacaagccagatacatactggtctgtagggtaactccccactgttgatcctctgagatgattgtggactgggtgctgtgagtcctgccactttgtttaagtgaatgtgtcttttgtccagctcagccgcctcggatctcgctgccaccagccttactgcacacccgtgccacccgcccttgccccgtcagcctcagcctcagctcattctctcaggcagtcccagcattggcacggtacctcctcccgctgtgggccacacgtctctgctccctgtcaaccctcctgccatcagcaccaccaccagcgacttgtctgcccgggaggatgcaacaccatctgcctccaccggccacctttcagtgtttcctgctttccaagtaaagataccagcagtgccctcagagcagaccagccagagtttttctgaagcctcccacagggtgctccccggaggaggcccgagatgctctcgtgactttggagccggggtggctggccaccttggcctgggcatctttggggtgggcttcgggagcccggcactgctgcagagtgtggtggatgagaacagctgctgcttgctgtacgtggtggaggaccagctgtgtgatgtggagcaagccttcagagctgagcatttgggccaacaccagagtggttcgggaacaggatgcagacattgtcctcaacgaccagcggcactttgatccggttttccagttcttgcacaagcaagtttgtgtcagccacgccctggggaggatccactggatcaccgccgtcactgcctgttcccggcggcctctccggcttccctaaagagagcaggtgggactttctacaacgctgctgtgcacgacgtggatgccgtatgcatgttgctgggggaagccactccggacactgtgttttctctgggacatgtcttctgcccagatatggccgccttaaaagatgcagatgctgttgtgatcagcatgaagtttccctgtgaggccgtggttagcgtggacatcagccagcactgcacagacagctgcgaccaggacgtcagccagcactgcacagacagctgcgaccagagactggaggtgacccttgcccttttccacccttcgccagtccactgtgaaaagctgggttgattgtgcgggttagatagaggtcatcagccgggttgattgtgtgggttagacagaggtcatcagccaggttgattgtgtgggttagatagagatcatcagcctggtagattgtgtgggttagatagaggtcatcagccaggttgattgtgcgggttagatagagatcatcagccgggttgattctacaggttagatagaggtcgtcagccgggttgattgtgcgggttagatagagatcatcagccgggttgattgtgcgggttagatagaggtcatcagctgggttgattgtgtgggttagatagagatcatcagctgggttgattgtgtgggttagatagaggtcgtcagctgggttgattgtgcgggttagatagaggtcatcagccgggttgattctacaggttagatagaggtcatcagctgggttgattgtgcgggttagagatcatcagccgggttgattgtgcgggttagatagaggtcatcagccgggttgattgtgcgggttagatagagatcatcagctgggttgattctgcaggttagatagaggtcatcagctgggttgactatgtgggttagatagaggtcgtcagccgggttgattgtgtgggttagacagaggtcatcagctgggttgattctgcgggttagatagaggtcatcagctgggttgattgtgtgggttagatagagatcatcagctgggttgattgtgtgggttagatagaggtcatcagctgggttgattgtgtgggttagatagaggtcatcagctgggttgattgtgtgggttagatagaggtcatcagctgggttgattgtgtgggttagatagaggtcatcagctgggttgattgtatgggttagatagaggtcatcagctgggttgattgtacgggttagatagaggtcgtcagccgggttgattccgcaggttagatagaggtcgttagctgggtgtgtgggtcccaaggcgtgctgcagatggagaatcagaattccttgggcatcaccgggcggggcatgtccctgtcccttcgctcccagacccaggctagccgctaccaggactcctatcgagagctcttcagacactttgtcagaacccttaaaggtgggtgacgttttcaggaggaacctgggatgtcctgatgctcaatgggtagatgccttccaggctgcagtcagtgcagatgatatgccaatttcaggtggaaaattgcattccagataccgggttcagatttgaaattgtccatctcagtgatcatttacgttgcgtgtacttgagggagattctgagagatgctcctttggggttctgtgcgtgtaccatgttgcctgacacgtcctgagaaatcttcttaaactctgagtttataaaataactacttctgaactcctgagatctagtggataccatgtatcctggaagataggacactttctaccctctgtcagtcctgggggtgactgggaaccagagaggttgagcagaattcctggacctgggtggggcttgtccaagaggggcaggtgggcctctctaggatcagtgtcccacccagaggccagtggccccttcacatgccccaacaagaggaagactgtctggctccgcagtgttgggttttgtcctgaatctgtgcaaatgtgcagggaaataacctcctgaaatcaccaaagagcagttcctcagggccttccgggtgaccgtggccgtggagcagtcgtggtgaaaccggtcagctgtggacctgccctgcgaatcggcagaggcctccgtggtgaagacagaagctccgtgaaccaactcgaggctggagccaagatcctgcctgatatccagttgcctgtttcacttgttactgttactgggagagggagacaaaacctcatggcaatcttgtcctcactggagactcagaaggggaagcattgggaaaccatgtatgtttcatttctggtttaaccaggcttttcaggatgggacttcagaccaaggacacaagttgggcttgcttaggtgttttgtgttgtgcgcaggcctcagagatgctcttccggtcagagttcccttggcagggccttggaggcctctggttggctctctcaggaagagggcaggtcagggattgggcggtgtaaattgactcagaaacctgcggtttcagcttttctgtggcaaacagggccgagggctggtgaagctgttaaggctaaatgtcgcatgcatgaggcgggctgcaggcctccttaggccttttttggggtaattacaccagtatttaaaaacatttttttttgtttgttttgagatggagtcttgccctgtcacccaggctggagtgcaatggtgcgatctcggctcactgcaacctccgtctcccaggttcaagcgattcttctgcctcagccttctgagtagctgggattacacgcgtgtgccaccacgctcggctaatttttgtatttttagtagagatgggatttcaccatgttggccaggctggtctcgaactactgacctcgtgatccacctgccatggcctcccaaagtgctgggattacaggcgtgagccaccatgctcggcctaaaaaacaattttcttgaagaatccgattttgtgcatagtaatgacacagcaccattcctgagaaataggaaatatatgtgtgtggtatgaaaagcccatattctgttcttgtcacctgaatctaggcttcctctttggatgtgaacgcgggaatgaacagtggctgttttccacccaaaggggcgtggagaccttttggaaacgggctttctcctttccattttgcagccgggggcgggtggaaaccttccttcgaagggtagtgccttggggagcagcagacctgctctgagtccagcttagctttccaaaattctgtgtggaacttactggagatgtttttatatatttgaaaataatggcctgtatttctcacgctatacttaaaaaaaataactaaccttttaaacaaagatattcaaactcacccttgtgctgaaagcactcacatttctgtgttcattcctgaaagggcgttttagagtccccgtttctacgttctatgtggcaccctcttgccgagggaacatccagaatccctccacttcctgtctagtttgaggcctcaacaccttcatgatccagagtcctgcggctatgagggggtgggcccaccaccgcccagccctccttggtggacgtggggacaggtaggagcctagggaaaggggtgggcgggctctggtgtgacggcgtgagcgctagccaggaagatggggccagggcttggcatggcacctcacctgtgggggaactcggcggagcttcctggcggcatctccccctcttgccttggtcctttctatctttgttttaggccaatttctaaaaagactgaggcctccttcaaggttgaacagatttctagagccttgtttttgctgtgacaagtccctagtccctgttcacaactctgaaaccaagaaacctgagaaccaagagaactgaaatgaagcccgttggtctcagcctggcttgagccaacatgaggctctctgctgccttttgttttcttaggttttgctgagaaacgggagtgcgttctgtgtcggtgtttgtgacgccctgagaccctgcttggcctagctaaagtccagaaggcctgggccccacagggcttggatgagggctcatgggcctgtacttcaggaggcctgagaggcccggtcagtcccatgaggctactcggcttggcccgcaggtcctccgaggcacagggcagagggacaccccagggacccatcagactcacgacacagagaaactcaagtggggtgccagggccggccacagaggccacgggcttcctgcctgtgaggagccgccctgtttgtctgagccctttggagatttaggttgagtcatgagaaccggtcattggaacatacactttattatgttacaaaaacaaaaatccccactgaaacacagctaaaaaaataacacattttcccaagattacattaccaaaaacagttgttatgtcattggagggcgtccattaatactgctcggagaagcacgatcttacacgaaaaacacggatgggatttcgttttcaccttaaagcattaaagtgctttaactggtaacagaggagtggatgtttgtgcgttggagacactgactgttctgagtgacaagtggctctgtgccaggatactgcgggtcgggctcctgggtacagcaagggcttcccagcagcccaggcctggtgggaacgctgggggaatgggggagagtcgctgtttctgaccagagcgacttggacagatgtgagctgacctgcctggcgagctccttctgccttgcctctctgagcagactcaggaccactgcctgtcccccttggccccaggagtgccagcagcctccctccaacccctgcactgctgggaaaaccatccgccttcaagatttatttgttgatttgtttagttttataaaaacatatcacttaaaggattcttgttcctgggaatttgcattttctcctgaccacggcgaagtctcaactctgtctactttcacagctgcttctccagtgcaaggaggctgcatgggctccctagacaggtgcagctggggccatctggctgctccgtgttctggccggcttccttggacatctggctggggttccagtgacagctgcccctgggcctctcccagcccccccagcccccccagcccttcccaggagcacactacaggggctcttgggacagcctcactggactcagggtggacaggtaacgtacctaagaaacaaatcaacaagccctctggaactgaagcacatctgcgctgggctgaggaaccccgggtgtcaggatgggcccccgcggctcctgaagtggaacatgggggaagagtgggggcttcaggaggtggcctcgggtagcaggtgcccagcccccaagagatgggtgtggtgcctggggcatgggtcttagcctttctggtctcagcttcctcatctacaaaatggcaataagatggagagctgaggtgac

SEQ ID NO: 2379 - protein, 201 aa, Homo sapiens; identical to SEQ ID NO: 12

SEQ ID NO: 2380 - DNA, 1614 bp, Homo sapiens
ggggttggagggaggctgctggcactcctggggccaagggggacaggcagtggtcctgagtctgctcagagaggcaaggcagaaggagctcgccaggcaggtcagctcacatctgtccaagtcgctctggtcagaaacagcgactctcccccattcccccagcgttcccaccaggcctgggctgctgggaagcccttgctgtacccaggagcccgacccgcagtatcctggcacagagccacttgtcactcagaacagtcagtgtctccaacgcacaaacatccactcctctgttaccagttaaagcactttaatgctttaaggtgaaaacgaaatcccatccgtgtttttcgtgtaagatcgtgcttctccgagcagtattaatggacgccctccaatgacataacaactgtttttggtaatgtaatcttgggaaaatgtgttatttttttagctgtgtttcagtggggatttttgtttttgtaacataataaagtgtatgttccaatgaccggttctcatgactcaacctaaatctccaaagggctcagacaaacagggcggctcctcacaggcaggaagcccgtggcctctgtggccggccctggcaccccacttgagtttctctgtgtcgtgagtctgatgggtccctggggtgtccctctgccctgtgcctcggaggacctgcgggccaagccgagtagcctcatgggactgaccgggcctctcaggcctcctgaagtacaggcccatgagccctcatccaagccctgtggggcccaggccttctggactttagctaggccaagcagggtctcagggcgtcacaaacaccgacacagaacgcactcccgtttctcagcaaaacctgtccccacgtccaccaaggagggctgggcggtggtgggcccaccccctcatagccgcaggactctggatcatgaaggtgttgaggcctcaaactagacaggaagtggagggattctggatgttccctcggcaagagggtgccacatagaacgtagaaacggggactctaaaacgccctgggagacggaggttgcagtgagccgagatcgcaccattgcactccagcctgggtgacagggcaagactccatctcaaaacaaacaaaaaaaaatgtttttaaatactggtgtaattaccccaaaaaaggcctaaggaggcctgcagcccgcctcatgcatgcgacatttagccttaacagcttcaccagccctcggccctgtttgccacagaaaagctgaaaccgcaggtttctgagtcaatttacaccgcccaatccctgacctgccctcttcctgagagagccaaccagaggcctccaaggccctgccaagggaactctgaccggaagagcatctctgaggcctgcgcacaacacaaaacacctaagcaagcccaacttgtgtccttggtctgaagtcccatcctgaaaagcctggttaaaccagaaatgaaacatacatggtttcccaatgcttccccttctgagtctccagtgaggacaagattgccatgaggttttgtctccctctcccagtaacagtaacaagtgaaacaggcaactggatatcaggcaggatcttggct

SEQ ID NO: 2381 - protein, 107 aa, Homo sapiens
MGPWGVPLPCASEDLRAKPSSLMGLTGPLRPPEVQAHEPSSKPCGAQAFWTLARPSRVSGRHKHRHRTHSRFSAKPVPTSTKEGWAVVGPPPHSRRTLDHEGVEASN

SEQ ID NO: 2382 - DNA, 2221 bp, Homo sapiens
gtgtcagccacgccctggggaggatccactggatcaccgccgtcactgcctgttcccggcggcctctccggcttccctaaagagagcaggtgggactttctacaacgctgctgtgcacgacgtggatgccgtatgcatgttgctgggggaagccactccggacactgtgttttctctgggacatgtcttctgcccagatatggccgccttaaaagatgcagatgctgttgtgatcagcatgaagtttccctgtgaggccgtggttagcgtggacatcagccagcactgcacagacagctgcgaccaggacgtcagccagcactgcacagacagctgcgaccagagactggagatggagtcttgccctgtcacccaggctggagtgcaatggtgcgatctcggctcactgcaacctccgtctcccaggttcaagcgattcttctgcctcagccttctgagtagctgggattacacgcgtgtgccaccacgctcggctaatttttgtatttttagtagagatgggatttcaccatgttggccaggctggtctcgaactactgacctcgtgatccacctgccatggcctcccaaagtgctgggattacaggcgtgagccaccatgctcggcctaaaaaacaattttcttgaagaatccgattttgtgcatagtaatgacacagcaccattcctgagaaataggaaatatatgtgtgtggtatgaaaagcccatattctgttcttgtcacctgaatctaggcttcctctttggatgtgaacgcgggaatgaacagtggctgttttccacccaaaggggcgtggagaccttttggaaacgggctttctcctttccattttgcagccgggggcgggtggaaaccttccttcgaagggtagtgccttggggagcagcagacctgctctgagtccagcttagctttccaaaattctgtgtggaacttactggagatgtttttatatatttgaaaataatggcctgtatttctcacgctatacttaaaaaaaataactaaccttttaaacaaagatattcaaactcacccttgtgctgaaagcactcacatttctgtgttcattcctgaaagggcgttttagagtccccgtttctacgttctatgtggcaccctcttgccgagggaacatccagaatccctccacttcctgtctagtttgaggcctcaacaccttcatgatccagagtcctgcggctatgagggggtgggcccaccaccgcccagccctccttggtggacgtggggacaggtaggagcctagggaaaggggtgggcgggctctggtgtgacggcgtgagcgctagccaggaagatggggccagggcttggcatggcacctcacctgtgggggaactcggcggagcttcctggcggcatctccccctcttgccttggtcctttctatctttgttttaggccaatttctaaaaagactgaggcctccttcaaggttgaacagatttctagagccttgtttttgctgtgacaagtccctagtccctgttcacaactctgaaaccaagaaacctgagaaccaagagaactgaaatgaagcccgttggtctcagcctggcttgagccaacatgaggctctctgctgccttttgttttcttaggttttgctgagaaacgggagtgcgttctgtgtcggtgtttgtgacgccctgagaccctgcttggcctagctaaagtccagaaggcctgggccccacagggcttggatgagggctcatgggcctgtacttcaggaggcctgagaggcccggtcagtcccatgaggctactcggcttggcccgcaggtcctccgaggcacagggcagagggacaccccagggacccatcagactcacgacacagagaaactcaagtggggtgccagggccggccacagaggccacgggcttcctgcctgtgaggagccgccctgtttgtctgagccctttggagatttaggttgagtcatgagaaccggtcattggaacatacactttattatgttacaaaaacaaaaatccccactgaaacacagctaaaaaaataacacattttcccaagattacattaccaaaaacagttgttatgtcattggagggcgtccattaatactgctcggagaagcacgatcttacacgaaaaacacggatgggatttcgttttcaccttaaagcattaaagtgctttaactggt

SEQ ID NO: 2383 - protein, 158 aa, Homo sapiens
MLLGEATPDTVFSLGHVFCPDMAALKDADAVVISMKFPCEAVVSVDISQHCTDSCDQDVSQHCTDSCDQRLEMESCPVTQAGVQWCDLGSLQPPSPRFKRFFCLSLLSSWDYTRVPPRSANFCIFSRDGISPCWPGWSRTTDLVIHLPWPPKVLGLQA

SEQ ID NO: 2384 - DNA, 6409 bp, Homo sapiens
gggttgttgcgggatctcacaggctttaaaccgcggcgccgcggcgcccgggtgtggatccctagatgggagccggggatgggccgggtgcctggtgggtggcagtcggggctgacggcggcggcactttgccgcctcaggccctggacaccttcaccccgccgcctgcccaggcgggccggccctgcccgtccaccggccgccgagagtccccggccttgggtccccggggccgctgactggcctcggtcacctcccggggaaggctcccgcgcctccatctgcccccgcaggaagggaccctcttctcgcccgcgaggcttctccgggtgggatcgtcctggcccccagccctaagggatccgccccctccgagcatccgccgcccctcggagaccactccagctcggacggacccactccagcccccgctgcacgcggaagcgctcatcctccccgcctgccccgttccctcccccttctcctgtgggacaaccagggaccgcagctccccgctccccaggtgtgggggctccgacacgaacgcctctgctcgcagggcggtgagcgcagatcccacgggtccctcggtcgggggtcgaggctgcttccgtttccatcccggacccgacaatgggcgggaaaaagaaggctttacacgactacgcggcggagttcaccgacctggtggtgaagcacctgattgagcacagtgactctggggacacgtctgtggtggagaccctttactgcagggcctgcgagctgcccgtgcgcgtgcggagggaccgcatcctggaacacctgtcctcgggcaggcagcacggcctgcggacgcccattctcatgtaaatgtcagtgccaacgctggtgtttcaggagtcatcccagcgggctgcgggctattttaggattctctgccctgcaaacgtttccaaagtacgtggacaggccgcctgatgacactacgtttacgggatctgctagtggcttgcctacttagggagtaaaccctgtgaagtctcgcagttttgttaaagtgtgcgtggccacctgaatgctgccttatcacaagccagatacatactggtctgtagggtaactccccactgttgatcctctgagatgattgtggactgggtgctgtgagtcctgccactttgtttaagtgaatgtgtcttttgtccagctcagccgcctcggatctcgctgccaccagccttactgcacacccgtgccacccgcccttgccccgtcagcctcagcctcagctcattctctcaggcagtcccagcattggcacggtacctcctcccgctgtgggccacacgtctctgctccctgtcaaccctcctgccatcagcaccaccaccagcgacttgtctgcccgggaggatgcaacaccatctgcctccaccggccacctttcagtgtttcctgctttccaagtaaagataccagcagtgccctcagagcagaccagccagagtttttctgaagcctcccacagggtgctccccggaggaggcccgagatgctctcgtgactttggagccggggtggctggccaccttggcctgggcatctttggggtgggcttcgggagcccggcactgctgcagagtgtggtggatgagaacagctgctgcttgctgtacgtggtggaggaccagctgtgtgatgtggagcaagccttcagagctgagcatttgggccaacaccagagtggttcgggaacaggatgcagacattgtcctcaacgaccagcggcactttgatccggttttccagttcttgcacaagcaagtttgtgtcagccacgccctggggaggatccactggatcaccgccgtcactgcctgttcccggcggcctctccggcttccctaaagagagcaggtgggactttctacaacgctgctgtgcacgacgtggatgccgtatgcatgttgctgggggaagccactccggacactgtgttttctctgggacatgtcttctgcccagatatggccgccttaaaagatgcagatgctgttgtgatcagcatgaagtttccctgtgaggccgtggttagcgtggacatcagccagcactgcacagacagctgcgaccaggacgtcagccagcactgcacagacagctgcgaccagagactggaggtgacccttgcccttttccacccttcgccagtccactgtgaaaagctgggttgattgtgcgggttagatagaggtcatcagccgggttgattgtgtgggttagacagaggtcatcagccaggttgattgtgtgggttagatagagatcatcagcctggtagattgtgtgggttagatagaggtcatcagccaggttgattgtgcgggttagatagagatcatcagccgggttgattctacaggttagatagaggtcgtcagccgggttgattgtgcgggttagatagagatcatcagccgggttgattgtgcgggttagatagaggtcatcagctgggttgattgtgtgggttagatagagatcatcagctgggttgattgtgtgggttagatagaggtcgtcagctgggttgattgtgcgggttagatagaggtcatcagccgggttgattctacaggttagatagaggtcatcagctgggttgattgtgcgggttagagatcatcagccgggttgattgtgcgggttagatagaggtcatcagccgggttgattgtgcgggttagatagagatcatcagctgggttgattctgcaggttagatagaggtcatcagctgggttgactatgtgggttagatagaggtcgtcagccgggttgattgtgtgggttagacagaggtcatcagctgggttgattctgcgggttagatagaggtcatcagctgggttgattgtgtgggttagatagagatcatcagctgggttgattgtgtgggttagatagaggtcatcagctgggttgattgtgtgggttagatagaggtcatcagctgggttgattgtgtgggttagatagaggtcatcagctgggttgattgtgtgggttagatagaggtcatcagctgggttgattgtatgggttagatagaggtcatcagctgggttgattgtacgggttagatagaggtcgtcagccgggttgattccgcaggttagatagaggtcgttagctgggtgtgtgggtcccaaggcgtgctgcagatggagaatcagaattccttgggcatcaccgggcggggcatgtccctgtcccttcgctcccagacccaggctagccgctaccaggactcctatcgagagctcttcagacactttgtcagaacccttaaaggtgggtgacgttttcaggaggaacctgggatgtcctgatgctcaatgggtagatgccttccaggctgcagtcagtgcagatgatatgccaatttcaggtggaaaattgcattccagataccgggttcagatttgaaattgtccatctcagtgatcatttacgttgcgtgtacttgagggagattctgagagatgctcctttggggttctgtgcgtgtaccatgttgcctgacacgtcctgagaaatcttcttaaactctgagtttataaaataactacttctgaactcctgagatctagtggataccatgtatcctggaagataggacactttctaccctctgtcagtcctgggggtgactgggaaccagagaggttgagcagaattcctggacctgggtggggcttgtccaagaggggcaggtgggcctctctaggatcagtgtcccacccagaggccagtggccccttcacatgccccaacaagaggaagactgtctggctccgcagtgttgggttttgtcctgaatctgtgcaaatgtgcagggaaataacctcctgaaatcaccaaagagcagttcctcagggccttccgggtgaccgtggccgtggagcagtcgtggtgaaaccggtcagctgtggacctgccctgcgaatcggcagaggcctccgtggtgaagacagaagctccgtgaaccaactcgaggctggagccaagatcctgcctgatatccagttgcctgtttcacttgttactgttactgggagagggagacaaaacctcatggcaatcttgtcctcactggagactcagaaggggaagcattgggaaaccatgtatgtttcatttctggtttaaccaggcttttcaggatgggacttcagaccaaggacacaagttgggcttgcttaggtgttttgtgttgtgcgcaggcctcagagatgctcttccggtcagagttcccttggcagggccttggaggcctctggttggctctctcaggaagagggcaggtcagggattgggcggtgtaaattgactcagaaacctgcggtttcagcttttctgtggcaaacagggccgagggctggtgaagctgttaaggctaaatgtcgcatgcatgaggcgggctgcaggcctccttaggccttttttggggtaattacaccagtatttaaaaacatttttttttgtttgttttgagatggagtcttgccctgtcacccaggctggagtgcaatggtgcgatctcggctcactgcaacctccgtctcccaggttcaagcgattcttctgcctcagccttctgagtagctgggattacacgcgtgtgccaccacgctcggctaatttttgtatttttagtagagatgggatttcaccatgttggccaggctggtctcgaactactgacctcgtgatccacctgccatggcctcccaaagtgctgggattacaggcgtgagccaccatgctcggcctaaaaaacaattttcttgaagaatccgattttgtgcatagtaatgacacagcaccattcctgagaaataggaaatatatgtgtgtggtatgaaaagcccatattctgttcttgtcacctgaatctaggcttcctctttggatgtgaacgcgggaatgaacagtggctgttttccacccaaaggggcgtggagaccttttggaaacgggctttctcctttccattttgcagccgggggcgggtggaaaccttccttcgaagggtagtgccttggggagcagcagacctgctctgagtccagcttagctttccaaaattctgtgtggaacttactggagatgtttttatatatttgaaaataatggcctgtatttctcacgctatacttaaaaaaaataactaaccttttaaacaaagatattcaaactcacccttgtgctgaaagcactcacatttctgtgttcattcctgaaagggcgttttagagtccccgtttctacgttctatgtggcaccctcttgccgagggaacatccagaatccctccacttcctgtctagtttgaggcctcaacaccttcatgatccagagtcctgcggctatgagggggtgggcccaccaccgcccagccctccttggtggacgtggggacaggtaggagcctagggaaaggggtgggcgggctctggtgtgacggcgtgagcgctagccaggaagatggggccagggcttggcatggcacctcacctgtgggggaactcggcggagcttcctggcggcatctccccctcttgccttggtcctttctatctttgttttaggccaatttctaaaaagactgaggcctccttcaaggttgaacagatttctagagccttgtttttgctgtgacaagtccctagtccctgttcacaactctgaaaccaagaaacctgagaaccaagagaactgaaatgaagcccgttggtctcagcctggcttgagccaacatgaggctctctgctgccttttgttttcttaggttttgctgagaaacgggagtgcgttctgtgtcggtgtttgtgacgccctgagaccctgcttggcctagctaaagtccagaaggcctgggccccacagggcttggatgagggctcatgggcctgtacttcaggaggcctgagaggcccggtcagtcccatgaggctactcggcttggcccgcaggtcctccgaggcacagggcagagggacaccccagggacccatcagactcacgacacagagaaactcaagtggggtgccagggccggccacagaggccacgggcttcctgcctgtgaggagccgccctgtttgtctgagccctttggagatttaggttgagtcatgagaaccggtcattggaacatacactttattatgttacaaaaacaaaaatccccactgaaacacagctaaaaaaataacacattttcccaagattacattaccaaaaacagttgttatgtcattggagggcgtccattaatactgctcggagaagcacgatcttacacgaaaaacacggatgggatttcgttttcaccttaaagcattaaagtgctttaactggt

SEQ ID NO: 2385 - protein, 201 aa, Homo sapiens; identical to SEQ ID NO: 12

SEQ ID NO: 2386 - DNA, 2153 bp, Homo sapiens
ggcactttgatccggttttccagttcttgcacaagcaagtttgtgtcagccacgccctggggaggatccactggatcaccgccgtcactgcctgttcccggcggcctctccggcttccctaaagagagcaggtgggactttctacaacgctgctgtgcacgacgtggatgccgtatgcatgttgctgggggaagccactccggacactgtgttttctctgggacatgtcttctgcccagatatggccgccttaaaagatgcagatgctgttgtgatcagcatgaagtttccctgtgaggccgtggttagcgtggacatcagccagcactgcacagacagctgcgaccaggacgtcagccagcactgcacagacagctgcgaccagagactggagggaaataacctcctgaaatcaccaaagagcagttcctcagggccttccgggtgaccgtggccgtggagcagtcgtggtgaaaccggtcagctgtggacctgccctgcgaatcggcagaggcctccgtggtgaagacagaagctccgtgaaccaactcgaggctggagccaagatcctgcctgatatccagttgcctgtttcacttgttactgttactgggagagggagacaaaacctcatggcaatcttgtcctcactggagactcagaaggggaagcattgggaaaccatgtatgtttcatttctggtttaaccaggcttttcaggatgggacttcagaccaaggacacaagttgggcttgcttaggtgttttgtgttgtgcgcaggcctcagagatgctcttccggtcagagttcccttggcagggccttggaggcctctggttggctctctcaggaagagggcaggtcagggattgggcggtgtaaattgactcagaaacctgcggtttcagcttttctgtggcaaacagggccgagggctggtgaagctgttaaggctaaatgtcgcatgcatgaggcgggctgcaggcctccttaggccttttttggggtaattacaccagtatttaaaaacatttttttttgtttgttttgagatggagtcttgccctgtcacccaggctggagtgcaatggtgcgatctcggctcactgcaacctccgtctcccaggttcaagcgattcttctgcctcagccttctgagtagctgggattacacgcgtgtgccaccacgctcggctaatttttgtatttttagtagagatgggatttcaccatgttggccaggctggtctcgaactactgacctcgtgatccacctgccatggcctcccaaagtgctgggattacaggcgtgagccaccatgctcggcctaaaaaacaattttcttgaagaatccgattttgtgcatagtaatgacacagcaccattcctgagaaataggaaatatatgtgtgtggtatgaaaagcccatattctgttcttgtcacctgaatctaggcttcctctttggatgtgaacgcgggaatgaacagtggctgttttccacccaaaggggcgtggagaccttttggaaacgggctttctcctttccattttgcagccgggggcgggtggaaaccttccttcgaagggtagtgccttggggagcagcagacctgctctgagtccagcttagctttccaaaattctgtgtggaacttactggagatgtttttatatatttgaaaataatggcctgtatttctcacgctatacttaaaaaaaataactaaccttttaaacaaagatattcaaactcacccttgtgctgaaagcactcacatttctgtgttcattcctgaaagggcgttttagagtccccgtttctacgttctatgtggcaccctcttgccgagggaacatccagaatccctccacttcctgtctagtttgaggcctcaacaccttcatgatccagagtcctgcggctatgagggggtgggcccaccaccgcccagccctccttggtggacgtggggacaggtaggagcctagggaaaggggtgggcgggctctggtgtgacggcgtgagcgctagccaggaagatggggccagggcttggcatggcacctcacctgtgggggaactcggcggagcttcctggcggcatctccccctcttgccttggtcctttctatctttgttttaggcca

SEQ ID NO: 2387 - protein, 89 aa, Homo sapiens
MLLGEATPDTVFSLGHVFCPDMAALKDADAVVISMKFPCEAVVSVDISQHCTDSCDQDVSQHCTDSCDQRLEGNNLLKSPKSSSSGPSG

SEQ ID NO: 2388 - DNA, 3308 bp, Homo sapiens
gggttgttgcgggatctcacaggctttaaaccgcggcgccgcggcgcccgggtgtggatccctagatgggagccggggatgggccgggtgcctggtgggtggcagtcggggctgacggcggcggcactttgccgcctcaggccctggacaccttcaccccgccgcctgcccaggcgggccggccctgcccgtccaccggccgccgagagtccccggccttgggtccccggggccgctgactggcctcggtcacctcccggggaaggctcccgcgcctccatctgcccccgcaggaagggaccctcttctcgcccgcgaggcttctccgggtgggatcgtcctggcccccagccctaagggatccgccccctccgagcatccgccgcccctcggagaccactccagctcggacggacccactccagcccccgctgcacgcggaagcgctcatcctccccgcctgccccgttccctcccccttctcctgtgggacaaccagggaccgcagctccccgctccccaggtgtgggggctccgacacgaacgcctctgctcgcagggcggtgagcgcagatcccacgggtccctcggtcgggggtcgaggctgcttccgtttccatcccggacccgacaatgggcgggaaaaagaaggctttacacgactacgcggcggagttcaccgacctggtggtgaagcacctgattgagcacagtgactctggggacacgtctgtggtggagaccctttactgcagggcctgcgagctgcccgtgcgcgtgcggagggaccgcatcctggaacacctgtcctcgggcaggcagcacggcctgcggacgcccattctcatgtaaatgtcagtgccaacgctggtgtttcaggagtcatcccagcgggctgcgggctattttaggattctctgccctgcaaacgtttccaaagtacgtggacaggccgcctgatgacactacgtttacgggatctgctagtggcttgcctacttagggagtaaaccctgtgaagtctcgcagttttgttaaagtgtgcgtggccacctgaatgctgccttatcacaagccagatacatactggtctgtagggtaactccccactgttgatcctctgagatgattgtggactgggtgctgtgagtcctgccactttgtttaagtgaatgtgtcttttgtccagctcagccgcctcggatctcgctgccaccagccttactgcacacccgtgccacccgcccttgccccgtcagcctcagcctcagctcattctctcaggcagtcccagcattggcacggtacctcctcccgctgtgggccacacgtctctgctccctgtcaaccctcctgccatcagcaccaccaccagcgacttgtctgcccgggaggatgcaacaccatctgcctccaccggccacctttcagtgtttcctgctttccaagtaaagataccagcagtgccctcagagcagaccagccagagtttttctgaagcctcccacagggtgctccccggaggaggcccgagatgctctcgtgactttggagccggggtggctggccaccttggcctgggcatctttggggtgggcttcgggagcccggcactgctgcagagtgtggtggatgagaacagctgctgcttgctgtacgtggtggaggaccagctgtgtgatgtggagcaagccttcagagctgagcatttgggccaacaccagagtggttcgggaacaggatgcagacattgtcctcaacgaccagcggcactttgatccggttttccagttcttgcacaagcaagtttgtgtcagccacgccctggggaggatccactggatcaccgccgtcactgcctgttcccggcggcctctccggcttccctaaagagagcagcttccctcgagaccagaagccagagctcaccctcccttgtgtccaggtgggactttctacaacgctgctgtgcacgacgtggatgccgtatgcatgttgctgggggaagccactccggacactgtgttttctctgggacatgtcttctgcccagatatggccgccttaaaagatgcagatgctgttgtgatcagcatgaagtttccctgtgaggccgtggttagcgtggacatcagccagcactgcacagacagctgcgaccaggacgtcagccagcactgcacagacagctgcgaccagagactggagatggagtcttgccctgtcacccaggctggagtgcaatggtgcgatctcggctcactgcaacctccgtctcccaggttcaagcgattcttctgcctcagccttctgagtagctgggattacacgcgtgtgccaccacgctcggctaatttttgtatttttagtagagatgggatttcaccatgttggccaggctggtctcgaactactgacctcgtgatccacctgccatggcctcccaaagtgctgggattacaggcgtgagccaccatgctcggcctaaaaaacaattttcttgaagaatccgattttgtgcatagtaatgacacagcaccattcctgagaaataggaaatatatgtgtgtggtatgaaaagcccatattctgttcttgtcacctgaatctaggcttcctctttggatgtgaacgcgggaatgaacagtggctgttttccacccaaaggggcgtggagaccttttggaaacgggctttctcctttccattttgcagccgggggcgggtggaaaccttccttcgaagggtagtgccttggggagcagcagacctgctctgagtccagcttagctttccaaaattctgtgtggaacttactggagatgtttttatatatttgaaaataatggcctgtatttctcacgctatacttaaaaaaaataactaaccttttaaacaaagatattcaaactcacccttgtgctgaaagcactcacatttctgtgttcattcctgaaagggcgttttagagtccccgtttctacgttctatgtggcaccctcttgccgagggaacatccagaatccctccacttcctgtctagtttgaggcctcaacaccttcatgatccagagtcctgcggctatgagggggtgggcccaccaccgcccagccctccttggtggacgtggggacaggtaggagcctagggaaaggggtgggcgggctctggtgtgacggcgtgagcgctagccaggaagatggggccagggcttggcatggcacctcacctgtgggggaactcggcggagcttcctggcggcatctccccctcttgccttggtcctttctatctttgttttaggcca

SEQ ID NO: 2389 - protein, 201 aa, Homo sapiens; identical to SEQ ID NO: 12

SEQ ID NO: 2390 - DNA, 1074 bp, Homo sapiens
gtgtcagccacgccctggggaggatccactggatcaccgccgtcactgcctgttcccggcggcctctccggcttccctaaagagagcaggtgggactttctacaacgctgctgtgcacgacgtggatgccgtatgcatgttgctgggggaagccactccggacactgtgttttctctgggacatgtcttctgcccagatatggccgccttaaaagatgcagatgctgttgtgatcagcatgaagtttccctgtgaggccgtggttagcgtggacatcagccagcactgcacagacagctgcgaccaggacgtcagccagcactgcacagacagctgcgaccagagactggagatggagtcttgccctgtcacccaggctggagtgcaatggtgcgatctcggctcactgcaacctccgtctcccaggttcaagcgattcttctgcctcagccttctgagtagctgggattacacgcgtgtgccaccacgctcggctaatttttgtatttttagtagagatgggatttcaccatgttggccaggctggtctcgaactactgacctcgtgatccacctgccatggcctcccaaagtgctgggattacaggcgtgagccaccatgctcggcctaaaaaacaattttcttgaagaatccgattttgtgcatagtaatgacacagcaccattcctgagaaataggaaatatatgtgtgtggtatgaaaagcccatattctgttcttgtcacctgaatctaggcttcctctttggatgtgaacgcgggaatgaacagtggctgttttccacccaaaggggcgtggagaccttttggaaacgggctttctcctttccattttgcagccgggggcgggtggaaaccttccttcgaagggtagtgccttggggagcagcagacctgctctgagtccagcttagctttccaaaattctgtgtggaacttactggagatgtttttatatatttgaaaataatggcctgtatttctcacgctatacttaaaaaaaataactaaccttttaaacaaagatattcaaactcacccttgtgctgaaagc

SEQ ID NO: 2391 - protein, 158 aa, Homo sapiens; identical to SEQ ID NO: 2383

SEQ ID NO: 2392 - DNA, 1775 bp, Homo sapiens
ggcactttgatccggttttccagttcttgcacaagcaagtttgtgtcagccacgccctggggaggatccactggatcaccgccgtcactgcctgttcccggcggcctctccggcttccctaaagagagcaggtgggactttctacaacgctgctgtgcacgacgtggatgccgtatgcatgttgctgggggaagccactccggacactgtgttttctctgggacatgtcttctgcccagatatggccgccttaaaagatgcagatgctgttgtgatcagcatgaagtttccctgtgaggccgtggttagcgtggacatcagccagcactgcacagacagctgcgaccaggacgtcagccagcactgcacagacagctgcgaccagagactggagggaaataacctcctgaaatcaccaaagagcagttcctcagggccttccgggtgaccgtggccgtggagcagtcgtggtgaaaccggtcagctgtggacctgccctgcgaatcggcagaggcctccgtggtgaagacagaagctccgtgaaccaactcgaggctggagccaagatcctgcctgatatccagttgcctgtttcacttgttactgttactgggagagggagacaaaacctcatggcaatcttgtcctcactggagactcagaaggggaagcattgggaaaccatgtatgtttcatttctggtttaaccaggcttttcaggatgggacttcagaccaaggacacaagttgggcttgcttaggtgttttgtgttgtgcgcaggcctcagagatgctcttccggtcagagttcccttggcagggccttggaggcctctggttggctctctcaggaagagggcaggtcagggattgggcggtgtaaattgactcagaaacctgcggtttcagcttttctgtggcaaacagggccgagggctggtgaagctgttaaggctaaatgtcgcatgcatgaggcgggctgcaggcctccttaggccttttttggggtaattacaccagtatttaaaaacatttttttttgtttgttttgagatggagtcttgccctgtcacccaggctggagtgcaatggtgcgatctcggctcactgcaacctccgtctcccaggttcaagcgattcttctgcctcagccttctgagtagctgggattacacgcgtgtgccaccacgctcggctaatttttgtatttttagtagagatgggatttcaccatgttggccaggctggtctcgaactactgacctcgtgatccacctgccatggcctcccaaagtgctgggattacaggcgtgagccaccatgctcggcctaaaaaacaattttcttgaagaatccgattttgtgcatagtaatgacacagcaccattcctgagaaataggaaatatatgtgtgtggtatgaaaagcccatattctgttcttgtcacctgaatctaggcttcctctttggatgtgaacgcgggaatgaacagtggctgttttccacccaaaggggcgtggagaccttttggaaacgggctttctcctttccattttgcagccgggggcgggtggaaaccttccttcgaagggtagtgccttggggagcagcagacctgctctgagtccagcttagctttccaaaattctgtgtggaacttactggagatgtttttatatatttgaaaataatggcctgtatttctcacgctatacttaaaaaaaataactaaccttttaaacaaagatattcaaactcacccttgtgctgaaagc

SEQ ID NO: 2393 - protein, 89 aa, Homo sapiens; identical to SEQ ID NO: 2387

SEQ ID NO: 2394 - DNA, 4792 bp, Homo sapiens
ccgcggcgcccgggtgtggatccctagatgggagccggggatgggccgggtgcctggtgggtggcagtcggggctgacggcggcggcactttgccgcctcaggccctggacaccttcaccccgccgcctgcccaggcgggccggccctgcccgtccaccggccgccgagagtccccggccttgggtccccggggccgctgactggcctcggtcacctcccggggaaggctcccgcgcctccatctgcccccgcaggaagggaccctcttctcgcccgcgaggcttctccgggtgggatcgtcctggcccccagccctaagggatccgccccctccgagcatccgccgcccctcggagaccactccagctcggacggacccactccagcccccgctgcacgcggaagcgctcatcctccccgcctgccccgttccctcccccttctcctgtgggacaaccagggaccgcagctccccgctccccaggtgtgggggctccgacacgaacgcctctgctcgcagggcggtgagcgcagatcccacgggtccctcggtcgggggtcgaggctgcttccgtttccatcccggacccgacaatgggcgggaaaaagaaggctttacacgactacgcggcggagttcaccgacctggtggtgaagcacctgattgagcacagtgactctggggacacgtctgtggtggagaccctttactgcagggcctgcgagctgcccgtgcgcgtgcggagggaccgcatcctggaacacctgtcctcgggcaggcagcacggcctgcggacgcccattctcatgtaaatgtcagtgccaacgctggtgtttcaggagtcatcccagcgggctgcgggctattttaggattctctgccctgcaaacgtttccaaagtacgtggacaggccgcctgatgacactacgtttacgggatctgctagtggcttgcctacttagggagtaaaccctgtgaagtctcgcagttttgttaaagtgtgcgtggccacctgaatgctgccttatcacaagccagatacatactggtctgtagggtaactccccactgttgatcctctgagatgattgtggactgggtgctgtgagtcctgccactttgtttaagtgaatgtgtcttttgtccagctcagccgcctcggatctcgctgccaccagccttactgcacacccgtgccacccgcccttgccccgtcagcctcagcctcagctcattctctcaggcagtcccagcattggcacggtacctcctcccgctgtgggccacacgtctctgctccctgtcaaccctcctgccatcagcaccaccaccagcgacttgtctgcccgggaggatgcaacaccatctgcctccaccggccacctttcagtgtttcctgctttccaagtaaagataccagcagtgccctcagagcagaccagccagagtttttctgaagcctcccacagggtgctccccggaggaggcccgagatgctctcgtgactttggagccggggtggctggccaccttggcctgggcatctttggggtgggcttcgggagcccggcactgctgcagagtgtggtggatgagaacagctgctgcttgctgtacgtggtggaggaccagctgtgtgatgtggagcaagccttcagagctgagcatttgggccaacaccagagtggttcgggaacaggatgcagacattgtcctcaacgaccagcggcactttgatccggttttccagttcttgcacaagcaagtttgtgtcagccacgccctggggaggatccactggatcaccgccgtcactgcctgttcccggcggcctctccggcttccctaaagagagcaggtgggactttctacaacgctgctgtgcacgacgtggatgccgtatgcatgttgctgggggaagccactccggacactgtgttttctctgggacatgtcttctgcccagatatggccgccttaaaagatgcagatgctgttgtgatcagcatgaagtttccctgtgaggccgtggttagcgtggacatcagccagcactgcacagacagctgcgaccaggacgtcagccagcactgcacagacagctgcgaccagagactggaggtgacccttgcccttttccacccttcgccagtccactgtgaaaagctgggttgattgtgcgggttagagatcatcagccgggttgattgtgcgggttagatagaggtcatcagccgggttgattgtgcgggttagatagagatcatcagctgggttgattctgcaggttagatagaggtcatcagctgggttgactatgtgggttagatagaggtcgtcagccgggttgattgtgtgggttagacagaggtcatcagctgggttgattctgcgggttagatagaggtcatcagctgggttgattgtgtgggttagatagagatcatcagctgggttgattgtgtgggttagatagaggtcatcagctgggttgattgtgtgggttagatagaggtcatcagctgggttgattgtgtgggttagatagaggtcatcagctgggttgattgtgtgggttagatagaggtcatcagctgggttgattgtatgggttagatagaggtcatcagctgggttgattgtacgggttagatagaggtcgtcagccgggttgattccgcaggttagatagaggtcgttagctgggtgtgtgggtcccaaggcgtgctgcagatggagaatcagaattccttgggcatcaccgggcggggcatgtccctgtcccttcgctcccagacccaggctagccgctaccaggactcctatcgagagctcttcagacactttgtcagaacccttaaaggtgggtgacgttttcaggaggaacctgggatgtcctgatgctcaatgggtagatgccttccaggctgcagtcagtgcagatgatatgccaatttcaggtggaaaattgcattccagataccgggttcagatttgaaattgtccatctcagtgatcatttacgttgcgtgtacttgagggagattctgagagatgctcctttggggttctgtgcgtgtaccatgttgcctgacacgtcctgagaaatcttcttaaactctgagtttataaaataactacttctgaactcctgagatctagtggataccatgtatcctggaagataggacactttctaccctctgtcagtcctgggggtgactgggaaccagagaggttgagcagaattcctggacctgggtggggcttgtccaagaggggcaggtgggcctctctaggatcagtgtcccacccagaggccagtggccccttcacatgccccaacaagaggaagactgtctggctccgcagtgttgggttttgtcctgaatctgtgcaaatgtgcagggaaataacctcctgaaatcaccaaagagcagttcctcagggccttccgggtgaccgtggccgtggagcagtcgtggtgaaaccggtcagctgtggacctgccctgcgaatcggcagaggcctccgtggtgaagacagaagctccgtgaaccaactcgaggctggagccaagatcctgcctgatatccagttgcctgtttcacttgttactgttactgggagagggagacaaaacctcatggcaatcttgtcctcactggagactcagaaggggaagcattgggaaaccatgtatgtttcatttctggtttaaccaggcttttcaggatgggacttcagaccaaggacacaagttgggcttgcttaggtgttttgtgttgtgcgcaggcctcagagatgctcttccggtcagagttcccttggcagggccttggaggcctctggttggctctctcaggaagagggcaggtcagggattgggcggtgtaaattgactcagaaacctgcggtttcagcttttctgtggcaaacagggccgagggctggtgaagctgttaaggctaaatgtcgcatgcatgaggcgggctgcaggcctccttaggccttttttggggtaattacaccagtatttaaaaacatttttttttgtttgttttgagatggagtcttgccctgtcacccaggctggagtgcaatggtgcgatctcggctcactgcaacctccgtctcccaggttcaagcgattcttctgcctcagccttctgagtagctgggattacacgcgtgtgccaccacgctcggctaatttttgtatttttagtagagatgggatttcaccatgttggccaggctggtctcgaactactgacctcgtgatccacctgccatggcctcccaaagtgctgggattacaggcgtgagccaccatgctcggcctaaaaaacaattttcttgaagaatccgattttgtgcatagtaatgacacagcaccattcctgagaaataggaaatatatgtgtgtggtatgaaaagcccatattctgttcttgtcacctgaatctaggcttcctctttggatgtgaacgcgggaatgaacagtggctgttttccacccaaaggggcgtggagaccttttggaaacgggctttctcctttccattttgcagccgggggcgggtggaaaccttccttcgaagggtagtgccttggggagcagcagacctgctctgagtccagcttagctttccaaaattctgtgtggaacttactggagatgtttttatatatttgaaaataatggcctgtatttctcacgctatacttaaaaaaaataactaaccttttaaacaaagatattcaaactcacccttgtgctgaaagc

SEQ ID NO: 2395 - protein, 201 aa, Homo sapiens; identical to SEQ ID NO: 12

SEQ ID NO: 2396 - DNA, 2930 bp, Homo sapiens
gggttgttgcgggatctcacaggctttaaaccgcggcgccgcggcgcccgggtgtggatccctagatgggagccggggatgggccgggtgcctggtgggtggcagtcggggctgacggcggcggcactttgccgcctcaggccctggacaccttcaccccgccgcctgcccaggcgggccggccctgcccgtccaccggccgccgagagtccccggccttgggtccccggggccgctgactggcctcggtcacctcccggggaaggctcccgcgcctccatctgcccccgcaggaagggaccctcttctcgcccgcgaggcttctccgggtgggatcgtcctggcccccagccctaagggatccgccccctccgagcatccgccgcccctcggagaccactccagctcggacggacccactccagcccccgctgcacgcggaagcgctcatcctccccgcctgccccgttccctcccccttctcctgtgggacaaccagggaccgcagctccccgctccccaggtgtgggggctccgacacgaacgcctctgctcgcagggcggtgagcgcagatcccacgggtccctcggtcgggggtcgaggctgcttccgtttccatcccggacccgacaatgggcgggaaaaagaaggctttacacgactacgcggcggagttcaccgacctggtggtgaagcacctgattgagcacagtgactctggggacacgtctgtggtggagaccctttactgcagggcctgcgagctgcccgtgcgcgtgcggagggaccgcatcctggaacacctgtcctcgggcaggcagcacggcctgcggacgcccattctcatgtaaatgtcagtgccaacgctggtgtttcaggagtcatcccagcgggctgcgggctattttaggattctctgccctgcaaacgtttccaaagtacgtggacaggccgcctgatgacactacgtttacgggatctgctagtggcttgcctacttagggagtaaaccctgtgaagtctcgcagttttgttaaagtgtgcgtggccacctgaatgctgccttatcacaagccagatacatactggtctgtagggtaactccccactgttgatcctctgagatgattgtggactgggtgctgtgagtcctgccactttgtttaagtgaatgtgtcttttgtccagctcagccgcctcggatctcgctgccaccagccttactgcacacccgtgccacccgcccttgccccgtcagcctcagcctcagctcattctctcaggcagtcccagcattggcacggtacctcctcccgctgtgggccacacgtctctgctccctgtcaaccctcctgccatcagcaccaccaccagcgacttgtctgcccgggaggatgcaacaccatctgcctccaccggccacctttcagtgtttcctgctttccaagtaaagataccagcagtgccctcagagcagaccagccagagtttttctgaagcctcccacagggtgctccccggaggaggcccgagatgctctcgtgactttggagccggggtggctggccaccttggcctgggcatctttggggtgggcttcgggagcccggcactgctgcagagtgtggtggatgagaacagctgctgcttgctgtacgtggtggaggaccagctgtgtgatgtggagcaagccttcagagctgagcatttgggccaacaccagagtggttcgggaacaggatgcagacattgtcctcaacgaccagcggcactttgatccggttttccagttcttgcacaagcaagtttgtgtcagccacgccctggggaggatccactggatcaccgccgtcactgcctgttcccggcggcctctccggcttccctaaagagagcagcttccctcgagaccagaagccagagctcaccctcccttgtgtccaggtgggactttctacaacgctgctgtgcacgacgtggatgccgtatgcatgttgctgggggaagccactccggacactgtgttttctctgggacatgtcttctgcccagatatggccgccttaaaagatgcagatgctgttgtgatcagcatgaagtttccctgtgaggccgtggttagcgtggacatcagccagcactgcacagacagctgcgaccaggacgtcagccagcactgcacagacagctgcgaccagagactggagatggagtcttgccctgtcacccaggctggagtgcaatggtgcgatctcggctcactgcaacctccgtctcccaggttcaagcgattcttctgcctcagccttctgagtagctgggattacacgcgtgtgccaccacgctcggctaatttttgtatttttagtagagatgggatttcaccatgttggccaggctggtctcgaactactgacctcgtgatccacctgccatggcctcccaaagtgctgggattacaggcgtgagccaccatgctcggcctaaaaaacaattttcttgaagaatccgattttgtgcatagtaatgacacagcaccattcctgagaaataggaaatatatgtgtgtggtatgaaaagcccatattctgttcttgtcacctgaatctaggcttcctctttggatgtgaacgcgggaatgaacagtggctgttttccacccaaaggggcgtggagaccttttggaaacgggctttctcctttccattttgcagccgggggcgggtggaaaccttccttcgaagggtagtgccttggggagcagcagacctgctctgagtccagcttagctttccaaaattctgtgtggaacttactggagatgtttttatatatttgaaaataatggcctgtatttctcacgctatacttaaaaaaaataactaaccttttaaacaaagatattcaaactcacccttgtgctgaaagc

SEQ ID NO: 2397 - protein, 201 aa, Homo sapiens; identical to SEQ ID NO: 12

SEQ ID NO: 2398 - DNA, 2433 bp, Homo sapiens
gggttgttgcgggatctcacaggctttaaaccgcggcgccgcggcgcccgggtgtggatccctagatgggagccggggatgggccgggtgcctggtgggtggcagtcggggctgacggcggcggcactttgccgcctcaggccctggacaccttcaccccgccgcctgcccaggcgggccggccctgcccgtccaccggccgccgagagtccccggccttgggtccccggggccgctgactggcctcggtcacctcccggggaaggctcccgcgcctccatctgcccccgcaggaagggaccctcttctcgcccgcgaggcttctccgggtgggatcgtcctggcccccagccctaagggatccgccccctccgagcatccgccgcccctcggagaccactccagctcggacggacccactccagcccccgctgcacgcggaagcgctcatcctccccgcctgccccgttccctcccccttctcctgtgggacaaccagggaccgcagctccccgctccccaggtgtgggggctccgacacgaacgcctctgctcgcagggcggtgagcgcagatcccacgggtccctcggtcgggggtcgaggctgcttccgtttccatcccggacccgacaatgggcgggaaaaagaaggctttacacgactacgcggcggagttcaccgacctggtggtgaagcacctgattgagcacagtgactctggggacacgtctgtggtggagaccctttactgcagggcctgcgagctgcccgtgcgcgtgcggagggaccgcatcctggaacacctgtcctcgggcaggcagcacggcctgcggacgcccattctcatgtaaatgtcagtgccaacgctggtgtttcaggagtcatcccagcgggctgcgggctattttaggattctctgccctgcaaacgtttccaaagtacgtggacaggccgcctgatgacactacgtttacgggatctgctagtggcttgcctacttagggagtaaaccctgtgaagtctcgcagttttgttaaagtgtgcgtggccacctgaatgctgccttatcacaagccagatacatactgccgcctcggatctcgctgccaccagccttactgcacacccgtgccacccgcccttgccccgtcagcctcagcctcagctcattctctcaggcagtcccagcattggcacggtacctcctcccgctgtgggccacacgtctctgctccctgtcaaccctcctgccatcagcaccaccaccagcgacttgtctgcccgggaggatgcaacaccatctgcctccaccggccacctttcagtgtttcctgctttccaagtaaagataccagcagtgccctcagagcagaccagccagagtttttctgaagcctcccacagggtgctccccggaggaggcccgagatgctctcgtgactttggagccggggtggctggccaccttggcctgggcatctttggggtgggcttcgggagcccggcactgctgcagagtgtggtggatgagaacagctgctgcttgctgtacgtggtggaggaccagctgtgtgatgtggagcaagccttcagagctgagcatttgggccaacaccagagtggttcgggaacaggatgcagacattgtcctcaacgaccagcggcactttgatccggttttccagttcttgcacaagcaagtttgtgtcagccacgccctggggaggatccactggatcaccgccgtcactgcctgttcccggcggcctctccggcttccctaaagagagcaggtgggactttctacaacgctgctgtgcacgacgtggatgccgtatgcatgttgctgggggaagccactccggacactgtgttttctctgggacatgtcttctgcccagatatggccgccttaaaagatgcagatgctgttgtgatcagcatgaagtttccctgtgaggccgtggttagcgtggacatcagccagcactgcacagacagctgcgaccaggacgtcagccagcactgcacagacagctgcgaccagagactggagatggagtcttgccctgtcacccaggctggagtgcaatggtgcgatctcggctcactgcaacctccgtctcccaggttcaagcgattcttctgcctcagccttctgagtagctgggattacacgcgtgtgccaccacgctcggctaatttttgtatttttagtagagatgggatttcaccatgttggccaggctggtctcgaactactgacctcgtgatccacctgccatggcctcccaaagtgctgggattacaggcgtgagccaccatgctcggcctaaaaaacaattttcttgaagaatccgattttgtgcatagtaatgacacagcaccattcctgagaaataggaaatatatgtgtgtggtatgaaaagccc

SEQ ID NO: 2399 - protein, 158 aa, Homo sapiens; identical to SEQ ID NO: 2383

SEQ ID NO: 2400 - DNA, 2177 bp, Homo sapiens
gtgatgccaccactgctcccaggagcccacaggacctggagctctggaagctgatctcctcccactgcaccagccagcaggttcatgttcgaggccatcttcccctccacaccccaagccaggctgaagagagatccacgggaaaagccgggcctgtcctcattcaggtccacattcaggcaacaaagctcacttggtctttgcatcccacgcctcatgttacctaaggaggccagcccatctcagaggcacagttcgatgtccagctcgatggccagggccctggtgctcctccagagcatggccagccgggacgcccggtgcccagaatggaaaccgcaccaaaagccacgcacgctcagcaagtcggtccagaccatcagccgctactacaggaagacgagtgaacccaaggatgccgccagcctcaccggcttcatgtccaaaatggaacttcgaagggtcttccccacgcatcctgactgcccccagttcagcaccagggccacatccatgtcccactgtggttcacccactgaggccgatttgtccggagagattgacaacagctcggagacctggagaggcacccaggacctgttcttggccaggcggggctcagacacgaacgtggacgggtacctccttcccttcagtaagagcatctgcgagttcgattacttgcggaagaggagaaaatcccagactttgagtccggtcaccagcagctcagtcgcatctcagagctgcctgagaaagaggatgccctggtacctctcagtcatccacgagaaggatcactgcctgtctgagctggagatacaggttcagaagaaagacgaggagatcctgctgctccaggaggagagggaggccctgaagatgcagctgaaatgccttctgaaaggcaaaggccaagagacatccatgtccccaggcaggagggagcagctctcagacgcttcgctgaagctgggcaggctgagcctcctgaaggccttctccagacatgaggaggagctgcagcactggtggcagatgcaggaggagtctgcggcaccggagaggggcaaggagcccgacctgggaggtggcgaggaggacgagggcctggaaggggagcccgatggggtggaggacacgggtgcctggggaggtgtgagccagatgggatccgtgcatgaggagggaagcgaggaggaggaagaggaggaaggggacagggatgaggactcagaggaaagggagctgccggaggaagaggagatccccaggagaagggcctcctccctggccgagtcgtttgaggaggagctgctggcccagctggaggagtacgagcaggtcatcctggacttccagttcaacctggaggccaccaggaccagatactcccttgcaacaggagtgattgcgtctttacaacaacaagtggatttccaagaaacccagctgcgaaagatcaatacggaaaatgagacgctgcagaaggagctccgagagcggaggcagcagctacaagccatgaccgacaagttctccaacctccgagaagataagaaacaccaagagatgatggggctcattgaaaaggacaaccagctcctccgacagcaagtgtcggaactggagagaaagctcaccaagcgggactgtgtcatctcagagttggacaccaaggtcagccagctgcaggagcaggtggaactggaccagaaccacctgcagaggtggaagcagctgcaggaggatttgcagagcaagaaggagatgattcagcaggcagagcagcacacccgcgtggccctggagagctcccagtccaggctcgagaggttaaggaataagatcatccaggccacctttagcatctccgggaccaagtccttggccaacgagatctctgacaatgacatcctggaagccctgcagagaattatctcagagagaagcgactactataatcagctgaagcagaaaggcgtcaaagtgccccccctgcaacagtcagaggccttcctgaccagcaaatccaagaaggggacctccaagtaggcccagccaggcccccaaatacggtcagcccagcagaggccggggcccagctccagaaccacccgcccccaccatgcgtcctgctctcagactcagaattaaaccccggtgttggcactgtc

SEQ ID NO: 2401 - protein, 656 aa, Homo sapiens
MFEAIFPSTPQARLKRDPREKPGLSSFRSTFRQQSSLGLCIPRLMLPKEASPSQRHSSMSSSMARALVLLQSMASRDARCPEWKPHQKPRTLSKSVQTISRYYRKTSEPKDAASLTGFMSKMELRRVFPTHPDCPQFSTRATSMSHCGSPTEADLSGEIDNSSETWRGTQDLFLARRGSDTNVDGYLLPFSKSICEFDYLRKRRKSQTLSPVTSSSVASQSCLRKRMPWYLSVIHEKDHCLSELEIQVQKKDEEILLLQEEREALKMQLKCLLKGKGQETSMSPGRREQLSDASLKLGRLSLLKAFSRHEEELQHWWQMQEESAAPERGKEPDLGGGEEDEGLEGEPDGVEDTGAWGGVSQMGSVHEEGSEEEEEEEGDRDEDSEERELPEEEEIPRRRASSLAESFEEELLAQLEEYEQVILDFQFNLEATRTRYSLATGVIASLQQQVDFQETQLRKINTENETLQKELRERRQQLQAMTDKFSNLREDKKHQEMMGLIEKDNQLLRQQVSELERKLTKRDCVISELDTKVSQLQEQVELDQNHLQRWKQLQEDLQSKKEMIQQAEQHTRVALESSQSRLERLRNKIIQATFSISGTKSLANEISDNDILEALQRIISERSDYYNQLKQKGVKVPPLQQSEAFLTSKSKKGTSK

SEQ ID NO: 2402 - DNA, 561 bp, Homo sapiens
gagacgcggggacacaggtgaggcgcgcggggtccgggctgcggcttcccggtgcggccgcagtgggcaggctcgaggcgtctgccgcacctcagcccacgacctgccccgctgggaggtgcgggccgctggccaggccctgaccgcaacctggcccagaggccccagccctcaggcaaggttctccggtgaagccacagcctggccacctgtcttgatctccccaccgagaaggccccgcccctcccgctgcagccccacagcatgcagccccaggagagccacgtccactatagtaggtgggaggacggcagcagggacggagtcagcctaggggctgtgtccagcacagaagaggcctcacgctgccgcaggatctcccagaggctgtgcacgggcaagctgggcatcgccatgaaggtgctgggcggcgtggccctcttctggatcatcttcatcctgggctacctcacaggctactatgtgcacaagtgcaaataaatgctgccccgcatgcacgcggggggctggccgcacacgtgagagcacaggcctggagac

SEQ ID NO: 2403 - protein, 78 aa, Homo sapiens; identical to SEQ ID NO: 18

SEQ ID NO: 2404 - DNA, 1818 bp, Homo sapiens
tcgacacgatgggcgagttctgtggctgtgaccctagtggagtttgtgggtttctgcccgatagattgtccccttggggcggaaagaagccaaggccaaggagctggtgcggcagctgcagctggaggccgaggagcagaggaagcagaagaagcggcagagtgtgtcgggcctgcacagataccttcacttgctggatggaaatgaaaattacccgtgtcttgtggatgcagacggtgatgtgatttccttcccaccaataaccaacagtgagaagacaaaggttaagaaaacgacttctgatttgtttttggaagtaacaagtgccaccagtctgcagatttgcaaggatgtcatggatgccctcattctgaaaatggcagaaatgaaaaagtacactttagaaaataaagaggaaggatcactctcagatactgaagccgatgcagtctctggacaacttccagatcccacaacgaatcccagtgctggaaaggacgggccctcccttctggtggtggagcaggtccgggtggtggatctggaagggagcctgaaggtggtgtacccgtccaaggccgacctggccactgcccctccccacgtgactgtcgtgcgctgacgccagggccgcctgtccgcgtttgtttggccggttttgcggaggtttctatgcggcaatgctgaattatccgttagattttcaccccagtttttttgttggtttttttttttgagatggagtctcgctctgtcgccaggctggagtgcagtggcgtgatctcgagtcactgcagcctgtgtctcctgggttcaagcgattctcctgcctcagcctcccaagtagctgggactacaggtgtgtgccactaagctcagctaatttttgtatttttagtagagacggggtttcaccattttgaccaggatggtcttgatctcttgacctcatgatctgtccacctctgcccctcaaagtgctgggattacgtgatccacccgcctcagcctcccaaagtgctgggattacaggcgtgagctgtgcctggcccaccccagcattttttaagatgtatgtattcgttgttctgtttttccagatgattctgtcgtaaagtgatgctatgttgtcgttacaacatcaaagtgattttacggtttttgatgggattattcaagtgtcagaattaactgttcaaaatgttctgaatcatgtagatacatggcaggtaactgtttatgggagaaaagtacagtgctgttacgtggcactgtacagtcatgtgccacgtaacagcgtctgggtcagtgacggacacttacctgacagcggatccacaatattctcgtgcagtgtgtttggaatcctggtctgggctctcgtcgttggccttgtagatcaagtaggggaagtgagtgatgttcagtcatgctgctgggacacttggttttccagatgaaaacacataaataaaactacatgcaccatcgaggcttgtgtaaagactctgtgatcacacagcagcggctaagcacacgtttctcatgtgtcactgagcgacacgtgactgtcactggttcggagacccgaaaacttgggaagccaaccgatgtgcgtttccttgaacggcacggtcactttctatgacgcagcatcttgtaaaaccatatcatgccaggatgcagcttggcatgtgcaagggcgttgggttctccagctggcagtgatcataatcttggggggaaaagttttaatgtgaccttagaattggcagaattgcgtctcttcatactgctgttggattgctttgtgggggt

SEQ ID NO: 2405 - protein, 88 aa, Homo sapiens
MDALILKMAEMKKYTLENKEEGSLSDTEADAVSGQLPDPTTNPSAGKDGPSLLVVEQVRVVDLEGSLKVVYPSKADLATAPPHVTVVR

SEQ ID NO: 2406 - DNA, 2977 bp, Homo sapiens
ggtgggtgcctgccagcagctgaggcgccatggcggcggcagcggtgtcagagtcttggccggagctggagctggctgagcgcgagcggcggcgggagctgctgctgacggggcccgggctggaggagcgagtgcgggcggcgggtgggcagctgccgccgcggcttttcaccctgccgctgctgcactacttggaagtgagcggctgcgggagcttgcgcgcgccggggcctggcctggcgcagggcctgccgcagctgcacagcctcgtgctgcggcgcaacgcgctggggcccggcctgagccccgagctcgggccgctgcctgcccttcgggtgctcgacctgtcgggcaacgcgctggaggcgctgccgccgggccaaggcctgggccccgccgagccgccgggccttccgcagctgcagagcctcaacctcagcggcaaccggctgcgcgagctgccagccgacctggcgcgctgcgccccgcgcctgcagagcctcaacctcaccggcaattgcctagactcctttcccgccgagctctttcgccccggcgcgctgcccctgctcagtgaactggcggctgctgacaactgcctccgagaactcagccccgacatcgcccacctggcctcgctcaagacgttggacctctcgaacaaccagctgagcgagatccctgcagagcttgcggactgccccaagctcaaggagatcaatttccgtgggaacaagctgagggacaagcgcctggagaagatggtcagcggctgccagaccagatccatcctggagtacctgcgcgtcggaggccgtggtggcgggaagggcaagggccgtgccgagggctcggagaaggaagagagccggaggaagaggagggagaggaagcagaggcgggaaggtggtgatggggaggagcaggacgtgggagatgccggccggctgctgctcagggtcctgcacgtctctgaaaaccccgtacctctgacagtcagagtgagccccgaggtccgggatgtgcggccctacattgtgggggccgtggtgcgaggcatggacctgcagccagggaatgcactcaagcgcttcctcacctcgcagaccaagctccacgaagatctctgtgagaagaggacggctgccacccttgccacccacgagctccgtgccgtcaaagggcccctgctgtactgcgcccggcccccacaggacctcaagattgtccccttggggcggaaagaagccaaggccaaggagctggtgcggcagctgcagctggaggccgaggagcagaggaagcagaagaagcggcagagtgtgtcgggcctgcacagataccttcacttgctggatggaaatgaaaattacccgtgtcttgtggatgcagacggtgatgtgatttccttcccaccaataaccaacagtgagaagacaaaggttaagaaaacgacttctgatttgtttttggaagtaacaagtgccaccagtctgcagatttgcaaggatgtcatggatgccctcattctgaaaatggcagaaatgaaaaagtacactttagaaaataaagaggaaggatcactctcagatactgaagccgatgcagtctctggacaacttccagatcccacaacgaatcccagtgctggaaaggacgggccctcccttctggtggtggagcaggtccgggtggtggatctggaagggagcctgaaggtggtgtacccgtccaaggccgacctggccactgcccctccccacgtgactgtcgtgcgctgacgccagggccgcctgtccgcgtttgtttggccggttttgcggaggtttctatgcggcaatgctgaattatccgttagattttcaccccagtttttttgttggtttttttttttgagatggagtctcgctctgtcgccaggctggagtgcagtggcgtgatctcgagtcactgcagcctgtgtctcctgggttcaagcgattctcctgcctcagcctcccaagtagctgggactacaggtgtgtgccactaagctcagctaatttttgtatttttagtagagacggggtttcaccattttgaccaggatggtcttgatctcttgacctcatgatctgtccacctctgcccctcaaagtgctgggattacgtgatccacccgcctcagcctcccaaagtgctgggattacaggcgtgagctgtgcctggcccaccccagcattttttaagatgtatgtattcgttgttctgtttttccagatgattctgtcgtaaagtgatgctatgttgtcgttacaacatcaaagtgattttacggtttttgatgggattattcaagtgtcagaattaactgttcaaaatgttctgaatcatgtagatacatggcaggtaactgtttatgggagaaaagtacagtgctgttacgtggcactgtacagtcatgtgccacgtaacagcgtctgggtcagtgacggacacttacctgacagcggatccacaatattctcgtgcagtgtgtttggaatcctggtctgggctctcgtcgttggccttgtagatcaagtaggggaagtgagtgatgttcagtcatgctgctgggacacttggttttccagatgaaaacacataaataaaactacatgcaccatcgaggcttgtgtaaagactctgtgatcacacagcagcggctaagcacacgtttctcatgtgtcactgagcgacacgtgactgtcactggttcggagacccgaaaacttgggaagccaaccgatgtgcgtttccttgaacggcacggtcactttctatgacgcagcatcttgtaaaaccatatcatgccaggatgcagcttggcatgtgcaagggcgttgggttctccagctggcagtgatcataatcttggggggaaaagttttaatgtgaccttagaattggcagaattgcgtctcttcatactgctgttggattgctttgtgggggt

SEQ ID NO: 2407 - protein, 583 aa, Homo sapiens; identical to SEQ ID NO: 20

SEQ ID NO: 2408 - DNA, 1490 bp, Homo sapiens
tcgacacgatgggcgagttctgtggctgtgaccctagtggagtttgtgggtttctgcccgatagattgtccccttggggcggaaagaagccaaggccaaggagctggtgcggcagctgcagctggaggccgaggagcagaggaagcagaagaagcggcagagtgtgtcgggcctgcacagataccttcacttgctggatggaaatgaaaattacccgtgtcttgtggatgcagacggtgatgtgatttccttcccaccaataaccaacagtgagaagacaaaggttaagaaaacgacttctgatttgtttttggaagtaacaagtgccaccagtctgcagatttgcaaggatgtcatggatgccctcattctgaaaatggcagaaatgaaaaagtacactttagaaaataaagaggaaggatcactctcagatactgaagccgatgcagtctctggacaacttccagatcccacaacgaatcccagtgctggaaaggacgggccctcccttctggtggtggagcaggtccgggtggtggatctggaagggagcctgaaggtggtgtacccgtccaaggccgacctggccactgcccctccccacgtgactgtcgtgcgctgacgccagggccgcctgtccgcgtttgtttggccggttttgcggaggtttctatgcggcaatgctgaattatccgttagattttcaccccagtttttttgttggtttttttttttgagatggagtctcgctctgtcgccaggctggagtgcagtggcgtgatctcgagtcactgcagcctgtgtctcctgggttcaagcgattctcctgcctcagcctcccaagtagctgggactacaggtgtgtgccactaagctcagctaatttttgtatttttagtagagacggggtttcaccattttgaccaggatggtcttgatctcttgacctcatgatctgtccacctctgcccctcaaagtgctgggattacgtgatccacccgcctcagcctcccaaagtgctgggattacaggcgtgagctgtgcctggcccaccccagcattttttaagatgtatgtattcgttgttctgtttttccagatgattctgtcgtaaagtgatgctatgttgtcgttacaacatcaaagtgattttacggtttttgatgggattattcaagtgtcagaattaactgttcaaaatgttctgaatcatgtagatacatggcaggtaactgtttatgggagaaaagtacagtgctgttacgtggcactgtacagtcatgtgccacgtaacagcgtctgggtcagtgacggacacttacctgacagcggatccacaatattctcgtgcagtgtgtttggaatcctggtctgggctctcgtcgttggccttgtagatcaagtaggggaagtgagtgatgttcagtcatgctgctgggacacttggttttccagatgaaaacacataaataaaactacatgcaccatc

SEQ ID NO: 2409 - protein, 88 aa, Homo sapiens; identical to SEQ ID NO: 2405

SEQ ID NO: 2410 - DNA, 2649 bp, Homo sapiens
ggtgggtgcctgccagcagctgaggcgccatggcggcggcagcggtgtcagagtcttggccggagctggagctggctgagcgcgagcggcggcgggagctgctgctgacggggcccgggctggaggagcgagtgcgggcggcgggtgggcagctgccgccgcggcttttcaccctgccgctgctgcactacttggaagtgagcggctgcgggagcttgcgcgcgccggggcctggcctggcgcagggcctgccgcagctgcacagcctcgtgctgcggcgcaacgcgctggggcccggcctgagccccgagctcgggccgctgcctgcccttcgggtgctcgacctgtcgggcaacgcgctggaggcgctgccgccgggccaaggcctgggccccgccgagccgccgggccttccgcagctgcagagcctcaacctcagcggcaaccggctgcgcgagctgccagccgacctggcgcgctgcgccccgcgcctgcagagcctcaacctcaccggcaattgcctagactcctttcccgccgagctctttcgccccggcgcgctgcccctgctcagtgaactggcggctgctgacaactgcctccgagaactcagccccgacatcgcccacctggcctcgctcaagacgttggacctctcgaacaaccagctgagcgagatccctgcagagcttgcggactgccccaagctcaaggagatcaatttccgtgggaacaagctgagggacaagcgcctggagaagatggtcagcggctgccagaccagatccatcctggagtacctgcgcgtcggaggccgtggtggcgggaagggcaagggccgtgccgagggctcggagaaggaagagagccggaggaagaggagggagaggaagcagaggcgggaaggtggtgatggggaggagcaggacgtgggagatgccggccggctgctgctcagggtcctgcacgtctctgaaaaccccgtacctctgacagtcagagtgagccccgaggtccgggatgtgcggccctacattgtgggggccgtggtgcgaggcatggacctgcagccagggaatgcactcaagcgcttcctcacctcgcagaccaagctccacgaagatctctgtgagaagaggacggctgccacccttgccacccacgagctccgtgccgtcaaagggcccctgctgtactgcgcccggcccccacaggacctcaagattgtccccttggggcggaaagaagccaaggccaaggagctggtgcggcagctgcagctggaggccgaggagcagaggaagcagaagaagcggcagagtgtgtcgggcctgcacagataccttcacttgctggatggaaatgaaaattacccgtgtcttgtggatgcagacggtgatgtgatttccttcccaccaataaccaacagtgagaagacaaaggttaagaaaacgacttctgatttgtttttggaagtaacaagtgccaccagtctgcagatttgcaaggatgtcatggatgccctcattctgaaaatggcagaaatgaaaaagtacactttagaaaataaagaggaaggatcactctcagatactgaagccgatgcagtctctggacaacttccagatcccacaacgaatcccagtgctggaaaggacgggccctcccttctggtggtggagcaggtccgggtggtggatctggaagggagcctgaaggtggtgtacccgtccaaggccgacctggccactgcccctccccacgtgactgtcgtgcgctgacgccagggccgcctgtccgcgtttgtttggccggttttgcggaggtttctatgcggcaatgctgaattatccgttagattttcaccccagtttttttgttggtttttttttttgagatggagtctcgctctgtcgccaggctggagtgcagtggcgtgatctcgagtcactgcagcctgtgtctcctgggttcaagcgattctcctgcctcagcctcccaagtagctgggactacaggtgtgtgccactaagctcagctaatttttgtatttttagtagagacggggtttcaccattttgaccaggatggtcttgatctcttgacctcatgatctgtccacctctgcccctcaaagtgctgggattacgtgatccacccgcctcagcctcccaaagtgctgggattacaggcgtgagctgtgcctggcccaccccagcattttttaagatgtatgtattcgttgttctgtttttccagatgattctgtcgtaaagtgatgctatgttgtcgttacaacatcaaagtgattttacggtttttgatgggattattcaagtgtcagaattaactgttcaaaatgttctgaatcatgtagatacatggcaggtaactgtttatgggagaaaagtacagtgctgttacgtggcactgtacagtcatgtgccacgtaacagcgtctgggtcagtgacggacacttacctgacagcggatccacaatattctcgtgcagtgtgtttggaatcctggtctgggctctcgtcgttggccttgtagatcaagtaggggaagtgagtgatgttcagtcatgctgctgggacacttggttttccagatgaaaacacataaataaaactacatgcaccatc

SEQ ID NO: 2411 - protein, 583 aa, Homo sapiens; identical to SEQ ID NO: 20

SEQ ID NO: 2412 - DNA, 730 bp, Homo sapiens
tgcagtgcaatggcgtgatcttggctcacagtaacctccgcctcccgggttcgagcaattctcctgcctcagcctcccgagtagctgggattacaggcgtgtgtcaccacgcctggctaatttttttgtatttttagtagagacggggtttcaccatattggccaggctggtctcaaactcctgaccttgtgatccacccacctcggcctcccaaagtgctggaattacaggcatgagccaccgcgcccggcccaatcatgtgtttttgttgaaatgatcctaccagtgattagtggctattgagagttttacagggttatacattgttaagggaccaagaatcaagtacaaaaaattaaaaaggaactgtaaaatcccttggtcattcataaataaatatctaaattaggaatactaattaattgaattttcactcatgagtatgttctgaatatttaatatttatttctattattttcatatgttaagatattccattaaatctaacttaaaagaattgtatgtataaattggcattaggatacaaatgtaaatgtttttaatgaaattttgcaactttttaatattttaacatagttttctatttgtctttatttcaagtaccagaattacaaaatatctaagtaatatatttttgttgtcgttttagggcttaagggttaattcacccagagtatattaatataataaaaagatcactaaatgttt

SEQ ID NO: 2413 - protein, 52 aa, Homo sapiens
PPPPGFEQFSCLSLPSSWDYRRVSPRLANFFVFLVETGFHHIGQAGLKLLTL

SEQ ID NO: 2414 - DNA, 5862 bp, Homo sapiens
gcttggttgtcatgagagtggaggctgcggccggggctatgggcagaggtggccgggtctgcttcttccctgtcactgccgcagcagcttggggtgcaaggcggcctggggcggcggaaggggcgccccccgagttccgtctgaggaagcggcggctgccgaggaagtccacgagagccgggtcccgcacgcccctggggtccgggtgctgaggcgccgcctggccgcctccccgggccgcggcaccgctccgacccagccgccctctccaccggggccgcggcagcgccagtcggggcccttccctctaagcagcccaaacgtgcagaatgccccacaagattggatttgtagtcgtcagctcatctggacacgaagacggcttcagtgcccgggagctcatgatccacgcgccaactgtcagtgggtggcggtcacctagattttgccagtttccacaagaaattgtccttcaaatggtggagagatgtcgaataaggaaactgcagttacttgctcaccagtatatgatttcaagtaaaattgagttctacattagtgaaagcttgcctgaatattttgcaccctatcaagcagagcggtttcgaagacttggctacgtgtctctctgtgataatgaaaagacaggttgcaaagcccgggaactaaaatcagtttatgtggatgcagtaggacaatttcttaaactgatttttcaccaaaaccatgtcaacaaatacaacatatataatcaggttgctttggttgccataaatatcattggagaccctgcagatttcagtgatgaaagcaatactgcctctcgagagaagttgattgaccactaccttgggcacaacagcgaggaccctgctctagaaggaacgtacgccaggaaatctgactatatctctccgctagatgacttagcttttgatatgtaccaagatccagaagttgcacagatcatacgaaaattagatgaaagaaaacgggaagctgtccaaaaggaacgctatgattatgccaagaaactaaaacaagccattgctgatttgcaaaaggttggtgaacgccttgggaggtatgaggtagagaaacgctgtgccgtggagaaggaagactacgatctcgccaaggagaagaagcagcagatggagcagtatcgtgccgaggtgtacgagcagctggagctgcacagcctcctggatgccgagctgatgcgaagaccttttgatttgcccctccagcccctcgctcgttctggcagtccttgccaccaaaagccaatgccctcactaccacaactggaagaaagaggaacagaaaaccagtttgcagaacctttccttcaggaaaagccttcatcatattctctaactatttctcctcagcattctgcagtagacccgttactccctgccacagatcctcatccaaagatcaatgcagagtccctgccctacgatgagcggcctcttccagctattcgtaagcattatggggaggcagtggtggagccggaaatgagtaatgcagacatcagcgatgctcggaggggaggcatgttaggggagccagagcccttaaccgagaaggccttgagagaagccagctctgccatcgatgtgttgggagaaaccttggttgctgaggcctattgtaagacgtggtcctaccgagaggatgcactgcttgccttgtctaagaagttaatggaaatgcctgttggaaccccaaaagaagatttaaagaacacactgagagcatccgtctttctcgttagaagagccataaaggacattgtgacctccgtttttcaggcttctttgaaattgttgaaaatgatcattacacaatatattcctaaacataaactgagtaaacttgaaacagctcactgtgtggagaggaccattcccgttttgctcaccagaactggagattcttctgcccgcctccgcgtcacagctgcaaattttattcaggaaatggccttgtttaaagaagttaagtctctccaaattattccatcctacctggtgcagccattgaaagcaaactcttcagttcacctggcaatgagtcagatgggcctcctggcccggctgctgaaagacctgggcactggcagctcgggcttcaccattgacaacgtgatgaagttttcagtgagtgccctggagcatagagtgtatgaggtccgcgagacggcggttcgaattattttggacatgtacagacagcaccaggcttccatcctggagtaccttcctccagacgacagcaacacacgcaggaacattctctacaaaacaatttttgagggatttgctaaaatagatggcagagctacagatgctgagatgagggcacggagaaaagcggctacagaagaagcagaaaaacaaaagaaagaagaaataaaagctttacaagggcagctggcagcactgaaagaaattcaggctgaagttcaggaaaaagaaagtgatgctgtgaagccaaagaatcaggacattcaaggagggaaagcagcccctgctgaagctctgggaatcccggatgagcactatctagataatttgtgtattttttgtggggaaaggagtgaatccttcacagaggaaggtctggatctccactactggaagcactgtctcatgctgacaagatgtgaccactgcaaacaggtggtcgagatatccagtctgacggagcacttgctgacggaatgtgacaaaaaagacgggtttggaaagtgttaccgttgcagtgaggctgttttcaaggaagagctgcccagacacataaaacacaaggattgcaaccctgccaaaccggagaagctggcaaaccggtgtcccctgtgtcatgagaacttcagccctggagaagaggcatggaaagctcacctgatgggcccagccggctgcacgatgaacctgcgcaagacacacattctgcagaaggccccggcactgcagccagggaaaagctcagctgtggccgcatcaggccccttggggtcaaaggccggaagcaagatccccaccccgaagggcggactgagcaagagctccagcaggacgtacgccaagcgctgacgcggcgctcgggctccttggtctctgtgagggatggagcgggtctcctgattctacaccatctctccagaactctctggccttggtggccccatgctctggctgctgtccccagctccccgccgtgcacgcctcttacgcgtctgtgccgtcagctctcgtgcaaacgatatggatgcagctaaccaaagatcctgcgtgcagtgccaggacctggccgcactgtacattaagccttcagggctgtctcaggccttccttagaatcagagaaggaagcgtcctgtttggagagagccagagagcaccgccgggaggcgctcgcgcaaggccacggtcagcacaggcacggtcccgctttccttagtgcttggagcaatttccataaaacattcaccagaaaccttttgcacatcggtctctgccacacgcagtagaatttccgcagggctgtggctcggccagcagcggttccaggagagtggcggtgcgcacgggcctccagccgtgccttccccctgcaggccccgtctgctgggcctgctgcccagtgcactcagccccaggtagcagaactcacgttcccactatagcaagaaataaaggcaaaagagaacatcttttttttaatcgtagtttttttgagaattggtcccacctcagccgcaccttgctggatgcttctccagtagtgctgcccctgtgacaggcatcagctccctgctggaactgaggtagacacaggtgtgggcccttcccgtgcctttgctcagaggcgcttcactttctccacactttcgaattcctaaagacatgtggaggaagtcactgttaaatgaatttccacctgatcaccctgtgttcacagcaggcagaagcccactggtatgggcctcccgccccttccacatccatgttgtgattggatccataagtttactttcttcaaagagttgataggatgtttaaaacatcaacacattgcttaaaatgatgaaaccaaccctcaaaaaacagtctcctaaccagccatcccctcctgtgggagtgagctgggggttttgtccatagctttggttgggcctgtgtcacatccaggcagccatgtggagggagtcagggtctgtctggaagcatccaccctctcgctgccccagcctgtgctcccaggggcctaggctaccatggactgaagggcagtcccctcccacctggtgcccagggcttctgcttgcctcgctgatgttgcatgggcagacttcaaaaaggatagttagaaaggtttgggttgatggagtttgcattaatgcaattagtgtataaatatgttttaattgccaaccgtgtgaaacaacaaaatatctaaaaactaatcccgatttgaacaatgtactccctggcctggatacattaataaccataaatttgcatgaattaatctccacgtttggtaaactaatacctctggttgactgagaatactgagtaagatataagacctaccaggaacctttaagaatatgctctgctcagtgttgtttgtctgcttgtttgcgacagagcgagactccgtctcgaaaaaaaaaaaaagtataaggagagaaataactttaaagtttattagacaaaacagagtatagatgccaagatgtctgtaaaatgattttttctggttttaaagagatgttggccattattttctaatccatttttaaaatacagacaaaacacttctttaaacagaacaagaatgagaaaagttaaccaaggaattattcttttctcaccaatcaacacttttaagaaatatatatatatatatacacacatatacacatgccttctatatattgtaacttaaagaaaatacttataaaaagacttcatttttagtgattgacaagcaaacgggttcatttaaaacaggttcctcttttgttagttacagggggtttttttgttgtttttttgtttttgtttttgttttgcgggggtggtggggtttgagacggagtcttgctctgttgcctaggctggagtgcagtggcgcgatcttggccccctgcaacctccgcctcccgggttcgagcaattctcctgcctcagcctcccgagtagctgggattacaggcgtgtgtcaccacgcctggctaatttttttgtatttttagtagagacggggtttcaccatattggccaggctggtctcaaactcctgaccttgtgatccacccacctcggcctcccaaagtgctggaattacaggcatgagccaccgcgcccggcccaatcatgtgtttttgttgaaatgatcctaccagtgattagtggctattgagagttttacagggttatacattgttaagggaccaagaatcaagtacaaaaaattaaaaaggaactgtaaaatcccttggtcattcataaataaatatctaaattaggaatactaattaattgaattttcactcatgagtatgttctgaatatttaatatttatttctattattttcatatgttaagatattccattaaatctaacttaaaagaattgtatgtataaattggcattaggatacaaatgtaaatgtttttaatgaaattttgcaactttttaatattttaacatagttttctatttgtctttatttcaagtaccagaattacaaaatatctaagtaatatatttttgttgtcgttttagggcttaagggttaattcacccagagtatattaatataataaaaagatcact

SEQ ID NO: 2415 - protein, 925 aa, Homo sapiens; identical to SEQ ID NO: 22

SEQ ID NO: 2416 - DNA, 1927 bp, Homo sapiens
agcttacacagcgagtccttttgggtctcaggtagcgtgccaggtccgtctcgcctgattaacactctgtgtgcctcctctgctgcaggcatggaaagctcacctgatgggcccagccggctgcacgatgaacctgcgcaagacacacattctgcagaaggccccggcactgcagccagggaaaagctcagctgtggccgcatcaggccccttggggtcaaaggccggaagcaagatccccaccccgaagggcggactgagcaagagctccagcaggacgtacgccaagcgctgacgcggcgctcgggctccttggtctctgtgagggatggagcgggtctcctgattctacaccatctctccagaactctctggccttggtggccccatgctctggctgctgtccccagctccccgccgtgcacgcctcttacgcgtctgtgccgtcagctctcgtgcaaacgatatggatgcagctaaccaaagatcctgcgtgcagtgccaggacctggccgcactgtacattaagccttcagggctgtctcaggccttccttagaatcagagaaggaagcgtcctgtttggagagagccagagagcaccgccgggaggcgctcgcgcaaggccacggtcagcacaggcacggtcccgctttccttagtgcttggagcaatttccataaaacattcaccagaaaccttttgcacatcggtctctgccacacgcagtagaatttccgcagggctgtggctcggccagcagcggttccaggagagtggcggtgcgcacgggcctccagccgtgccttccccctgcaggccccgtctgctgggcctgctgcccagtgcactcagccccaggtagcagaactcacgttcccactatagcaagaaataaaggcaaaagagaacatcttttttttaatcgtagtttttttgagaattggtcccacctcagccgcaccttgctggatgcttctccagtagtgctgcccctgtgacaggcatcagctccctgctggaactgaggtagacacaggtgtgggcccttcccgtgcctttgctcagaggcgcttcactttctccacactttcgaattcctaaagacatgtggaggaagtcactgttaaatgaatttccacctgatcaccctgtgttcacagcaggcagaagcccactggtatgggcctcccgccccttccacatccatgttgtgattggatccataagtttactttcttcaaagagttgataggatgtttaaaacatcaacacattgcttaaaatgatgaaaccaaccctcaaaaaacagtctcctaaccagccatcccctcctgtgggagtgagctgggggttttgtccatagctttggttgggcctgtgtcacatccaggcagccatgtggagggagtcagggtctgtctggaagcatccaccctctcgctgccccagcctgtgctcccaggggcctaggctaccatggactgaagggcagtcccctcccacctggtgcccagggcttctgcttgcctcgctgatgttgcatgggcagacttcaaaaaggatagttagaaaggtttgggttgatggagtttgcattaatgcaattagtgtataaatatgttttaattgccaaccgtgtgaaacaacaaaatatctaaaaactaatcccgatttgaacaatgtactccctggcctggatacattaataaccataaatttgcatgaattaatctccacgtttggtaaactaatacctctggttgactgagaatactgagtaagatataagacctaccaggaacctttaagaatatgctctgctcagtgttgtttgtctgcttgtttgcgacggagtctcactgtgtcgcccgggctgcagtgcaatggcgtgatcttggctcacagtaacctccacctcctgggtt

SEQ ID NO: 2417 - protein, 129 aa, Homo sapiens
MESSPDGPSRLHDEPAQDTHSAEGPGTAAREKLSCGRIRPLGVKGRKQDPHPEGRTEQELQQDVRQALTRRSGSLVSVRDGAGLLILHHLSRTLWPWWPHALAAVPSSPPCTPLTRLCRQLSCKRYGCS

SEQ ID NO: 2418 - DNA, 917 bp, Homo sapiens
agcttacacagcgagtccttttgggtctcaggtagcgtgccaggtccgtctcgcctgattaacactctgtgtgcctcctctgctgcaggcatggaaagctcacctgatgggcccagccggctgcacgatgaacctgcgcaagacacacattctgcagaaggccccggcactgcagccagggaaaagctcagctgtggccgcatcaggccccttggggtcaaaggccggaagcaagatccccaccccgaagggcggactgagcaagagctccagcaggacgtacgccaagcgctgacgcggcgctcgggctccttggtctctgtgagggatggagcgggtctcctgattctacaccatctctccagaactctctggccttggtggccccatgctctggctgctgtccccagctccccgccgtgcacgcctcttacgcgtctgtgccgtcagctctcgtgcaaacgatatggatgcagctaaccaaagatcctgcgtgcagtgccaggacctggccgcactgtacattaagccttcagggctgtctcaggccttccttagaatcagagaaggaagcgtcctgtttggagagagccagagagcaccgccgggaggcgctcgcgcaaggccacggtcagcacaggcacggtcccgctttccttagtgcttggagcaatttccataaaacattcaccagaaaccttttgcacatcggtctctgccacacgcagtagaatttccgcagggctgtggctcggccagcagcggttccaggagagtggcggtgcgcacgggcctccagccgtgccttccccctgcaggccccgtctgctgggcctgctgcccagtgcactcagccccaggtagcagaactcacgttcccactatagcaagaaataaaggcaaaagagaacatcttt

SEQ ID NO: 2419 - protein, 129 aa, Homo sapiens; identical to SEQ ID NO: 2417

SEQ ID NO: 2420 - DNA, 3613 bp, Homo sapiens
gcttggttgtcatgagagtggaggctgcggccggggctatgggcagaggtggccgggtctgcttcttccctgtcactgccgcagcagcttggggtgcaaggcggcctggggcggcggaaggggcgccccccgagttccgtctgaggaagcggcggctgccgaggaagtccacgagagccgggtcccgcacgcccctggggtccgggtgctgaggcgccgcctggccgcctccccgggccgcggcaccgctccgacccagccgccctctccaccggggccgcggcagcgccagtcggggcccttccctctaagcagcccaaacgtgcagaatgccccacaagattggatttgtagtcgtcagctcatctggacacgaagacggcttcagtgcccgggagctcatgatccacgcgccaactgtcagtgggtggcggtcacctagattttgccagtttccacaagaaattgtccttcaaatggtggagagatgtcgaataaggaaactgcagttacttgctcaccagtatatgatttcaagtaaaattgagttctacattagtgaaagcttgcctgaatattttgcaccctatcaagcagagcggtttcgaagacttggctacgtgtctctctgtgataatgaaaagacaggttgcaaagcccgggaactaaaatcagtttatgtggatgcagtaggacaatttcttaaactgatttttcaccaaaaccatgtcaacaaatacaacatatataatcaggttgctttggttgccataaatatcattggagaccctgcagatttcagtgatgaaagcaatactgcctctcgagagaagttgattgaccactaccttgggcacaacagcgaggaccctgctctagaaggaacgtacgccaggaaatctgactatatctctccgctagatgacttagcttttgatatgtaccaagatccagaagttgcacagatcatacgaaaattagatgaaagaaaacgggaagctgtccaaaaggaacgctatgattatgccaagaaactaaaacaagccattgctgatttgcaaaaggttggtgaacgccttgggaggtatgaggtagagaaacgctgtgccgtggagaaggaagactacgatctcgccaaggagaagaagcagcagatggagcagtatcgtgccgaggtgtacgagcagctggagctgcacagcctcctggatgccgagctgatgcgaagaccttttgatttgcccctccagcccctcgctcgttctggcagtccttgccaccaaaagccaatgccctcactaccacaactggaagaaagaggaacagaaaaccagtttgcagaacctttccttcaggaaaagccttcatcctattcgtaagcattatggggaggcagtggtggagccggaaatgagtaatgcagacatcagcgatgctcggaggggaggcatgttaggggagccagagcccttaaccgagaaggccttgagagaagccagctctgccatcgatgtgttgggagaaaccttggttgctgaggcctattgtaagacgtggtcctaccgagaggatgcactgcttgccttgtctaagaagttaatggaaatgcctgttggaaccccaaaagaagatttaaagaacacactgagagcatccgtctttctcgttagaagagccataaaggacattgtgacctccgtttttcaggcttctttgaaattgttgaaaatgatcattacacaatatattcctaaacataaactgagtaaacttgaaacagctcactgtgtggagaggaccattcccgttttgctcaccagaactggagattcttctgcccgcctccgcgtcacagctgcaaattttattcaggaaatggccttgtttaaagaagttaagtctctccaaattattccatcctacctggtgcagccattgaaagcaaactcttcagttcacctggcaatgagtcagatgggcctcctggcccggctgctgaaagacctgggcactggcagctcgggcttcaccattgacaacgtgatgaagttttcagtgagtgccctggagcatagagtgtatgaggtccgcgagacggcggttcgaattattttggacatgtacagacagcaccaggcttccatcctggagtaccttcctccagacgacagcaacacacgcaggaacattctctacaaaacaatttttgagggatttgctaaaatagatggcagagctacagatgctgagatgagggcacggagaaaagcggctacagaagaagcagaaaaacaaaagaaagaagaaataaaagctttacaagggcagctggcagcactgaaagaaattcaggctgaagttcaggaaaaagaaagtgatgctgtgaagccaaagaatcaggacattcaaggagggaaagcagcccctgctgaagctctgggaatcccggatgagcactatctagataatttgtgtattttttgtggggaaaggagtgaatccttcacagaggaaggtctggatctccactactggaagcactgtctcatgctgacaagatgtgaccactgcaaacaggtggtcgagatatccagtctgacggagcacttgctgacggaatgtgacaaaaaagacgggtttggaaagtgttaccgttgcagtgaggctgttttcaaggaagagctgcccagacacataaaacacaaggattgcaaccctgccaaaccggagaagctggcaaaccggtgtcccctgtgtcatgagaacttcagccctggagaagaggcatggaaagctcacctgatgggcccagccggctgcacgatgaacctgcgcaagacacacattctgcagaaggccccggcactgcagccagggaaaagctcagctgtggccgcatcaggccccttggggtcaaaggccggaagcaagatccccaccccgaagggcggactgagcaagagctccagcaggacgtacgccaagcgctgacgcggcgctcgggctccttggtctctgtgagggatggagcgggtctcctgattctacaccatctctccagaactctctggccttggtggccccatgctctggctgctgtccccagctccccgccgtgcacgcctcttacgcgtctgtgccgtcagctctcgtgcaaacgatatggatgcagctaaccaaagatcctgcgtgcagtgccaggacctggccgcactgtacattaagccttcagggctgtctcaggccttccttagaatcagagaaggaagcgtcctgtttggagagagccagagagcaccgccgggaggcgctcgcgcaaggccacggtcagcacaggcacggtcccgctttccttagtgcttggagcaatttccataaaacattcaccagaaaccttttgcacatcggtctctgccacacgcagtagaatttccgcagggctgtggctcggccagcagcggttccaggagagtggcggtgcgcacgggcctccagccgtgccttccccctgcaggccccgtctgctgggcctgctgcccagtgcactcagccccaggtagcagaactcacgttcccactatagcaagaaataaaggcaaaagagaacatcttt

SEQ ID NO: 2421 - protein, 526 aa, Homo sapiens [sequence omitted]

SEQ ID NO: 2422 - DNA, 2178 bp, Homo sapiens
gcttggttgtcatgagagtggaggctgcggccggggctatgggcagaggtggccgggtctgcttcttccctgtcactgccgcagcagcttggggtgcaaggcggcctggggcggcggaaggggcgccccccgagttccgtctgaggaagcggcggctgccgaggaagtccacgagagccgggtcccgcacgcccctggggtccgggtgctgaggcgccgcctggccgcctccccgggccgcggcaccgctccgacccagccgccctctccaccggggccgcggcagcgccagtcggggcccttccctctaagcagcccaaacgtgcagaatgccccacaagattggatttgtagtcgtcagctcatctggacacgaagacggcttcagtgcccgggagctcatgatccacgcgccaactgtcagtgggtggcggtcacctagattttgccagtttccacaagaaattgtccttcaaatggtggagagatgtcgaataaggaaactgcagttacttgctcaccagtatatgatttcaagtaaaattgagttctacattagtgaaagcttgcctgaatattttgcaccctatcaagcagagcggtttcgaagacttggctacgtgtctctctgtgataatgaaaagacaggttgcaaagcccgggaactaaaatcagtttatgtggatgcagtaggacaatttcttaaactgatttttcaccaaaaccatgtcaacaaatacaacatatataatcaggttgctttggttgccataaatatcattggagaccctgcagatttcagtgatgaaagcaatactgcctctcgagagaagttgattgaccactaccttgggcacaacagcgaggaccctgctctagaaggaacgtacgccaggaaatctgactatatctctccgctagatgacttagcttttgatatgtaccaagatccagaagttgcacagatcatacgaaaattagatgaaagaaaacgggaagctgtccaaaaggaacgctatgattatgccaagaaactaaaacaagccattgctgatttgcaaaaggttggtgaacgccttgggaggtatgaggtagagaaacgctgtgccgtggagaaggaagactacgatctcgccaaggagaagaagcagcagatggagcagtatcgtgccgaggtgtacgagcagctggagctgcacagcctcctggatgccgagctgatgcgaagaccttttgatttgcccctccagcccctcgctcgttctggcagtccttgccaccaaaagccaatgccctcactaccacaactggaagaaagaggaacagaaaaccagtttgcagaacctttccttcaggaaaagccttcatcatattctctaactatttctcctcagcattctgcagtagacccgttactccctgccacagatcctcatccaaagatcaatgcagagtccctgccctacgatgagcggcctcttccagctattcgtaagcattatggggaggcagtggtggagccggaaatgagtaatgcagacatcagcgatgctcggaggggaggcatgttaggggagccagagcccttaaccgagaaggccttgagagaagccagctctgccatcgatgtgttgggagaaaccttggttgctgaggcctattgtaagacgtggtcctaccgagaggatgcactgcttgccttgtctaagaagttaatggaaatgcctgttggaaccccaaaagaagatttaaagaacacactgagagcatccgtctttctcgttagaagagccataaaggacattgtgacctccgtttttcaggcttctttgaaattgttgaaaatgatcattacacaatatattcctaaacataaactgagtaaacttgaaacagctcactgtgtggagaggaccattcccgttttgctcaccagaactggagattcttctgcccgcctccgcgtcacagctgcaaattttattcaggtctgaacttcaccacggcatttgaaaccgtagatgataaacatattcctgtagctctctggctttcttaacaccttttacaagattctgtctctactcagttaacattattctcagggattcaccatcacactttccttatgctctaaaaggtcagttttgtcttagacataaacttcagttaaaatct

SEQ ID NO: 2423 - protein, 554 aa, Homo sapiens
MPHKIGFVVVSSSGHEDGFSARELMIHAPTVSGWRSPRFCQFPQEIVLQMVERCRIRKLQLLAHQYMISSKIEFYISESLPEYFAPYQAERFRRLGYVSLCDNEKTGCKARELKSVYVDAVGQFLKLIFHQNHVNKYNIYNQVALVAINIIGDPADFSDESNTASREKLIDHYLGHNSEDPALEGTYARKSDYISPLDDLAFDMYQDPEVAQIIRKLDERKREAVQKERYDYAKKLKQAIADLQKVGERLGRYEVEKRCAVEKEDYDLAKEKKQQMEQYRAEVYEQLELHSLLDAELMRRPFDLPLQPLARSGSPCHQKPMPSLPQLEERGTENQFAEPFLQEKPSSYSLTISPQHSAVDPLLPATDPHPKINAESLPYDERPLPAIRKHYGEAVVEPEMSNADISDARRGGMLGEPEPLTEKALREASSAIDVLGETLVAEAYCKTWSYREDALLALSKKLMEMPVGTPKEDLKNTLRASVFLVRRAIKDIVTSVFQASLKLLKMIITQYIPKHKLSKLETAHCVERTIPVLLTRTGDSSARLRVTAANFIQV

SEQ ID NO: 2424 - DNA, 1114 bp, Homo sapiens
cccagggctgggcttggttgtcatgagagtggaggctgcggccggggctatgggcagaggtggccgggtctgcttcttccctgtcactgccgcagcagcttggggtgcaaggcggcctggggcggcggaaggggcgccccccgagttccgtctgaggaagcggcggctgccgaggaagtccacgagagccgggtcccgcacgcccctggggtccgggtgctgaggcgccgcctggccgcctccccgggccgcggcaccgctccgacccagccgccctctccaccggggccgcggcagcgccagtcggggcccttccctctaagcagcccaaacgtgcagaatgccccacaagattggatttgtagtcgtcagctcatctggacacgaagacggcttcagtgcccgggagctcatgatccacgcgccaactgtcagtgggtggcggtcacctagattttgccagtttccacaagaaattgtccttcaaatggtggagagatgtcgaataaggaaactgcagttacttgctcaccagtatatgatttcaagtaaaattgagttctacattagtgaaagcttgcctgaatattttgcaccctatcaagcagagcggtttcgaagacttggctacgtgtctctctgtgataatgaaaagacaggttgcaaagcccgggaactaaaatcagtttatgtggatgcagtaggacaatttcttaaactgatttttcaccaaaaccatgtcaacaaatacaacatatataatcaggttgctttggttgccataaatatcattggagaccctgcagatttcagtgatgaaagcaatactgcctctcgagagaagttgattgaccactaccttgggcacaacagcgaggaccctgctctagaaggaacgtacgccagcagtgtaagaaccgggggtgaatccacttttggggagctaaagggccccgctgtgccatcctcggtcaccctctctgtcctgggcacctctttgggacagtggttcccttgccacctgcctgctgtggatgacaatgaggggactccattccagaggtgcctggtctaaaggaaagaagggaagggctgccatagttgccgcagtgag

SEQ ID NO: 2425 - protein, 244 aa, Homo sapiens
MPHKIGFVVVSSSGHEDGFSARELMIHAPTVSGWRSPRFCQFPQEIVLQMVERCRIRKLQLLAHQYMISSKIEFYISESLPEYFAPYQAERFRRLGYVSLCDNEKTGCKARELKSVYVDAVGQFLKLIFHQNHVNKYNIYNQVALVAINIIGDPADFSDESNTASREKLIDHYLGHNSEDPALEGTYASSVRTGGESTFGELKGPAVPSSVTLSVLGTSLGQWFPCHLPAVDDNEGTPFQRCLV

SEQ ID NO: 2426 - DNA, 8189 bp, Homo sapiens
gcaaccctccgcgctccggagcctcctcagcctcccgcacaccccgagacgctcgccccgctgggcctcggtccccgcctcctcccccgtccttttcccctctctcgctccccacattgtctctgcctcattttctctcctagttgaggattaaaaaaaaaaaaaaatcaccatcatcctcagggagccccctcgccctcggaaaacaaaaccagacatgatcctgggctcctgcttctgaaagatctgcccgaccgaggaggagggagcctaggttcaagtcgcaggaaaggtcacggcagggaagccccctcagcccctccgcgtcgcctccccgcgggccgcccctctcggccctgcgccccgcggccccgcagcctccgcgcggcctcccgccccatccccgccactttccccggagctgggccgcgaacacctcactattgatggtgtagcgctttaggggaaggaggtgattgtctaggagtaactgtatgtgcgctcagcaccgggtcacaaccaccgtgggatccacttacagagaagatttgtggagagcttcagcctgtttatggtgttactgagaaaggaattgtggccatttgatataattctggatggaagacctcttatttgtattacattgaattagagcatttttgaaacgttggggttgttggagtggttggattttccctggaattgagtgagaaattcagaagactgaagcccaggcttactgtctacctttcacggaggcctagccgtgagaggacagaagaaggcacgtggcgaatcatgacagcggacaaagacaaagacaaagacaaagagaaggaccgggaccgagaccgggaccgagagagagagaaaagagacaaagcaagagagagtgagaattcaaggccacgccggagctgtaccttggaaggaggagccaaaaattatgctgagagtgatcacagtgaagacgaggacaatgacaacaatagtgccaccgcagaggagtccacgaagaagaataagaagaaaccaccgaaaaaaaagtctcgttatgaaaggacagataccggtgagataacatcctacatcactgaagatgatgtggtctacagaccaggagactgtgtgtatatcgagagtcggaggccaaacacaccgtatttcatctgtagcattcaagacttcaaactggtccacaactcccaggcctgttgcagatctccaactcctgctttgtgtgaccccccagcatgctctctgccggtggcatcacagccaccacagcatctttctgaagccgggagagggcctgtagggagtaagagggaccatctcctcatgaacgtcaaatggtactaccgtcaatctgaggttccagattctgtgtatcagcatttggttcaggatcgacataatgaaaatgactctggaagagaacttgtcattacagacccagttatcaagaaccgagagctcttcatttctgattacgttgacacttaccatgctgctgcccttagagggaagtgtaacatctcccatttttctgacatatttgctgctagagagtttaaagcccgagtggattcatttttctacatattaggatataaccctgagacaaggaggctgaacagtacccagggggagattcgtgtcggtcctagtcatcaggccaaacttccagatctgcaaccatttccttctccagatggtgatacagtgacccaacatgaggaactggtctggatgcctggagttaacgactgtgacctccttatgtacttgagggcagcaaggagcatggcggcatttgcaggaatgtgtgatggaggctctacagaggacggctgtgtcgcagcctctcgggatgacaccactctgaatgcactgaacacactgcatgaaagcggttacgatgctggcaaagccctgcagcgcctggtgaagaagcctgtgcccaagctcatcgagaagtgctggaccgaggacgaagtgaaacgcttcgttaagggactcaggcagtacgggaagaacttcttcagaattagaaaggagctgcttcccaataaggaaacaggggagctgatcaccttctattactattggaagaagacccccgaagcagccagctcccgagcccatcgtaggcaccgcaggcaggccgtgttcaggaggattaagactcgcaccgcgtccacacccgtcaacacaccctccagacccccgtccagtgaattcttggacctaagttcagccagtgaagatgacttcgacagtgaggacagtgagcaggagctgaaggggtacgcctgccgccactgcttcaccaccacctccaaagattggcaccacggaggccgggagaacatcctgctttgcaccgactgtcgcatccacttcaagaaatacggtgagctcccgcccattgagaagcccgtggacccgccaccgtttatgttcaaacccgtcaaggaagaggatgatgggctcagtgggaagcatagcatgaggacacggcggagtcggggctcgatgtcgacactacgcagtggtcggaagaagcagccagccagccctgatggtcgcacctcacccatcaatgaagacatccgctccagcggccggaactcccccagcgctgccagtacctccagcaatgacagtaaagcagagacagtgaagaagtcggccaagaaggtgaaggaggaagcctcttcccctcttaagagtaacaaacgccagcgggagaaggtggcctctgatacggaggaggctgacaggaccagctccaagaagacaaaaacgcaggagatcagcaggcccaactcgccatctgaaggtgagggagagagttcagacagtcgcagcgtcaacgatgagggtagcagtgaccccaaagacatcgaccaggacaatcgcagcacgtccccgagcatccccagcccccaggacaatgagagtgactcggactcgtcagcccagcagcagatgctgcaggcccagcccccagccttgcaggctcccactggggtcaccccagctccctcctcagctcctccagggacccctcagctgcccacgccagggcccacgccctctgccactgcagttcccccacagggctcccccacggcctcccaggcccctaaccagccacaggctcccacagcgcctgttccccacacccacatccaacaggcaccggccttgcacccccagcggccgccctcaccgcatcccccgccgcatccctcgccacatcccccgctgcagcctctgactgggtcggcgggccagccttctgcaccctctcatgcccagcccccactgcacggtcagggcccacccggccctcacagcctgcaggctgggcccctgctgcagcacccaggccccccacagccctttggcctccctccccaggcctcccaaggccaggcccctctggggacctccccagcagcagcgtaccctcacacctccctgcagctgccagcctctcagtcagcgctgcagtcccaacagcctccacgggagcagcccctgccaccagcgcccttggccatgccccacatcaagcccccgcctaccactcccatcccccagctgccggcgccacaggcccacaagcaccctccccacctctcggggccctcacccttctccatgaatgccaacctgcctccccctccagccctgaagcccctgagctccctgtccacacatcaccccccgtcggctcaccccccacccctgcaactcatgcctcagagccagccattgccctcctcgcccgcccagccccccgggctgacccagagccagaacctgcccccgccccctgcctcccacccccctacaggcctccaccaggtggccccccaacccccgtttgctcagcacccctttgtccctggaggccctcctcccatcacccctccgacctgcccctccacctctaccccaccggcgggacctggcacctcggcccagccaccctgctctggtgcggcggcttcaggaggcagcatagcgggggggtcgtcctgcccactccccaccgtccagatcaaggaggaggctctggacgacgctgaggagcctgagagcccccctcccccaccaaggagcccgtccccggagcccactgtggtggacacccccagtcacgccagccagtcagctaggttctacaaacacctggaccggggctacaactcgtgtgcccggacagacctgtacttcatgcctctggccgggtccaagctggccaagaagagggaggaggccattgagaaggccaagcgcgaggctgagcagaaagcccgagaggagcgagagcgggagaaggagaaggagaaggagcgggagcgggagcgagagcgggagcgcgaggcagagcgggcggctaaggcgtccagctcagcgcatgaaggtcgcctcagtgacccacagctcagtggtcctggccacatgcggccatccttcgagccaccaccaaccaccattgctgctgtgcccccctacatcgggcccgacacacctgcccttcggactctgagcgagtacgcccggccccacgtcatgtcgcccaccaaccgcaaccaccccttctacatgccccttaaccccacggaccccctgctggcctaccacatgcctggcctctacaacgtcgaccccaccatccgcgagcgggagctccgggagcgggagatccgagagcgggagatccgagagcgggagctgcgggagaggatgaagccgggcttcgaggtgaagcccccagagctggaccccctgcacccagccgccaaccccatggagcactttgcccggcacagcgccctcaccatccccccgaccgccgggccccacccttttgcttctttccacccgggcctgaaccccttggagagggagagactggccctggcgggcccccagctgcggcccgagatgagctaccctgacagactggcagccgagcgtatccacgcagagcgcatggcatcgctgaccagcgatcccctggcccgactgcagatgttcaacgtgactccgcaccatcaccagcactctcacattcactcccacctccacctccaccagcaggaccccctccaccaaggttcagcaggccccgttcacccgctggtcgaccccctgactgccggtccccacctggctcgcttcccctacccgcctggcactctccccaaccctctgcttggacagcccccacacgagcacgagatgcttcgccacccagttttcggcaccccctacccccgtgacctgcctggggccatcccaccccccatgtcagcagcccaccagctgcaggccatgcatgcccagtcggccgagctgcagagactggccatggagcagcagtggctgcatggacacccccacatgcatggtggccacctaccaagtcaggaagattattacagtcgactgaagaaagaaggtgacaagcagttataagttatttatttgttaacgctggctgtggaaaccccagttcttggggggagaaacaggactttttacataaaataggagctgcaaaagcaaaaagaatatcttctaaagatttctttatatatttaaaaacccacaactaaaaatgtatccacatagtagtgttcgtttgtcgagaggatttcctgagactggtttggatctccctgcatgacagtcccccagaaacttagtgagtcctggactggactgaacatccagaaagcttccctgcaatcttggggtttggctttagttttcttttccttgatttctcagtaggtgctagaatccagttcacacccttcactgtgcgtgcagacacactgacacactccgccacgagtgctccagagcccacgaggcttgcagatcgggggcataggaatttggaatccaagagctataatttttaaaaaaaaaaatcttttattttaatacattgtaggaaatcttcataattggagaaagttctgcagcatggctttttacgtctgtaaataaataattttagaacagcctttttttcttccataaactactattgtgatctattttttccagccatgtcactaattgtgaattcctaccaactattgacagaatacagagttgattttttaataaaaagttatatataattatccctttaattaaagggagcaaaggggcgttccacatggacagaggcttggaccgaggcctggtcacagcagcgagcatccagggtttgcagggacgatgttacagactctgttttctgcctggcgtttcacttgtgtctgctcctagcctgtgctctgccagcagcacagacatctgctccatcagacctcttccattttgcacagggagtgcaggaggtgaatgttcactttctgttctccagtgtcactgttctgtttccacgggatggaaagcgcatgggcctgtgtccattgtagatttccttctagatttctgtgtacacacacttgattgttctggatgaatgtcttttttaatactccgaaaatttcatcatctaagaaaatgattccatacaaataactcagcacacaagtgacccaggacatatgcctgccaaagggatgtgttagaaggctgccttctcatgcgcattgtcacttggatcttgtggtgaggacggccccatctttcttgccacagattgaggccacttttgagcaagggagatcctggagttaagacaggtgttgggggcagcctgtattttaccctaggggcaggtctgcatggtgaccccacattgcactggtaaaccatttgagtcccactcttcatcctggaagtgggaactggagtcccacccacagtgcattcagaaagcatgctgtgtgggggctgcttctcaggaggccaggcccttctgagcggaaccgtcctggagagagcctgccctcgtttccaggctgcagccgtaacgcactttctcccaggctgagggcgggtgttctggggtgtctgccctctgtcggccctgcttcctgccaggacgtggcctcttccgatccttttctctcagacactggaggtctcttctgccattgtgctggtcccatcccaagaattgtaggacagagaccacactgggtcggcggacacaaagtccatccaggacccaggccgcagagggagcaggaagagatgctgatagtttgatctagaaaccagcagctactggctcaaattcaggttctggcgtcaaatagcgacatttccagtttctcttaaaaaccgtgtttggtttcagttgggataggcttgttttgtctgttgaaaatgtttctagttttttttctttcatttttctctcattccatttctgccttaactttagtttgttcacagggaggcaaagctgacatgaaccttttgtcgtgggacttcaggccacattggcttgaaggcattcgtttccttctggggtggggacaggccctcatggcaggcttgttcccgtggctctgagcgaggcctcttcctgctgggctcccagactcctgcatccaggcccccaccttctcggcttctggtttttctttctttttggtagaacacaacatctaccattcagttaaaccttctttatctcctcctttggcatccatttttccaaagaagagtcgagtcctctgaggtctgtgcttgaaagccgtccgaaggcattcttgttagctttgcttttctccccatatcccaaggcgaagcgctgagattcttccatctaaaaaaccctcgacccgaaaccctcaccagataaactacagtttgtttaggaggccctgaccttcatggtgtctttgaagcccaaccactcggtttccttcggattttcctccctttgttcggggtttggtttggctcctctgtgtgtgtccgtatcttgttcggtgtcctcgaggttgagcttcactccactgcggcagaggcagcgtgcacactcggatttgctacgtttctatatatcttgaagctaaatgtatatatgagtagtttgccatgagataacacagtgtaaacagtagacacccagaaatcgtgacttctgtgttctctccatttgagtattttgtaatttttttgaaatatttgtggacataaataaaaccaagctacactacaacccttgg

SEQ ID NO: 2427 - protein, 1566 aa, Homo sapiens; identical to SEQ ID NO: 24

SEQ ID NO: 2428 - DNA, 5764 bp, Homo sapiens
gcaaccctccgcgctccggagcctcctcagcctcccgcacaccccgagacgctcgccccgctgggcctcggtccccgcctcctcccccgtccttttcccctctctcgctccccacattgtctctgcctcattttctctcctagttgaggattaaaaaaaaaaaaaaatcaccatcatcctcagggagccccctcgccctcggaaaacaaaaccagacatgatcctgggctcctgcttctgaaagatctgcccgaccgaggaggagggagcctaggttcaagtcgcaggaaaggtcacggcagggaagccccctcagcccctccgcgtcgcctccccgcgggccgcccctctcggccctgcgccccgcggccccgcagcctccgcgcggcctcccgccccatccccgccactttccccggagctgggccgcgaacacctcactattgatggtgtagcgctttaggggaagcatttttgaaacgttggggttgttggagtggttggattttccctggaattgagtgagaaattcagaagactgaagcccaggcttactgtctacctttcacggaggcctagccgtgagaggacagaagaaggcacgtggcgaatcatgacagcggacaaagacaaagacaaagacaaagagaaggaccgggaccgagaccgggaccgagagagagagaaaagagacaaagcaagagagagtgagaattcaaggccacgccggagctgtaccttggaaggaggagccaaaaattatgctgagagtgatcacagtgaagacgaggacaatgacaacaatagtgccaccgcagaggagtccacgaagaagaataagaagaaaccaccgaaaaaaaagtctcgttatgaaaggacagataccggtgagataacatcctacatcactgaagatgatgtggtctacagaccaggagactgtgtgtatatcgagagtcggaggccaaacacaccgtatttcatctgtagcattcaagacttcaaactggtccacaactcccaggcctgttgcagatctccaactcctgctttgtgtgaccccccagcatgctctctgccggtggcatcacagccaccacagcatctttctgaagccgggagagggcctgtagggagtaagagggaccatctcctcatgaacgtcaaatggtactaccgtcaatctgaggttccagattctgtgtatcagcatttggttcaggatcgacataatgaaaatgactctggaagagaacttgtcattacagacccagttatcaagaaccgagagctcttcatttctgattacgttgacacttaccatgctgctgcccttagagggaagtgtaacatctcccatttttctgacatatttgctgctagagagtttaaagcccgagtggattcatttttctacatattaggatataaccctgagacaaggaggctgaacagtacccagggggagattcgtgtcggtcctagtcatcaggccaaacttccagatctgcaaccatttccttctccagatggtgatacagtgacccaacatgaggaactggtctggatgcctggagttaacgactgtgacctccttatgtacttgagggcagcaaggagcatggcggcatttgcaggaatgtgtgatggaggctctacagaggacggctgtgtcgcagcctctcgggatgacaccactctgaatgcactgaacacactgcatgaaagcggttacgatgctggcaaagccctgcagcgcctggtgaagaagcctgtgcccaagctcatcgagaagtgctggaccgaggacgaagtgaaacgcttcgttaagggactcaggcagtacgggaagaacttcttcagaattagaaaggagctgcttcccaataaggaaacaggggagctgatcaccttctattactattggaagaagacccccgaagcagccagctcccgagcccatcgtaggcaccgcaggcaggccgtgttcaggaggattaagactcgcaccgcgtccacacccgtcaacacaccctccagacccccgtccagtgaattcttggacctaagttcagccagtgaagatgacttcgacagtgaggacagtgagcaggagctgaaggggtacgcctgccgccactgcttcaccaccacctccaaagattggcaccacggaggccgggagaacatcctgctttgcaccgactgtcgcatccacttcaagaaatacggtgagctcccgcccattgagaagcccgtggacccgccaccgtttatgttcaaacccgtcaaggaagaggatgatgggctcagtgggaagcatagcatgaggacacggcggagtcggggctcgatgtcgacactacgcagtggtcggaagaagcagccagccagccctgatggtcgcacctcacccatcaatgaagacatccgctccagcggccggaactcccccagcgctgccagtacctccagcaatgacagtaaagcagagacagtgaagaagtcggccaagaaggtgaaggaggaagcctcttcccctcttaagagtaacaaacgccagcgggagaaggtggcctctgatacggaggaggctgacaggaccagctccaagaagacaaaaacgcaggagatcagcaggcccaactcgccatctgaaggtgagggagagagttcagacagtcgcagcgtcaacgatgagggtagcagtgaccccaaagacatcgaccaggacaatcgcagcacgtccccgagcatccccagcccccaggacaatgagagtgactcggactcgtcagcccagcagcagatgctgcaggcccagcccccagccttgcaggctcccactggggtcaccccagctccctcctcagctcctccagggacccctcagctgcccacgccagggcccacgccctctgccactgcagttcccccacagggctcccccacggcctcccaggcccctaaccagccacaggctcccacagcgcctgttccccacacccacatccaacaggcaccggccttgcacccccagcggccgccctcaccgcatcccccgccgcatccctcgccacatcccccgctgcagcctctgactgggtcggcgggccagccttctgcaccctctcatgcccagcccccactgcacggtcagggcccacccggccctcacagcctgcaggctgggcccctgctgcagcacccaggccccccacagccctttggcctccctccccaggcctcccaaggccaggcccctctggggacctccccagcagcagcgtaccctcacacctccctgcagctgccagcctctcagtcagcgctgcagtcccaacagcctccacgggagcagcccctgccaccagcgcccttggccatgccccacatcaagcccccgcctaccactcccatcccccagctgccggcgccacaggcccacaagcaccctccccacctctcggggccctcacccttctccatgaatgccaacctgcctccccctccagccctgaagcccctgagctccctgtccacacatcaccccccgtcggctcaccccccacccctgcaactcatgcctcagagccagccattgccctcctcgcccgcccagccccccgggctgacccagagccagaacctgcccccgccccctgcctcccacccccctacaggcctccaccaggtggccccccaacccccgtttgctcagcacccctttgtccctggaggccctcctcccatcacccctccgacctgcccctccacctctaccccaccggcgggacctggcacctcggcccagccaccctgctctggtgcggcggcttcaggaggcagcatagcgggggggtcgtcctgcccactccccaccgtccagatcaaggaggaggctctggacgacgctgaggagcctgagagcccccctcccccaccaaggagcccgtccccggagcccactgtggtggacacccccagtcacgccagccagtcagctaggttctacaaacacctggaccggggctacaactcgtgtgcccggacagacctgtacttcatgcctctggccgggtccaagctggccaagaagagggaggaggccattgagaaggccaagcgcgaggctgagcagaaagcccgagaggagcgagagcgggagaaggagaaggagaaggagcgggagcgggagcgagagcgggagcgcgaggcagagcgggcggctaaggcgtccagctcagcgcatgaaggtcgcctcagtgacccacagctcagtggtcctggccacatgcggccatccttcgagccaccaccaaccaccattgctgctgtgcccccctacatcgggcccgacacacctgcccttcggactctgagcgagtacgcccggccccacgtcatgtcgcccaccaaccgcaaccaccccttctacatgccccttaaccccacggaccccctgctggcctaccacatgcctggcctctacaacgtcgaccccaccatccgcgagcgggagctccgggagcgggagatccgagagcgggagatccgagagcgggagctgcgggagaggatgaagccgggcttcgaggtgaagcccccagagctggaccccctgcacccagccgccaaccccatggagcactttgcccggcacagcgccctcaccatccccccgaccgccgggccccacccttttgcttctttccacccgggcctgaaccccttggagagggagagactggccctggcgggcccccagctgcggcccgagatgagctaccctgacagactggcagccgagcgtatccacgcagagcgcatggcatcgctgaccagcgatcccctggcccgactgcagatgttcaacgtgactccgcaccatcaccagcactctcacattcactcccacctccacctccaccagcaggaccccctccaccaaggttcagcaggccccgttcacccgctggtcgaccccctgactgccggtccccacctggctcgcttcccctacccgcctggcactctccccaaccctctgcttggacagcccccacacgagcacgagatgcttcgccacccagttttcggcaccccctacccccgtgacctgcctggggccatcccaccccccatgtcagcagcccaccagctgcaggccatgcatgcccagtcggccgagctgcagagactggccatggagcagcagtggctgcatggacacccccacatgcatggtggccacctaccaagtcaggaagattattacagtcgactgaagaaagaaggtgacaagcagttataagttatttatttgttaacgctggctgtggaaaccccagttcttggggggagaaacaggactttttacataaaataggagctgcaaaagcaaaaagaatatcttctaaagatttctttatatatttaaaaacccacaactaaaaatgtatccacatagtagtgttcgtttgtcgagaggatttcctgagactggtttggatctccctgcatgacagtcccccagaaacttagtgagtcctggactggactgaacatccagaaagcttccctgcaatcttggggtttggctttagttttcttttccttgatttctcagtaggtgctagaatccagttcacacccttcactgtgcgtgcagacacactgacacactccgccacgagtgctccagagcccacgaggcttgcagatcgggggcataggaatttggaatccaagagctataattttt

SEQ ID NO: 2429 - protein, 1566 aa, Homo sapiens; identical to SEQ ID NO: 24

SEQ ID NO: 2430 - DNA, 1026 bp, Homo sapiens
gcaaccctccgcgctccggagcctcctcagcctcccgcacaccccgagacgctcgccccgctgggcctcggtccccgcctcctcccccgtccttttcccctctctcgctccccacattgtctctgcctcattttctctcctagttgaggattaaaaaaaaaaaaaaatcaccatcatcctcagggagccccctcgccctcggaaaacaaaaccagacatgatcctgggctcctgcttctgaaagatctgcccgaccgaggaggagggagcctaggttcaagtcgcaggaaaggtcacggcagggaagccccctcagcccctccgcgtcgcctccccgcgggccgcccctctcggccctgcgccccgcggccccgcagcctccgcgcggcctcccgccccatccccgccactttccccggagctgggccgcgaacacctcactattgatggtgtagcgctttaggggaaggaggtgattgtctaggagtaactgtatgtgcgctcagcaccgggtcacaaccaccgtgggatccacttacagagaagatttgtggagagcttcagcctgtttatggtgttactgagaaaggaattgtggccatttgatataattctggatggaagacctcttatttgtattacattgaattagagcatttttgaaacgttggggttgttggagtggttggattttccctggaattgagtgagaaattcagaagactgaagcccaggcttactgtctacctttcacggaggcctagccgtgagaggacagaagaaggcacgtggcgaatcatgacagcggacaaagacaaagacaaagacaaagagaaggaccgggaccgagaccgggaccgagagagagagaaaagagacaaagcaagagagagtgagaattcaaggccacgccggagctgtaccttggaaggaggagccaaaaattatgctgagagtgatcacagtgaagacgaggacaatgacaacaatagtgccaccgcagaggagtccacgaagaagaataag

SEQ ID NO: 2431 - protein, 75 aa, Homo sapiens
MTADKDKDKDKEKDRDRDRDREREKRDKARESENSRPRRSCTLEGGAKNYAESDHSEDEDNDNNSATAEESTKKN

SEQ ID NO: 2432 - DNA, 683 bp, Homo sapiens
gcaaccctccgcgctccggagcctcctcagcctcccgcacaccccgagacgctcgccccgctgggcctcggtccccgcctcctcccccgtccttttcccctctctcgctccccacattgtctctgcctcattttctctcctagttgaggattaaaaaaaaaaaaaaatcaccatcatcctcagggagccccctcgccctcggaaaacaaaaccagacatgatcctgggctcctgcttctgaaagatctgcccgaccgaggaggagggagcctaggttcaagtcgcaggaaaggtcacggcagggaagccccctcagcccctccgcgtcgcctccccgcgggccgcccctctcggccctgcgccccgcggccccgcagcctccgcgcggcctcccgccccatccccgccactttccccggagctgggccgcgaacacctcactattgatggtgtagcgctttaggggaagcatttttgaaacgttggggttgttggagtggttggattttccctggaattgagtgagaaattcagaagactgaagcccaggcttactgtctacctttcacggaggcctagccgtgagaggacagaagaaggcacgtggcgaatcatgacagcggacaaagacaaagacaaagacaaagagaaggaccgggaccgagaccgggaccgagagagag

SEQ ID NO: 2433 - protein, 99 aa, Homo sapiens
GLKKKKNHHHPQGAPSPSENKTRHDPGLLLLKDLPDRGGGSLGSSRRKGHGREAPSAPPRRLPAGRPSRPCAPRPRSLRAASRPIPATFPGAGPRTPHY

SEQ ID NO: 2434 - DNA, 564 bp, Homo sapiens
ccaggagtttgagaccagcctgggcaacgtaacaagacccccgtctctgcaaaaaaaattaaaaattagccaggcgtggtagcacgtgcctgtagcccaagctactcagaaggctgaggcgggaggattgtttgagcctaggaggtcaaggctgcagtgagccaatattgtgccattgctttccagcctgggagacagagtgagaccctgtctcaacaacaacaaaatgtaaggataagagaaccccataaggtacagttagggaaagatatcttgtgataaataagatttgccatgtggaaaactgacccaccatcagtgataactgctatggcattttggtaagatgctgatgctaattttggtaacaggagtgtcatctttgaggaatatgattatgtgtgattatattagcagagcaaagctgaagtctagtcacattgtactctcatattgtagcctgaagcaagaatatgatgacagcaggggagtgatgaacttggaggcagaggttgcagtgagctgaaatcgcgccattgcactccagcctggaaaacaagtgtg

SEQ ID NO: 2435 - protein, 59 aa, Homo sapiens
MLMLILVTGVSSLRNMIMCDYISRAKLKSSHIVLSYCSLKQEYDDSRGVMNLEAEVAVS

SEQ ID NO: 2436 - DNA, 550 bp, Homo sapiens
ggggaggactgaagataccttcatcgctgacctggttgtggggctgtgcactgggcagatcaagactggtgccccttgccgatctgagcgcttggccaagtacaaccagctcctcagaattgaagaggagctgggcagcaaggctaagtttgccggcaggaacttcagaaaccccttggccaagtaagctgtgggcaggcaagcccttcggtcacctgttggctacacagacccctcccctcgtgtcagctcaggcagctcgaggcccccgaccaacacttgcaggggtccctgctagttagcgccccaccgccgtggagttcgtaccgcttccttagaacttctacagaagccaagctccctggagccctgttggcagctctagctttgcagtcgtgtaattggcccaagtcattgtttttctcgcctcactttccaccaagtgtctagagtcatgtgagcctcgtgtcatctccggggtggccacaggctagatccccggtggttttgtgctcaaaataaaaagcctcagtgacccatgagaatactc

SEQ ID NO: 2437 - protein, 99 aa, Homo sapiens
GGLKIPSSLTWLWGCALGRSRLVPLADLSAWPSTTSSSELKRSWAARLSLPAGTSETPWPSKLWAGKPFGHLLATQTPPLVSAQAARGPRPTLAGVPAS

SEQ ID NO: 2438 - DNA, 924 bp, Homo sapiens
ggagctcaagaccagcctgggcaacatagcaagtagttgtattctgtgaagagctctgtcagagaacactaatctttctcccatcaagggaggctgaacccagtgtttcaactatgacaggagggctaagaaggtcctgggggtggaagagttcaggggagggtgagggttctcctctgtgctcttgacaaagcccaggcatggagggctttagccattaacagcccctccactgctttcctgctggcaccgaggggtaatggcattgggggttatggaaccagaaaatgggatcatgccatctgggttgttccttggcttccaggtgcaagctggcccaggccaatggttggggcgtcatggtgtctcatcgttcgggggagactgaagataccttcatcgctgacctggttgtggggctgtgcactgggcagatcaagactggtgccccttgccgatctgagcgcttggccaagtacaaccagctcctcagaattgaagaggagctgggcagcaaggctaagtttgccggcaggaacttcagaaaccccttggccaagtaagctgtgggcaggcaagcccttcggtcacctgttggctacacagacccctcccctcgtgtcagctcaggcagctcgaggcccccgaccaacacttgcaggggtccctgctagttagcgccccaccgccgtggagttcgtaccgcttccttagaacttctacagaagccaagctccctggagccctgttggcagctctagctttgcagtcgtgtaattggcccaagtcattgtttttctcgcctcactttccaccaagtgtctagagtcatgtgagcctcgtgtcatctccggggtggccacaggctagatccccggtggttttgtgctcaaaataaaaagcctcagtgacccatgagaatac

SEQ ID NO: 2439 - protein, 110 aa, Homo sapiens
MVGASWCLIVRGRLKIPSSLTWLWGCALGRSRLVPLADLSAWPSTTSSSELKRSWAARLSLPAGTSETPWPSKLWAGKPFGHLLATQTPPLVSAQAARGPRPTLAGVPAS

SEQ ID NO: 2440 - DNA, 676 bp, Homo sapiens
aggcctggagctgctgaagactgctattgggaaagctggctacactgataaggtggtcatcggcatggacgtagcggcctccgagttcttcaggtctgggaagtatgacctggacttcaagtctcccgatgaccccagcaggtacatctcgcctgaccagctggctgacctgtacaagtccttcatcaaggactacccagtggtgtctatcgaagatccctttgaccaggatgactggggagcttggcagaagttcacagccagtgcaggaatccaggtagtgggggatgatctcacagtgaccaacccaaataagctgtgggcaggcaagcccttcggtcacctgttggctacacagacccctcccctcgtgtcagctcaggcagctcgaggcccccgaccaacacttgcaggggtccctgctagttagcgccccaccgccgtggagttcgtaccgcttccttagaacttctacagaagccaagctccctggagccctgttggcagctctagctttgcagtcgtgtaattggcccaagtcattgtttttctcgcctcactttccaccaagtgtctagagtcatgtgagcctcgtgtcatctccggggtggccacaggctagatccccggtggttttgtgctcaaaataaaaagcctcagtgacccatgagaatac

SEQ ID NO: 2441 - protein, 121 aa, Homo sapiens
MDVAASEFFRSGKYDLDFKSPDDPSRYISPDQLADLYKSFIKDYPVVSIEDPFDQDDWGAWQKFTASAGIQVVGDDLTVTNPNKLWAGKPFGHLLATQTPPLVSAQAARGPRPTLAGVPAS

SEQ ID NO: 2442 - DNA, 1020 bp, Homo sapiens
ttgccccaaagcagaaaaaaagcctggagctgctgaagactgctattgggaaagctggctacactgataaggtggtcatcggcatggacgtagcggcctccgagttcttcaggtctgggaagtatgacctggacttcaagtctcccgatgaccccagcaggtacatctcgcctgaccagctggctgacctgtacaagtccttcatcaaggactacccagtggtgtctatcgaagatccctttgaccaggatgactggggagcttggcagaagttcacagccagtgcaggaatccaggtagtgggggatgatctcacagtgaccaacccaaagaggatcgccaaggccgtgaacgagaagtcctgcaactgcctcctgctcaaagtcaaccagattggctccgtgaccgagtctcttcaggcgtgcaagctggcccaggccaatggttggggcgtcatggtgtctcatcgttcgggggagactgaagataccttcatcgctgacctggttgtggggctgtgcactgggcagatcaagactggtgccccttgccgatctgagcgcttggccaagtacaaccagctcctcagaattgaagaggagctgggcagcaaggctaagtttgccggcaggaacttcagaaaccccttggccaagtaagctgtgggcaggcaagcccttcggtcacctgttggctacacagacccctcccctcgtgtcagctcaggcagctcgaggcccccgaccaacacttgcaggggtccctgctagttagcgccccaccgccgtggagttcgtaccgcttccttagaacttctacagaagccaagctccctggagccctgttggcagctctagctttgcagtcgtgtaattggcccaagtcattgtttttctcgcctcactttccaccaagtgtctagagtcatgtgagcctcgtgtcatctccggggtggccacaggctagatccccggtggttttgtgctcaaaataaaaagcctcagtgacccatgagaatac

SEQ ID NO: 2443 - protein, 191 aa, Homo sapiens [sequence omitted]

SEQ ID NO: 2444 - DNA, 1208 bp, Homo sapiens
caatggcggttctcatgctggcaacaagctggccatgcaggagttcatgatcctcccagtcggtgcagcaaacttcagggaagccatgcgcattggagcagaggtttaccacaacctgaagaatgtcatcaaggagaaatatgggaaagatgccaccaatgtgggggatgaaggcgggtttgctcccaacatcctggagaataaagaaggcctggagctgctgaagactgctattgggaaagctggctacactgataaggtggtcatcggcatggacgtagcggcctccgagttcttcaggtctgggaagtatgacctggacttcaagtctcccgatgaccccagcaggtacatctcgcctgaccagctggctgacctgtacaagtccttcatcaaggactacccagtggtgtctatcgaagatccctttgaccaggatgactggggagcttggcagaagttcacagccagtgcaggaatccaggtagtgggggatgatctcacagtgaccaacccaaagaggatcgccaaggccgtgaacgagaagtcctgcaactgcctcctgctcaaagtcaaccagattggctccgtgaccgagtctcttcaggcgtgcaagctggcccaggccaatggttggggcgtcatggtgtctcatcgttcgggggagactgaagataccttcatcgctgacctggttgtggggctgtgcactgggcagatcaagactggtgccccttgccgatctgagcgcttggccaagtacaaccagctcctcagaattgaagaggagctgggcagcaaggctaagtttgccggcaggaacttcagaaaccccttggccaagtaagctgtgggcaggcaagcccttcggtcacctgttggctacacagacccctcccctcgtgtcagctcaggcagctcgaggcccccgaccaacacttgcaggggtccctgctagttagcgccccaccgccgtggagttcgtaccgcttccttagaacttctacagaagccaagctccctggagccctgttggcagctctagctttgcagtcgtgtaattggcccaagtcattgtttttctcgcctcactttccaccaagtgtctagagtcatgtgagcctcgtgtcatctccggggtggccacaggctagatccccggtggttttgtgctcaaaataaaaagcctcagtgacccatgagaatac

SEQ ID NO: 2445 - protein, 270 aa, Homo sapiens [sequence omitted]

SEQ ID NO: 2446 - DNA, 2738 bp, Homo sapiens
atgatgttgatggaagcagtgcaccaccttgtggacaggaaagttggtgtgtggattccggggttcccgagcctgcatgctctgggtcgagagttccaatgcttgcttctattgcagtttgttcccaatctgcgaaatactccttcacggttaggacaggaacccaagcatgagaacagggcctgttaactaaagaaaagtttccccatctcccaggagggttctgtgggccctccagagatcatcagcctcttcacgggctagaaaggatccagggaaggtctaaccaatgacctgccctgaatggtgagctgcaggtgtgtcatttagtgtgattttcctgttgactgactcataggagccctgctctgtggcagagctagcctctggctgtattcaaattgacttagtgtgtgtgcaacattgacctttctagagatagaacatgtggccaaattacagaaaagcacatagggctagatcacgcattctcagtggggcacccggaaaactccaaaaaggctgcagggaggggacaatgatgaaatcaggttgtgaaacactgggctggtgtcgcagtggtggtgctgggtgttcagtcccgctttaatgctgtaagaagcactctacacacacgaacatgttaccatttgaccgttgtttaatggcgtacgtggggacttagccggagcaggatgatgctgtgccttgatggtaatgagtgctcagtaagtaagcatttgtggaagattgaacgcatggcccctgaaatgctctcctctgctttcctgccccctcactgtctctcactcgcagtccttaatcaccggttctcttctgagtctctctcatttttccttcttcatcctctgctgggcaggcgtctccagacccattaagtatattaatgagttcctggcaccagccctgtgcactcaggtaactgattgaacagcctttagtctgcagttggcgtttccagtgcatggtcttgcaaactaacctccagtcagatcgttctgagccagctgctgttttgtgtggctctaaccctctggggtcctaggtaggagcactcagactgggccggaaagtcctccgattctggggggaaaggggagagggggaagaggtcccacagaaggtcccttggtgggcttccgcgtcggcctcaacagtggttctctctaacaatgctgctcaagcctgttttaaagttaatgtcagtaatttgatttgattgttccttccaggtgtctcaaaggctgttgagcacatcaataaaactattgcgcctgccctggttagcaagaaactgaacgtcacagaacaagagaagattgacaaactgatgatcgagatggatggaacagaaaataaatctaagtttggtgcgaacgccattctgggggtgtcccttgccgtctgcaaagctggtgccgttgagaagggggtccccctgtaccgccacatcgctgacttggctggcaactctgaagtcatcctgccagtcccggcgttcaatgtcatcaatggcggttctcatgctggcaacaagctggccatgcaggagttcatgatcctcccagtcggtgcagcaaacttcagggaagccatgcgcattggagcagaggtttaccacaacctgaagaatgtcatcaaggagaaatatgggaaagatgccaccaatgtgggggatgaaggcgggtttgctcccaacatcctggagaataaagaaggcctggagctgctgaagactgctattgggaaagctggctacactgataaggtggtcatcggcatggacgtagcggcctccgagttcttcaggtctgggaagtatgacctggacttcaagtctcccgatgaccccagcaggtacatctcgcctgaccagctggctgacctgtacaagtccttcatcaaggactacccagtggtgtctatcgaagatccctttgaccaggatgactggggagcttggcagaagttcacagccagtgcaggaatccaggtagtgggggatgatctcacagtgaccaacccaaagaggatcgccaaggccgtgaacgagaagtcctgcaactgcctcctgctcaaagtcaaccagattggctccgtgaccgagtctcttcaggcgtgcaagctggcccaggccaatggttggggcgtcatggtgtctcatcgttcgggggagactgaagataccttcatcgctgacctggttgtggggctgtgcactgggcagatcaagactggtgccccttgccgatctgagcgcttggccaagtacaaccagctcctcagaattgaagaggagctgggcagcaaggctaagtttgccggcaggaacttcagaaaccccttggccaagtaagctgtgggcaggcaagcccttcggtcacctgttggctacacagacccctcccctcgtgtcagctcaggcagctcgaggcccccgaccaacacttgcaggggtccctgctagttagcgccccaccgccgtggagttcgtaccgcttccttagaacttctacagaagccaagctccctggagccctgttggcagctctagctttgcagtcgtgtaattggcccaagtcattgtttttctcgcctcactttccaccaagtgtctagagtcatgtgagcctcgtgtcatctccggggtggccacaggctagatccccggtggttttgtgctcaaaataaaaagcctcagtgacccatgagaatac

SEQ ID NO: 2447 - protein, 341 aa, Homo sapiens
MIEMDGTENKSKFGANAILGVSLAVCKAGAVEKGVPLYRHIADLAGNSEVILPVPAFNVINGGSHAGNKLAMQEFMILPVGAANFREAMRIGAEVYHNLKNVIKEKYGKDATNVGDEGGFAPNILENKEGLELLKTAIGKAGYTDKVVIGMDVAASEFFRSGKYDLDFKSPDDPSRYISPDQLADLYKSFIKDYPVVSIEDPFDQDDWGAWQKFTASAGIQVVGDDLTVTNPKRIAKAVNEKSCNCLLLKVNQIGSVTESLQACKLAQANGWGVMVSHRSGETEDTFIADLVVGLCTGQIKTGAPCRSERLAKYNQLLRIEEELGSKAKFAGRNFRNPLAK

SEQ ID NO: 2448 - DNA, 1195 bp, Homo sapiens
ccaaccccggagtggggccgaggcgcgcagcctctcaacgactcgacgccaacggggtctctcggatcgcggcgcgaggcaggaggggcggggcaggagggccgcggcaggcccgggccgccaaagttgtcagcaaggtcgagggccggacgtggggccccagagcgacgctgagtgcgtgcgggactcggagtacgtgacggagccccgagctctcatgcccgccacgccgccccgggccatcccccggagccccggctccgcacaccccagttcggctcaccggtcctatctggggccagagtttcgcccgcaccactacagggccgctggggagtcggggccccccagatctgcccgcctcaagtccgcgggacgtcacccccctttccacgctactgcagccgtcgcagtcccacccctttccgggaggtgagggaatgagtgacggctctcccgacgaatggcgaggcggagctgagggggcgtgccccggaggcgggaagtgggtggggctcgccttagctaggcaggaagtcggcgcgggcggcgcggacagtatctgtgggtacccggagcacggagatctcgccggctttacgttcacctcggtgtctgcagcaccctccgcttctgtctcatcgttcgggggagactgaagataccttcatcgctgacctggttgtggggctgtgcactgggcagatcaagactggtgccccttgccgatctgagcgcttggccaagtacaaccagctcctcagaattgaagaggagctgggcagcaaggctaagtttgccggcaggaacttcagaaaccccttggccaagtaagctgtgggcaggcaagcccttcggtcacctgttggctacacagacccctcccctcgtgtcagctcaggcagctcgaggcccccgaccaacacttgcaggggtccctgctagttagcgccccaccgccgtggagttcgtaccgcttccttagaacttctacagaagccaagctccctggagccctgttggcagctctagctttgcagtcgtgtaattggcccaagtcattgtttttctcgcctcactttccaccaagtgtctagagtcatgtgagcctcgtgtcatctccggggtggccacaggctagatccccggtggttttgtgctcaaaataaaaagcctcagtgacccatgagaatac

SEQ ID NO: 2449 - protein, 72 aa, Homo sapiens
MSDGSPDEWRGGAEGACPGGGKWVGLALARQEVGAGGADSICGYPEHGDLAGFTFTSVSAAPSASVSSFGGD

SEQ ID NO: 2450 - DNA, 1500 bp, Homo sapiens
ggcgcacgtggccccggacacgcagcgctgcggcggggccagcgccccaaccccggagtggggccgaggcgcgcagcctctcaacgactcgacgccaacggggtctctcggatcgcggcgcgaggcaggaggggcggggcaggagggccgcggcaggcccgggccgccaaagttgtcagcaaggtcgagggccggacgtggggccccagagcgacgctgagtgcgtgcgggactcggagtacgtgacggagccccgagctctcatgcccgccacgccgccccgggccatcccccggagccccggctccgcacaccccagttcggctcaccggtcctatctggggccagagtttcgcccgcaccactacagggccgctggggagtcggggccccccagatctgcccgcctcaagtccgcgggacgtcacccccctttccacgctactgcagccgtcgcagtcccacccctttccgggaggtgagggaatgagtgacggctctcccgacgaatggcgaggcggagctgagggggcgtgccccggaggcgggaagtgggtggggctcgccttagctaggcaggaagtcggcgcgggcggcgcggacagtatctgtgggtacccggagcacggagatctcgccggctttacgttcacctcggtgtctgcagcaccctccgcttcctctcctaggcgacgagacccagtggctagaagttcaccatgtctattctcaagatccatgccagggagatctttgactctcgcgggaatcccactgttgaggttgatctcttcacctcaaaaggtctcttcagagctgctgtgcccagtggtgcttcaactggtatctatgaggccctagagctccgggacaatgataagactcgctatatggggaagggtgtctcaaaggctgttgagcacatcaataaaactattgcgcctgccctggttagcaagactgaagataccttcatcgctgacctggttgtggggctgtgcactgggcagatcaagactggtgccccttgccgatctgagcgcttggccaagtacaaccagctcctcagaattgaagaggagctgggcagcaaggctaagtttgccggcaggaacttcagaaaccccttggccaagtaagctgtgggcaggcaagcccttcggtcacctgttggctacacagacccctcccctcgtgtcagctcaggcagctcgaggcccccgaccaacacttgcaggggtccctgctagttagcgccccaccgccgtggagttcgtaccgcttccttagaacttctacagaagccaagctccctggagccctgttggcagctctagctttgcagtcgtgtaattggcccaagtcattgtttttctcgcctcactttccaccaagtgtctagagtcatgtgagcctcgtgtcatctccggggtggccacaggctagatccccggtggttttgtgctcaaaataaaaagcctcagtgacccatgagaatac

SEQ ID NO: 2451 - protein, 139 aa, Homo sapiens
MSILKIHAREIFDSRGNPTVEVDLFTSKGLFRAAVPSGASTGIYEALELRDNDKTRYMGKGVSKAVEHINKTIAPALVSKTEDTFIADLVVGLCTGQIKTGAPCRSERLAKYNQLLRIEEELGSKAKFAGRNFRNPLAK

SEQ ID NO: 2452 - DNA, 2385 bp, Homo sapiens
ggcgcacgtggccccggacacgcagcgctgcggcggggccagcgccccaaccccggagtggggccgaggcgcgcagcctctcaacgactcgacgccaacggggtctctcggatcgcggcgcgaggcaggaggggcggggcaggagggccgcggcaggcccgggccgccaaagttgtcagcaaggtcgagggccggacgtggggccccagagcgacgctgagtgcgtgcgggactcggagtacgtgacggagccccgagctctcatgcccgccacgccgccccgggccatcccccggagccccggctccgcacaccccagttcggctcaccggtcctatctggggccagagtttcgcccgcaccactacagggccgctggggagtcggggccccccagatctgcccgcctcaagtccgcgggacgtcacccccctttccacgctactgcagccgtcgcagtcccacccctttccgggaggtgagggaatgagtgacggctctcccgacgaatggcgaggcggagctgagggggcgtgccccggaggcgggaagtgggtggggctcgccttagctaggcaggaagtcggcgcgggcggcgcggacagtatctgtgggtacccggagcacggagatctcgccggctttacgttcacctcggtgtctgcagcaccctccgcttcctctcctaggcgacgagacccagtggctagaagttcaccatgtctattctcaagatccatgccagggagatctttgactctcgcgggaatcccactgttgaggttgatctcttcacctcaaaaggtctcttcagagctgctgtgcccagtggtgcttcaactggtatctatgaggccctagagctccgggacaatgataagactcgctatatggggaagggtgtctcaaaggctgttgagcacatcaataaaactattgcgcctgccctggttagcaagaaactgaacgtcacagaacaagagaagattgacaaactgatgatcgagatggatggaacagaaaataaatctaagtttggtgcgaacgccattctgggggtgtcccttgccgtctgcaaagctggtgccgttgagaagggggtccccctgtaccgccacatcgctgacttggctggcaactctgaagtcatcctgccagtcccggcgttcaatgtcatcaatggcggttctcatgctggcaacaagctggccatgcaggagttcatgatcctcccagtcggtgcagcaaacttcagggaagccatgcgcattggagcagaggtttaccacaacctgaagaatgtcatcaaggagaaatatgggaaagatgccaccaatgtgggggatgaaggcgggtttgctcccaacatcctggagaataaagaaggcctggagctgctgaagactgctattgggaaagctggctacactgataaggtggtcatcggcatggacgtagcggcctccgagttcttcaggtctgggaagtatgacctggacttcaagtctcccgatgaccccagcaggtacatctcgcctgaccagctggctgacctgtacaagtccttcatcaaggactacccagtggtgtctatcgaagatccctttgaccaggatgactggggagcttggcagaagttcacagccagtgcaggaatccaggtagtgggggatgatctcacagtgaccaacccaaagaggatcgccaaggccgtgaacgagaagtcctgcaactgcctcctgctcaaagtcaaccagattggctccgtgaccgagtctcttcaggcgtgcaagctggcccaggccaatggttggggcgtcatggtgtctcatcgttcgggggagactgaagataccttcatcgctgacctggttgtggggctgtgcactgggcagatcaagactggtgccccttgccgatctgagcgcttggccaagtacaaccagctcctcagaattgaagaggagctgggcagcaaggctaagtttgccggcaggaacttcagaaaccccttggccaagtaagctgtgggcaggcaagcccttcggtcacctgttggctacacagacccctcccctcgtgtcagctcaggcagctcgaggcccccgaccaacacttgcaggggtccctgctagttagcgccccaccgccgtggagttcgtaccgcttccttagaacttctacagaagccaagctccctggagccctgttggcagctctagctttgcagtcgtgtaattggcccaagtcattgtttttctcgcctcactttccaccaagtgtctagagtcatgtgagcctcgtgtcatctccggggtggccacaggctagatccccggtggttttgtgctcaaaataaaaagcctcagtgacccatgagaatac

SEQ ID NO: 2453 - protein, 434 aa, Homo sapiens; identical to SEQ ID NO: 27

SEQ ID NO: 2454 - DNA, 617 bp, Homo sapiens
aggcctggagctgctgaagactgctattgggaaagctggctacactgataaggtggtcatcggcatggacgtagcggcctccgagttcttcaggtctgggaagtatgacctggacttcaagtctcccgatgaccccagcaggtacatctcgcctgaccagctggctgacctgtacaagtccttcatcaaggactacccagtggtgtctatcgaagatccctttgaccaggatgactggggagcttggcagaagttcacagccagtgcaggaatccaggtagtgggggatgatctcacagtgaccaacccaaagaggatcgccaaggccgtgaacgagaagtcctgcaactgcctcctgctcaaagtcaaccagattggctccgtgaccgagtctcttcaggcgtgcaagctggcccaggccaatggttggggcgtcatggtgtctcatcctctagctttgcagtcgtgtaattggcccaagtcattgtttttctcgcctcactttccaccaagtgtctagagtcatgtgagcctcgtgtcatctccggggtggccacaggctagatccccggtggttttgtgctcaaaataaaaagcctcagtgacccatgagaata

SEQ ID NO: 2455 - protein, 151 aa, Homo sapiens
MDVAASEFFRSGKYDLDFKSPDDPSRYISPDQLADLYKSFIKDYPVVSIEDPFDQDDWGAWQKFTASAGIQVVGDDLTVTNPKRIAKAVNEKSCNCLLLKVNQIGSVTESLQACKLAQANGWGVMVSHPLALQSCNWPKSLFFSPHFPPSV

SEQ ID NO: 2456 - DNA, 404 bp, Homo sapiens
caatggcggttctcatgctggcaacaagctggccatgcaggagttcatgatcctcccagtcggtgcagcaaacttcagggaagccatgcgcattggagcagaggtttaccacaacctgaagaatgtcatcaaggagaaatatgggaaagatgccaccaatgtgggggatgaaggcgggtttgctcccaacatcctggagaataaagaagccaagctccctggagccctgttggcagctctagctttgcagtcgtgtaattggcccaagtcattgtttttctcgcctcactttccaccaagtgtctagagtcatgtgagcctcgtgtcatctccggggtggccacaggctagatccccggtggttttgtgctcaaaataaaaagcctcagtgacccatgagaata

SEQ ID NO: 2457 - protein, 90 aa, Homo sapiens
MQEFMILPVGAANFREAMRIGAEVYHNLKNVIKEKYGKDATNVGDEGGFAPNILENKEAKLPGALLAALALQSCNWPKSLFFSPHFPPSV

SEQ ID NO: 2458 - DNA, 612 bp, Homo sapiens
caatggcggttctcatgctggcaacaagctggccatgcaggagttcatgatcctcccagtcggtgcagcaaacttcagggaagccatgcgcattggagcagaggtttaccacaacctgaagaatgtcatcaaggagaaatatgggaaagatgccaccaatgtgggggatgaaggcgggtttgctcccaacatcctggagaataaagaaggcctggagctgctgaagactgctattgggaaagctggctacactgataaggtggtcatcggcatggacgtagcggcctccgagttcttcaggtctgggaagtatgacctggacttcaagtctcccgatgaccccagcaggtacatctcgcctgaccagctggctgacctgtacaagtccttcatcaaggactacccagtggtgtctatcgaagctccctggagccctgttggcagctctagctttgcagtcgtgtaattggcccaagtcattgtttttctcgcctcactttccaccaagtgtctagagtcatgtgagcctcgtgtcatctccggggtggccacaggctagatccccggtggttttgtgctcaaaataaaaagcctcagtgacccatgagaata

SEQ ID NO: 2459 - protein, 143 aa, Homo sapiens
MQEFMILPVGAANFREAMRIGAEVYHNLKNVIKEKYGKDATNVGDEGGFAPNILENKEGLELLKTAIGKAGYTDKVVIGMDVAASEFFRSGKYDLDFKSPDDPSRYISPDQLADLYKSFIKDYPVVSIEAPWSPVGSSSFAVV

SEQ ID NO: 2460 - DNA, 1183 bp, Homo sapiens
ggcgcacgtggccccggacacgcagcgctgcggcggggccagcgccccaaccccggagtggggccgaggcgcgcagcctctcaacgactcgacgccaacggggtctctcggatcgcggcgcgaggcaggaggggcggggcaggagggccgcggcaggcccgggccgccaaagttgtcagcaaggtcgagggccggacgtggggccccagagcgacgctgagtgcgtgcgggactcggagtacgtgacggagccccgagctctcatgcccgccacgccgccccgggccatcccccggagccccggctccgcacaccccagttcggctcaccggtcctatctggggccagagtttcgcccgcaccactacagggccgctggggagtcggggccccccagatctgcccgcctcaagtccgcgggacgtcacccccctttccacgctactgcagccgtcgcagtcccacccctttccgggaggtgagggaatgagtgacggctctcccgacgaatggcgaggcggagctgagggggcgtgccccggaggcgggaagtgggtggggctcgccttagctaggcaggaagtcggcgcgggcggcgcggacagtatctgtgggtacccggagcacggagatctcgccggctttacgttcacctcggtgtctgcagcaccctccgcttcctctcctaggcgacgagacccagtggctagaagttcaccatgtctattctcaagatccatgccagggagatctttgactctcgcgggaatcccactgttgaggttgatctcttcacctcaaaaggtctcttcagagctgctgtgcccagtggtgcttcaactggtatctatgaggccctagagctccgggacaatgataagactcgctatatggggaagggtgtctcaaaggctgttgagcacatcaataaaactattgcgcctgccctggttagcaagaaactgaacgtcacaaacttctacagaagccaagctccctggagccctgttggcagctctagctttgcagtcgtgtaattggcccaagtcattgtttttctcgcctcactttccaccaagtgtctagagtcatgtgagcctcgtgtcatctccggggtggccacaggctagatccccggtggttttgtgctcaaaataaaaagcctcagtgacccatgagaata

SEQ ID NO: 2461 - protein, 124 aa, Homo sapiens
MSDGSPDEWRGGAEGACPGGGKWVGLALARQEVGAGGADSICGYPEHGDLAGFTFTSVSAAPSASSPRRRDPVARSSPCLFSRSMPGRSLTLAGIPLLRLISSPQKVSSELLCPVVLQLVSMRP

SEQ ID NO: 2462 - DNA, 1194 bp, Homo sapiens
ggcgcacgtggccccggacacgcagcgctgcggcggggccagcgccccaaccccggagtggggccgaggcgcgcagcctctcaacgactcgacgccaacggggtctctcggatcgcggcgcgaggcaggaggggcggggcaggagggccgcggcaggcccgggccgccaaagttgtcagcaaggtcgagggccggacgtggggccccagagcgacgctgagtgcgtgcgggactcggagtacgtgacggagccccgagctctcatgcccgccacgccgccccgggccatcccccggagccccggctccgcacaccccagttcggctcaccggtcctatctggggccagagtttcgcccgcaccactacagggccgctggggagtcggggccccccagatctgcccgcctcaagtccgcgggacgtcacccccctttccacgctactgcagccgtcgcagtcccacccctttccgggaggtgagggaatgagtgacggctctcccgacgaatggcgaggcggagctgagggggcgtgccccggaggcgggaagtgggtggggctcgccttagctaggcaggaagtcggcgcgggcggcgcggacagtatctgtgggtacccggagcacggagatctcgccggctttacgttcacctcggtgtctgcagcaccctccgcttcctctcctaggcgacgagacccagtggctagaagttcaccatgtctattctcaagatccatgccagggagatctttgactctcgcgggaatcccactgttgaggttgatctcttcacctcaaaaggtctcttcagagctgctgtgcccagtggtgcttcaactggtatctatgaggccctagagctccgggacaatgataagactcgctatatggggaagggtgtctcaaaggctgttgagcacatcaataaaactattgcgcctgccctggttagcaagaaactgaacgtcacagaacaagagaagattgacaaactgatgatcgagatggatggaacaaagttcacagccactttgcagtcgtgtaattggcccaagtcattgtttttctcgcctcactttccaccaagtgtctagagtcatgtgagcctcgtgtcatctccggggtggccacaggctagatccccggtggttttgtgctcaaaataaaaagcctcagtgacccatgagaata

SEQ ID NO: 2463 - protein, 125 aa, Homo sapiens
MSILKIHAREIFDSRGNPTVEVDLFTSKGLFRAAVPSGASTGIYEALELRDNDKTRYMGKGVSKAVEHINKTIAPALVSKKLNVTEQEKIDKLMIEMDGTKFTATLQSCNWPKSLFFSPHFPPSV

SEQ ID NO: 2464 - DNA, 1094 bp, Homo sapiens
ggcgcacgtggccccggacacgcagcgctgcggcggggccagcgccccaaccccggagtggggccgaggcgcgcagcctctcaacgactcgacgccaacggggtctctcggatcgcggcgcgaggcaggaggggcggggcaggagggccgcggcaggcccgggccgccaaagttgtcagcaaggtcgagggccggacgtggggccccagagcgacgctgagtgcgtgcgggactcggagtacgtgacggagccccgagctctcatgcccgccacgccgccccgggccatcccccggagccccggctccgcacaccccagttcggctcaccggtcctatctggggccagagtttcgcccgcaccactacagggccgctggggagtcggggccccccagatctgcccgcctcaagtccgcgggacgtcacccccctttccacgctactgcagccgtcgcagtcccacccctttccgggaggtgagggaatgagtgacggctctcccgacgaatggcgaggcggagctgagggggcgtgccccggaggcgggaagtgggtggggctcgccttagctaggcaggaagtcggcgcgggcggcgcggacagtatctgtgggtacccggagcacggagatctcgccggctttacgttcacctcggtgtctgcagcaccctccgcttcctctcctaggcgacgagacccagtggctagaagttcaccatgtctattctcaagatccatgccagggagatctttgactctcgcgggaatcccactgttgaggttgatctcttcacctcaaaaggtctcttcagagctgctgtgcccagtggtgcttcaactggtatctatgaggccctagagctccgggacaatgataagactcgctatatggggaagggtgtctcaaaggctccctgttggcagctctagctttgcagtcgtgtaattggcccaagtcattgtttttctcgcctcactttccaccaagtgtctagagtcatgtgagcctcgtgtcatctccggggtggccacaggctagatccccggtggttttgtgctcaaaataaaaagcctcagtgacccatgagaata

SEQ ID NO: 2465 - protein, 124 aa, Homo sapiens; identical to SEQ ID NO: 2461

SEQ ID NO: 2466 - DNA, 1578 bp, Homo sapiens
ggcgcacgtggccccggacacgcagcgctgcggcggggccagcgccccaaccccggagtggggccgaggcgcgcagcctctcaacgactcgacgccaacggggtctctcggatcgcggcgcgaggcaggaggggcggggcaggagggccgcggcaggcccgggccgccaaagttgtcagcaaggtcgagggccggacgtggggccccagagcgacgctgagtgcgtgcgggactcggagtacgtgacggagccccgagctctcatgcccgccacgccgccccgggccatcccccggagccccggctccgcacaccccagttcggctcaccggtcctatctggggccagagtttcgcccgcaccactacagggccgctggggagtcggggccccccagatctgcccgcctcaagtccgcgggacgtcacccccctttccacgctactgcagccgtcgcagtcccacccctttccgggaggtgagggaatgagtgacggctctcccgacgaatggcgaggcggagctgagggggcgtgccccggaggcgggaagtgggtggggctcgccttagctaggcaggaagtcggcgcgggcggcgcggacagtatctgtgggtacccggagcacggagatctcgccggctttacgttcacctcggtgtctgcagcaccctccgcttcctctcctaggcgacgagacccagtggctagaagttcaccatgtctattctcaagatccatgccagggagatctttgactctcgcgggaatcccactgttgaggttgatctcttcacctcaaaaggtctcttcagagctgctgtgcccagtggtgcttcaactggtatctatgaggccctagagctccgggacaatgataagactcgctatatggggaagggtgtctcaaaggctgttgagcacatcaataaaactattgcgcctgccctggttagcaagaaactgaacgtcacagaacaagagaagattgacaaactgatgatcgagatggatggaacagaaaataaatctaagtttggtgcgaacgccattctgggggtgtcccttgccgtctgcaaagctggtgccgttgagaagggggtccccctgtaccgccacatcgctgacttggctggcaactctgaagtcatcctgccagtcccggcgttcaatgtcatcaatggcggttctcatgctggcaacaagctggccatgcaggagttcatgatcctcccagtcggtgcagcaaacttcagggaagccatgcgcattggagcagagctcaggcagctcgaggcccccgaccaacacttgcaggggtccctgctagttagcgccccaccgccgtggagttcgtaccgcttccttagaacttctacagaagccaagctccctggagccctgttggcagctctagctttgcagtcgtgtaattggcccaagtcattgtttttctcgcctcactttccaccaagtgtctagagtcatgtgagcctcgtgtcatctccggggtggccacaggctagatccccggtggttttgtgctcaaaataaaaagcctcagtgacccatgagaata

SEQ ID NO: 2467 - protein, 253 aa, Homo sapiens
MSILKIHAREIFDSRGNPTVEVDLFTSKGLFRAAVPSGASTGIYEALELRDNDKTRYMGKGVSKAVEHINKTIAPALVSKKLNVTEQEKIDKLMIEMDGTENKSKFGANAILGVSLAVCKAGAVEKGVPLYRHIADLAGNSEVILPVPAFNVINGGSHAGNKLAMQEFMILPVGAANFREAMRIGAELRQLEAPDQHLQGSLLVSAPPPWSSYRFLRTSTEAKLPGALLAALALQSCNWPKSLFFSPHFPPSV

SEQ ID NO: 2468 - DNA, 499 bp, Homo sapiens
aggcctggagctgctgaagactgctattgggaaagctggctacactgataaggtggtcatcggcatggacgtagcggcctccgagttcttcaggtctgggaagtatgacctggacttcaagtctcccgatgaccccagcaggtacatctcgcctgaccagctggctgacctgtacaagtccttcatcaaggactacccagtggtgtctatcgaagatccctttgaccaggatgactggggagcttggcagaagttcacagccagtgcaggaatccaggtagtgggggatgatctcacagtgaccaacccaaagaggatcgccaaggccgtgaacgagaagtcctgcaactgcctcctgctcaaatcattgtttttctcgcctcactttccaccaagtgtctagagtcatgtgagcctcgtgtcatctccggggtggccacaggctagatccccggtggttttgtgctcaaaataaaaagcctcagtgacccatgagaat

SEQ ID NO: 2469 - protein, 112 aa, Homo sapiens
MDVAASEFFRSGKYDLDFKSPDDPSRYISPDQLADLYKSFIKDYPVVSIEDPFDQDDWGAWQKFTASAGIQVVGDDLTVTNPKRIAKAVNEKSCNCLLLKSLFFSPHFPPSV

SEQ ID NO: 2470 - DNA, 1223 bp, Homo sapiens
ggcgcacgtggccccggacacgcagcgctgcggcggggccagcgccccaaccccggagtggggccgaggcgcgcagcctctcaacgactcgacgccaacggggtctctcggatcgcggcgcgaggcaggaggggcggggcaggagggccgcggcaggcccgggccgccaaagttgtcagcaaggtcgagggccggacgtggggccccagagcgacgctgagtgcgtgcgggactcggagtacgtgacggagccccgagctctcatgcccgccacgccgccccgggccatcccccggagccccggctccgcacaccccagttcggctcaccggtcctatctggggccagagtttcgcccgcaccactacagggccgctggggagtcggggccccccagatctgcccgcctcaagtccgcgggacgtcacccccctttccacgctactgcagccgtcgcagtcccacccctttccgggaggtgagggaatgagtgacggctctcccgacgaatggcgaggcggagctgagggggcgtgccccggaggcgggaagtgggtggggctcgccttagctaggcaggaagtcggcgcgggcggcgcggacagtatctgtgggtacccggagcacggagatctcgccggctttacgttcacctcggtgtctgcagcaccctccgcttcctctcctaggcgacgagacccagtggctagaagttcaccatgtctattctcaagatccatgccagggagatctttgactctcgcgggaatcccactgttgaggttgatctcttcacctcaaaaggtctcttcagagctgctgtgcccagtggtgcttcaactggtatctatgaggccctagagctccgggacaatgataagactcgctatatggggaagggtgtctcaaaggctgttgagcacatcaataaaactattgcgcctgccctggttagcaagaaactgaacgtcacagaacaagagaagattgacaaactgatgatcgagatggatggaacagaaaataaatctaagtttggtgcgaacgccattctgggggtgtcccttgcctcgtgtaattggcccaagtcattgtttttctcgcctcactttccaccaagtgtctagagtcatgtgagcctcgtgtcatctccggggtggccacaggctagatccccggtggttttgtgctcaaaataaaaagcctcagtgacccatgagaat

SEQ ID NO: 2471 - protein, 135 aa, Homo sapiens
MSILKIHAREIFDSRGNPTVEVDLFTSKGLFRAAVPSGASTGIYEALELRDNDKTRYMGKGVSKAVEHINKTIAPALVSKKLNVTEQEKIDKLMIEMDGTENKSKFGANAILGVSLASCNWPKSLFFSPHFPPSV

SEQ ID NO: 2472 - DNA, 688 bp, Homo sapiens
cccgctttaatgctgtaagaagcactctacacacacgaacatgttaccatttgaccgttgtttaatggcgtacgtggggacttagccggagcaggatgatgctgtgccttgatggtaatgagtgctcagtaagtaagcatttgtggaagattgaacgcatggcccctgaaatgctctcctctgctttcctgccccctcactgtctctcactcgcagtccttaatcaccggttctcttctgagtctctctcatttttccttcttcatcctctgctgggcaggcgtctccagacccattaagtatattaatgagttcctggcaccagccctgtgcactcaggtaactgattgaacagcctttagtctgcagttggcgtttccagtgcatggtcttgcaaactaacctccagtcagatcgttctgagccagctgctgttttgtgtggctctaaccctctggggtcctaggtaggagcactcagactgggccggaaagtcctccgattctggggggaaaggggagagggggaagaggtcccacagaaggtcccttggtgggcttccgcgtcggcctcaacagtggttctctctaacaatgctgctcaagcctgttttaaagttaatgtcagtaatttgatttgattgttccttccaggtgttcaaaataaaaagcctcagtgacccatgaga

SEQ ID NO: 2473 - protein, 67 aa, Homo sapiens
MMLCLDGNECSVSKHLWKIERMAPEMLSSAFLPPHCLSLAVLNHRFSSESLSFFLLHPLLGRRLQTH

SEQ ID NO: 2474 - DNA, 713 bp, Homo sapiens
caatggcggttctcatgctggcaacaagctggccatgcaggagttcatgatcctcccagtcggtgcagcaaacttcagggaagccatgcgcattggagcagaggtttaccacaacctgaagaatgtcatcaaggagaaatatgggaaagatgccaccaatgtgggggatgaaggcgggtttgctcccaacatcctggagaataaagaaggcctggagctgctgaagactgctattgggaaagctggctacactgataaggtggtcatcggcatggacgtagcggcctccgagttcttcaggtctgggaagtatgacctggacttcaagtctcccgatgaccccagcaggtacatctcgcctgaccagctggctgacctgtacaagtccttcatcaaggactacccagtggtgtctatcgaagatccctttgaccaggatgactggggagcttggcagaagttcacagccagtgcaggaatccaggtagtgggggatgatctcacagtgaccaacccaaagaggatcgccaaggccgtgaacgagaagtcctgcaactgcctcctgctcaaagtcaaccagattggctccgtgaccgagtctcttcaggcgtgcaagctggcccaggccaatggttggggcgtcatggtgtctcatcgttcgggggagactgaagataccttcatcgctgacctggttgtggggctgtgcactg

SEQ ID NO: 2475 - protein, 225 aa, Homo sapiens
MQEFMILPVGAANFREAMRIGAEVYHNLKNVIKEKYGKDATNVGDEGGFAPNILENKEGLELLKTAIGKAGYTDKVVIGMDVAASEFFRSGKYDLDFKSPDDPSRYISPDQLADLYKSFIKDYPVVSIEDPFDQDDWGAWQKFTASAGIQVVGDDLTVTNPKRIAKAVNEKSCNCLLLKVNQIGSVTESLQACKLAQANGWGVMVSHRSGETEDTFIADLVVGLC

SEQ ID NO: 2476 - DNA, 611 bp, Homo sapiens
caatggcggttctcatgctggcaacaagctggccatgcaggagttcatgatcctcccagtcggtgcagcaaacttcagggaagccatgcgcattggagcagaggtttaccacaacctgaagaatgtcatcaaggagaaatatgggaaagatgccaccaatgtgggggatgaaggcgggtttgctcccaacatcctggagaataaagaaggcctggagctgctgaagactgctattgggaaagctggctacactgataaggtggtcatcggcatggacgtagcggcctccgagttcttcaggtctgggaagtatgacctggacttcaagtctcccgatgaccccagcaggtacatctcgcctgaccagctggctgacctgtacaagtccttcatcaaggactacccagtggtgtctatcgaagatccctttgaccaggatgactggggagcttggcagaagttcacagccagtgcaggaatccaggtagtgggggatgatctcacagtgaccaacccaaagaggatcgccaaggccgtgaacgagaagtcctgcaactgcctcctgctcaaagtcaaccagattggctccgtgaccgagtctcttcaggcgt

SEQ ID NO: 2477 - protein, 191 aa, Homo sapiens
MQEFMILPVGAANFREAMRIGAEVYHNLKNVIKEKYGKDATNVGDEGGFAPNILENKEGLELLKTAIGKAGYTDKVVIGMDVAASEFFRSGKYDLDFKSPDDPSRYISPDQLADLYKSFIKDYPVVSIEDPFDQDDWGAWQKFTASAGIQVVGDDLTVTNPKRIAKAVNEKSCNCLLLKVNQIGSVTESLQ

SEQ ID NO: 2478 - DNA, 508 bp, Homo sapiens
ggcttacacaacctgaagaatgtcatcaaggagaaatatgggaaagatgccaccaatgtgggggatgaaggcgggtttgctcccaacatcctggagaataaagaaggcctggagctgctgaagactgctattgggaaagctggctacactgataaggtggtcatcggcatggacgtagcggcctccgagttcttcaggtctgggaagtatgacctggacttcaagtctcccgatgaccccagcaggtacatctcgcctgaccagctggctgacctgtacaagtccttcatcaaggactacccagtggtgtctatcgaagatccctttgaccaggatgactggggagcttggcagaagttcacagccagtgcaggaatccaggtagtgggggatgatctcacagtgaccaacccaaagaggatcgccaaggccgtgaacgagaagtcctgcaactgcctcctgctcaaagtcaaccagattggctccgtgaccgagtctcttcaggcgt

SEQ ID NO: 2479 - protein, 112 aa, Homo sapiens
MDVAASEFFRSGKYDLDFKSPDDPSRYISPDQLADLYKSFIKDYPVVSIEDPFDQDDWGAWQKFTASAGIQVVGDDLTVTNPKRIAKAVNEKSCNCLLLKVNQIGSVTESLQ

SEQ ID NO: 2480 - DNA, 1788 bp, Homo sapiens
ggcgcacgtggccccggacacgcagcgctgcggcggggccagcgccccaaccccggagtggggccgaggcgcgcagcctctcaacgactcgacgccaacggggtctctcggatcgcggcgcgaggcaggaggggcggggcaggagggccgcggcaggcccgggccgccaaagttgtcagcaaggtcgagggccggacgtggggccccagagcgacgctgagtgcgtgcgggactcggagtacgtgacggagccccgagctctcatgcccgccacgccgccccgggccatcccccggagccccggctccgcacaccccagttcggctcaccggtcctatctggggccagagtttcgcccgcaccactacagggccgctggggagtcggggccccccagatctgcccgcctcaagtccgcgggacgtcacccccctttccacgctactgcagccgtcgcagtcccacccctttccgggaggtgagggaatgagtgacggctctcccgacgaatggcgaggcggagctgagggggcgtgccccggaggcgggaagtgggtggggctcgccttagctaggcaggaagtcggcgcgggcggcgcggacagtatctgtgggtacccggagcacggagatctcgccggctttacgttcacctcggtgtctgcagcaccctccgcttcctctcctaggcgacgagacccagtggctagaagttcaccatgtctattctcaagatccatgccagggagatctttgactctcgcgggaatcccactgttgaggttgatctcttcacctcaaaaggtctcttcagagctgctgtgcccagtggtgcttcaactggtatctatgaggccctagagctccgggacaatgataagactcgctatatggggaagggtgtctcaaaggctgttgagcacatcaataaaactattgcgcctgccctggttagcaagaaactgaacgtcacagaacaagagaagattgacaaactgatgatcgagatggatggaacagaaaataaatctaagtttggtgcgaacgccattctgggggtgtcccttgccgtctgcaaagctggtgccgttgagaagggggtccccctgtaccgccacatcgctgacttggctggcaactctgaagtcatcctgccagtcccggcgttcaatgtcatcaatggcggttctcatgctggcaacaagctggccatgcaggagttcatgatcctcccagtcggtgcagcaaacttcagggaagccatgcgcattggagcagaggtttaccacaacctgaagaatgtcatcaaggagaaatatgggaaagatgccaccaatgtgggggatgaaggcgggtttgctcccaacatcctggagaataaagaaggcctggagctgctgaagactgctattgggaaagctggctacactgataaggtggtcatcggcatggacgtagcggcctccgagttcttcaggtctgggaagtatgacctggacttcaagtctcccgatgaccccagcaggtacatctcgcctgaccagctggctgacctgtacaagtccttcatcaaggactacccagtggtgtctatcgaagatccctttgaccaggatgactggggagcttggcagaagttcacagccagtgcaggaatccaggtagtgggggatgatctcacagtgaccaacccaaagaggatcgccaaggccgtgaacgagaagtcctgcaactgcctcctgctcaaagtcaaccagattggctccgtgaccgagtctcttcaggcgt

SEQ ID NO: 2481 - protein, 355 aa, Homo sapiens
MSILKIHAREIFDSRGNPTVEVDLFTSKGLFRAAVPSGASTGIYEALELRDNDKTRYMGKGVSKAVEHINKTIAPALVSKKLNVTEQEKIDKLMIEMDGTENKSKFGANAILGVSLAVCKAGAVEKGVPLYRHIADLAGNSEVILPVPAFNVINGGSHAGNKLAMQEFMILPVGAANFREAMRIGAEVYHNLKNVIKEKYGKDATNVGDEGGFAPNILENKEGLELLKTAIGKAGYTDKVVIGMDVAASEFFRSGKYDLDFKSPDDPSRYISPDQLADLYKSFIKDYPVVSIEDPFDQDDWGAWQKFTASAGIQVVGDDLTVTNPKRIAKAVNEKSCNCLLLKVNQIGSVTESLQ

SEQ ID NO: 2482 - DNA, 1407 bp, Homo sapiens
ggcgcacgtggccccggacacgcagcgctgcggcggggccagcgccccaaccccggagtggggccgaggcgcgcagcctctcaacgactcgacgccaacggggtctctcggatcgcggcgcgaggcaggaggggcggggcaggagggccgcggcaggcccgggccgccaaagttgtcagcaaggtcgagggccggacgtggggccccagagcgacgctgagtgcgtgcgggactcggagtacgtgacggagccccgagctctcatgcccgccacgccgccccgggccatcccccggagccccggctccgcacaccccagttcggctcaccggtcctatctggggccagagtttcgcccgcaccactacagggccgctggggagtcggggccccccagatctgcccgcctcaagtccgcgggacgtcacccccctttccacgctactgcagccgtcgcagtcccacccctttccgggaggtgagggaatgagtgacggctctcccgacgaatggcgaggcggagctgagggggcgtgccccggaggcgggaagtgggtggggctcgccttagctaggcaggaagtcggcgcgggcggcgcggacagtatctgtgggtacccggagcacggagatctcgccggctttacgttcacctcggtgtctgcagcaccctccgcttcctctcctaggcgacgagacccagtggctagaagttcaccatgtctattctcaagatccatgccagggagatctttgactctcgcgggaatcccactgttgaggttgatctcttcacctcaaaaggtctcttcagagctgctgtgcccagtggtgcttcaactggtatctatgaggccctagagctccgggacaatgataagactcgctatatggggaagggtgtctcaaaggctgttgagcacatcaataaaactattgcgcctgccctggttagcaagaaactgaacgtcacagaacaagagaagattgacaaactgatgatcgagatggatggaacagaaaataaatctaagtttggtgcgaacgccattctgggggtgtcccttgccgtctgcaaagctggtgccgttgagaagggggtccccctgtaccgccacatcgctgacttggctggcaactctgaagtcatcctgccagtcccggcgttcaatgtcatcaatggcggttctcatgctggcaacaagctggccatgcaggagttcatgatcctcccagtcggtgcagcaaacttcagggaagccatgcgcattggagcagaggtttaccacaacctgaagaatgtcatcaaggagaaatatgggaaagatgccaccaatgtgggggatgaaggcgggtttgctcccaacatcctggagaataaagaagcctgagctctcaacggcacag

SEQ ID NO: 2483 - protein, 223 aa, Homo sapiens
MSILKIHAREIFDSRGNPTVEVDLFTSKGLFRAAVPSGASTGIYEALELRDNDKTRYMGKGVSKAVEHINKTIAPALVSKKLNVTEQEKIDKLMIEMDGTENKSKFGANAILGVSLAVCKAGAVEKGVPLYRHIADLAGNSEVILPVPAFNVINGGSHAGNKLAMQEFMILPVGAANFREAMRIGAEVYHNLKNVIKEKYGKDATNVGDEGGFAPNILENKEA

SEQ ID NO: 2484 - DNA, 1395 bp, Homo sapiens
ggcgcacgtggccccggacacgcagcgctgcggcggggccagcgccccaaccccggagtggggccgaggcgcgcagcctctcaacgactcgacgccaacggggtctctcggatcgcggcgcgaggcaggaggggcggggcaggagggccgcggcaggcccgggccgccaaagttgtcagcaaggtcgagggccggacgtggggccccagagcgacgctgagtgcgtgcgggactcggagtacgtgacggagccccgagctctcatgcccgccacgccgccccgggccatcccccggagccccggctccgcacaccccagttcggctcaccggtcctatctggggccagagtttcgcccgcaccactacagggccgctggggagtcggggccccccagatctgcccgcctcaagtccgcgggacgtcacccccctttccacgctactgcagccgtcgcagtcccacccctttccgggaggtgagggaatgagtgacggctctcccgacgaatggcgaggcggagctgagggggcgtgccccggaggcgggaagtgggtggggctcgccttagctaggcaggaagtcggcgcgggcggcgcggacagtatctgtgggtacccggagcacggagatctcgccggctttacgttcacctcggtgtctgcagcaccctccgcttcctctcctaggcgacgagacccagtggctagaagttcaccatgtctattctcaagatccatgccagggagatctttgactctcgcgggaatcccactgttgaggttgatctcttcacctcaaaaggtctcttcagagctgctgtgcccagtggtgcttcaactggtatctatgaggccctagagctccgggacaatgataagactcgctatatggggaagggtgtctcaaaggctgttgagcacatcaataaaactattgcgcctgccctggttagcaagaaactgaacgtcacagaacaagagaagattgacaaactgatgatcgagatggatggaacagaaaataaatctaagtttggtgcgaacgccattctgggggtgtcccttgccgtctgcaaagctggtgccgttgagaagggggtccccctgtaccgccacatcgctgacttggctggcaactctgaagtcatcctgccagtcccggcgttcaatgtcatcaatggcggttctcatgctggcaacaagctggccatgcaggagttcatgatcctcccagtcggtgcagcaaacttcagggaagccatgcgcattggagcagaggtttaccacaacctgaagaatgtcatcaaggagaaatatgggaaagatgccaccaatgtgggggatgaaggcgggtttgctcccaacatcctggagaataaagaaggctggagtg

SEQ ID NO: 2485 - protein, 224 aa, Homo sapiens
MSILKIHAREIFDSRGNPTVEVDLFTSKGLFRAAVPSGASTGIYEALELRDNDKTRYMGKGVSKAVEHINKTIAPALVSKKLNVTEQEKIDKLMIEMDGTENKSKFGANAILGVSLAVCKAGAVEKGVPLYRHIADLAGNSEVILPVPAFNVINGGSHAGNKLAMQEFMILPVGAANFREAMRIGAEVYHNLKNVIKEKYGKDATNVGDEGGFAPNILENKEGW

SEQ ID NO: 2486 - DNA, 1344 bp, Homo sapiens
ggcgcacgtggccccggacacgcagcgctgcggcggggccagcgccccaaccccggagtggggccgaggcgcgcagcctctcaacgactcgacgccaacggggtctctcggatcgcggcgcgaggcaggaggggcggggcaggagggccgcggcaggcccgggccgccaaagttgtcagcaaggtcgagggccggacgtggggccccagagcgacgctgagtgcgtgcgggactcggagtacgtgacggagccccgagctctcatgcccgccacgccgccccgggccatcccccggagccccggctccgcacaccccagttcggctcaccggtcctatctggggccagagtttcgcccgcaccactacagggccgctggggagtcggggccccccagatctgcccgcctcaagtccgcgggacgtcacccccctttccacgctactgcagccgtcgcagtcccacccctttccgggaggtgagggaatgagtgacggctctcccgacgaatggcgaggcggagctgagggggcgtgccccggaggcgggaagtgggtggggctcgccttagctaggcaggaagtcggcgcgggcggcgcggacagtatctgtgggtacccggagcacggagatctcgccggctttacgttcacctcggtgtctgcagcaccctccgcttcctctcctaggcgacgagacccagtggctagaagttcaccatgtctattctcaagatccatgccagggagatctttgactctcgcgggaatcccactgttgaggttgatctcttcacctcaaaaggtctcttcagagctgctgtgcccagtggtgcttcaactggtatctatgaggccctagagctccgggacaatgataagactcgctatatggggaagggtgtctcaaaggctgttgagcacatcaataaaactattgcgcctgccctggttagcaagaaactgaacgtcacagaacaagagaagattgacaaactgatgatcgagatggatggaacagaaaataaatctaagtttggtgcgaacgccattctgggggtgtcccttgccgtctgcaaagctggtgccgttgagaagggggtccccctgtaccgccacatcgctgacttggctggcaactctgaagtcatcctgccagtcccggcgttcaatgtcatcaatggcggttctcatgctggcaacaagctggccatgcaggagttcatgatcctcccagtcggtgcagcaaacttcagggaagccatgcgcattggagcagaggtttaccacaacctgaagaatgtcatcaaggagaaatatgggaaagatgccaccaatgctggag

SEQ ID NO: 2487 - protein, 207 aa, Homo sapiens
MSILKIHAREIFDSRGNPTVEVDLFTSKGLFRAAVPSGASTGIYEALELRDNDKTRYMGKGVSKAVEHINKTIAPALVSKKLNVTEQEKIDKLMIEMDGTENKSKFGANAILGVSLAVCKAGAVEKGVPLYRHIADLAGNSEVILPVPAFNVINGGSHAGNKLAMQEFMILPVGAANFREAMRIGAEVYHNLKNVIKEKYGKDATNA

SEQ ID NO: 2488 - DNA, 358 bp, Homo sapiens
ctaagtttggtgcgaacgccattctgggggtgtcccttgccgtctgcaaagctggtgccgttgagaagggggtccccctgtaccgccacatcgctgacttggctggcaactctgaagtcatcctgccagtcccggcgttcaatgtcatcaatggcggttctcatgctggcaacaagctggccatgcaggagttcatgatcctcccagtcggtgcagcaaacttcagggaagccatgcgcattggagcagaggtttaccacaacctgaagaatgtcatcaaggagaaatatgggaaagatgccaccaatgtgggggatgaaggcgggtttgctcccaacatcctggagaataaagaagg

SEQ ID NO: 2489 - protein, 57 aa, Homo sapiens
MQEFMILPVGAANFREAMRIGAEVYHNLKNVIKEKYGKDATNVGDEGGFAPNILENK

SEQ ID NO: 2490 - DNA, 906 bp, Homo sapiens
ctcccatcagaggatgaagatttgccatctttgcagttagccaagagtgagcagcagagcctgcctttcaagggctcagcctgcttgagtgaacagtgagctttgcttatttattgcctatgaaagccatgttcctgggtagcagtggtctacatagcacatacctgacagttctcttgggtgtaaagtcactttgggctccctgggtagactattaaccttttgttacaaaagcattgtctgagagtgccatctctgttgcattgttgggtgaatgcctgataaccatcaaagcaagcagaaggcagttttttgtctccccactgatttttgtcctccactttttttgcttataaaacaaacatcacagaattgattttgatattacacagttccaaagtcagattccatggtaggggagcaaaggctatgcagataagagtggccccaacccctcattctcccctctccctcgtagaaactgaacgtcacagaacaagagaagattgacaaactgatgatcgagatggatggaacagaaaataaatctaagtttggtgcgaacgccattctgggggtgtcccttgccgtctgcaaagctggtgccgttgagaagggggtccccctgtaccgccacatcgctgacttggctggcaactctgaagtcatcctgccagtcccggcgttcaatgtcatcaatggcggttctcatgctggcaacaagctggccatgcaggagttcatgatcctcccagtcggtgcagcaaacttcagggaagccatgcgcattggagcagaggtttaccacaacctgaagaatgtcatcaaggagaaatatgggaaagatgccaccaatgtgggggatgaaggcgggtttgctcccaacatcctggagaataaagaagg

SEQ ID NO: 2491 - protein, 128 aa, Homo sapiens
MIEMDGTENKSKFGANAILGVSLAVCKAGAVEKGVPLYRHIADLAGNSEVILPVPAFNVINGGSHAGNKLAMQEFMILPVGAANFREAMRIGAEVYHNLKNVIKEKYGKDATNVGDEGGFAPNILENK

SEQ ID NO: 2492 - DNA, 1330 bp, Homo sapiens
ggcgcacgtggccccggacacgcagcgctgcggcggggccagcgccccaaccccggagtggggccgaggcgcgcagcctctcaacgactcgacgccaacggggtctctcggatcgcggcgcgaggcaggaggggcggggcaggagggccgcggcaggcccgggccgccaaagttgtcagcaaggtcgagggccggacgtggggccccagagcgacgctgagtgcgtgcgggactcggagtacgtgacggagccccgagctctcatgcccgccacgccgccccgggccatcccccggagccccggctccgcacaccccagttcggctcaccggtcctatctggggccagagtttcgcccgcaccactacagggccgctggggagtcggggccccccagatctgcccgcctcaagtccgcgggacgtcacccccctttccacgctactgcagccgtcgcagtcccacccctttccgggaggtgagggaatgagtgacggctctcccgacgaatggcgaggcggagctgagggggcgtgccccggaggcgggaagtgggtggggctcgccttagctaggcaggaagtcggcgcgggcggcgcggacagtatctgtgggtacccggagcacggagatctcgccggctttacgttcacctcggtgtctgcagcaccctccgcttcctctcctaggcgacgagacccagtggctagaagttcaccatgtctattctcaagatccatgccagggagatctttgactctcgcgggaatcccactgttgaggttgatctcttcacctcaaaaggtctcttcagagctgctgtgcccagtggtgcttcaactggtatctatgaggccctagagctccgggacaatgataagactcgctatatggggaagggtgtctcaaaggctgttgagcacatcaataaaactattgcgcctgccctggttagcaagaaactgaacgtcacagaacaagagaagattgacaaactgatgatcgagatggatggaacagaaactggtgccgttgagaagggggtccccctgtaccgccacatcgctgacttggctggcaactctgaagtcatcctgccagtcccggcgttcaatgtcatcaatggcggttctcatgctggcaacaagctggccatgcaggagttcatgatcctcccagtcggtgcagcaaacttcagggaagccatgcgcattggagcagaggtttaccacaacctgaagaatgtcatcaaggagaaatatgggaaagatgccaccaatgtgggggatgaaggcgggtttgctcccaacatcctggagaataaagaagg

SEQ ID NO: 2493 - protein, 202 aa, Homo sapiens
MSILKIHAREIFDSRGNPTVEVDLFTSKGLFRAAVPSGASTGIYEALELRDNDKTRYMGKGVSKAVEHINKTIAPALVSKKLNVTEQEKIDKLMIEMDGTETGAVEKGVPLYRHIADLAGNSEVILPVPAFNVINGGSHAGNKLAMQEFMILPVGAANFREAMRIGAEVYHNLKNVIKEKYGKDATNVGDEGGFAPNILENK

SEQ ID NO: 2494 - DNA, 1328 bp, Homo sapiens
ggcgcacgtggccccggacacgcagcgctgcggcggggccagcgccccaaccccggagtggggccgaggcgcgcagcctctcaacgactcgacgccaacggggtctctcggatcgcggcgcgaggcaggaggggcggggcaggagggccgcggcaggcccgggccgccaaagttgtcagcaaggtcgagggccggacgtggggccccagagcgacgctgagtgcgtgcgggactcggagtacgtgacggagccccgagctctcatgcccgccacgccgccccgggccatcccccggagccccggctccgcacaccccagttcggctcaccggtcctatctggggccagagtttcgcccgcaccactacagggccgctggggagtcggggccccccagatctgcccgcctcaagtccgcgggacgtcacccccctttccacgctactgcagccgtcgcagtcccacccctttccgggaggtgagggaatgagtgacggctctcccgacgaatggcgaggcggagctgagggggcgtgccccggaggcgggaagtgggtggggctcgccttagctaggcaggaagtcggcgcgggcggcgcggacagtatctgtgggtacccggagcacggagatctcgccggctttacgttcacctcggtgtctgcagcaccctccgcttcctctcctaggcgacgagacccagtggctagaagttcaccatgtctattctcaagatccatgccagggagatctttgactctcgcgggaatcccactgttgaggttgatctcttcacctcaaaaggtctcttcagagctgctgtgcccagtggtgcttcaactggtatctatgaggccctagagctccgggacaatgataagactcgctatatggggaaggaaactgaacgtcacagaacaagagaagattgacaaactgatgatcgagatggatggaacagaaaataaatctaagtttggtgcgaacgccattctgggggtgtcccttgccgtctgcaaagctggtgccgttgagaagggggtccccctgtaccgccacatcgctgacttggctggcaactctgaagtcatcctgccagtcccggcgttcaatgtcatcaatggcggttctcatgctggcaacaagctggccatgcaggagttcatgatcctcccagtcggtgcagcaaacttcagggaagccatgcgcattggagcagaggtttaccacaacctgaagaatgtcatcaaggagaaatatgggaaagatgccaccaatgtgggggatgaaggcgggtttgctcccaacatcctggagaataaagaagg

SEQ ID NO: 2495 - protein, 150 aa, Homo sapiens
MIRLAIWGRKLNVTEQEKIDKLMIEMDGTENKSKFGANAILGVSLAVCKAGAVEKGVPLYRHIADLAGNSEVILPVPAFNVINGGSHAGNKLAMQEFMILPVGAANFREAMRIGAEVYHNLKNVIKEKYGKDATNVGDEGGFAPNILENK

SEQ ID NO: 2496 - DNA, 958 bp, Homo sapiens
ggcgcacgtggccccggacacgcagcgctgcggcggggccagcgccccaaccccggagtggggccgaggcgcgcagcctctcaacgactcgacgccaacggggtctctcggatcgcggcgcgaggcaggaggggcggggcaggagggccgcggcaggcccgggccgccaaagttgtcagcaaggtcgagggccggacgtggggccccagagcgacgctgagtgcgtgcgggactcggagtacgtgacggagccccgagctctcatgcccgccacgccgccccgggccatcccccggagccccggctccgcacaccccagttcggctcaccggtcctatctggggccagagtttcgcccgcaccactacagggccgctggggagtcggggccccccagatctgcccgcctcaagtccgcgggacgtcacccccctttccacgctactgcagccgtcgcagtcccacccctttccgggaggtgagggaatgagtgacggctctcccgacgaatggcgaggcggagctgagggggcgtgccccggaggcgggaagtgggtggggctcgccttagctaggcaggaagtcggcgcgggcggcgcggacagtatctgtgggtacccggagcacggagatctcgccggctttacgttcacctcggtgtctgcagcaccctccgcttcctctcctaggcgacgagacccagtggctagaagttcaccatgtctattctcaagatccatgccagggagatctttgactctcgcgggaatcccactgttgaggttgatctcttcacctcaaaaggtctcttcagagctgctgtgcccagtggtgcttcaactggtatctatgaggccctagagctccgggacaatgataagactcgctatatggggaaggaaactgaacgtcacagaacaagagaagattgacaaactgatgatcgagatggatggaa

SEQ ID NO: 2497 - protein, 124 aa, Homo sapiens; identical to SEQ ID NO: 2461

SEQ ID NO: 2498 - DNA, 740 bp, Homo sapiens
cccgctttaatgctgtaagaagcactctacacacacgaacatgttaccatttgaccgttgtttaatggcgtacgtggggacttagccggagcaggatgatgctgtgccttgatggtaatgagtgctcagtaagtaagcatttgtggaagattgaacgcatggcccctgaaatgctctcctctgctttcctgccccctcactgtctctcactcgcagtccttaatcaccggttctcttctgagtctctctcatttttccttcttcatcctctgctgggcaggcgtctccagacccattaagtatattaatgagttcctggcaccagccctgtgcactcaggtaactgattgaacagcctttagtctgcagttggcgtttccagtgcatggtcttgcaaactaacctccagtcagatcgttctgagccagctgctgttttgtgtggctctaaccctctggggtcctaggtaggagcactcagactgggccggaaagtcctccgattctggggggaaaggggagagggggaagaggtcccacagaaggtcccttggtgggcttccgcgtcggcctcaacagtggttctctctaacaatgctgctcaagcctgttttaaagttaatgtcagtaatttgatttgattgttccttccaggtgtctcaaaggctgttgagcacatcaataaaactattgcgcctgccctggttagcaagaaactgaacgtcacagaacaagagaaga

SEQ ID NO: 2499 - protein, 67 aa, Homo sapiens; identical to SEQ ID NO: 2473

SEQ ID NO: 2500 - DNA, 893 bp, Homo sapiens
tgaaatcaggttgtgaaacactgggctggtgtcgcagtggtggtgctgggtgttcagtcccgctttaatgctgtaagaagcactctacacacacgaacatgttaccatttgaccgttgtttaatggcttggcgtttccagtgcatggtcttgcaaactaacctccagtcagatcgttctgagccagctgctgttttgtgtggctctaaccctctggggtcctaggtaggagcactcagactgggccggaaagtcctccgattctggggggaaaggggagagggggaagaggtcccacagaaggtcccttggtgggcttccgcgtcggcctcaacagtggttctctctaacaatgctgctcaagcctgttttaaagttaatgtcagtaatttgatttgattgttccttccaggtgtctcaaaggctgttgagcacatcaataaaactattgcgcctgccctggttagcaaggtaggacctgcctcctgataactaatgtgtctaatgccaccagagcgtctcccaggcccaggggctttcctgtttatggaagagcttattctgagagctgtagaagcctattggattccctgtcacgcacgagaacaatccatgcatgacataattctaacctgcccgctgcctcaccccacttttgggagcagatggaattgcatcagaagaatgagacacttcgagccctgaggtttcttcccccctgcaactctctggacctttgaagaaattaagatccagattttaagagtggctctcaggggtgtttgtggtagtgtccatggtgactaatttctcatgaactttggaattatttactataattctactgactttaacagtggagttcctgttaagtaaaatctggaaatctcagta

SEQ ID NO: 2501 - protein, 41 aa, Homo sapiens
MLPFDRCLMAWRFQCMVLQTNLQSDRSEPAAVLCGSNPLGS

SEQ ID NO: 2502 - DNA, 2762 bp, Homo sapiens
ggcgcacgtggccccggacacgcagcgctgcggcggggccagcgccccaaccccggagtggggccgaggcgcgcagcctctcaacgactcgacgccaacggggtctctcggatcgcggcgcgaggcaggaggggcggggcaggagggccgcggcaggcccgggccgccaaagttgtcagcaaggtcgagggccggacgtggggccccagagcgacgctgagtgcgtgcgggactcggagtacgtgacggagccccgagctctcatgcccgccacgccgccccgggccatcccccggagccccggctccgcacaccccagttcggctcaccggtcctatctggggccagagtttcgcccgcaccactacagggccgctggggagtcggggccccccagatctgcccgcctcaagtccgcgggacgtcacccccctttccacgctactgcagccgtcgcagtcccacccctttccgggaggtgagggaatgagtgacggctctcccgacgaatggcgaggcggagctgagggggcgtgccccggaggcgggaagtgggtggggctcgccttagctaggcaggaagtcggcgcgggcggcgcggacagtatctgtgggtacccggagcacggagatctcgccggctttacgttcacctcggtgtctgcagcaccctccgcttcctctcctaggcgacgagacccagtggctagaagttcaccatgtctattctcaagatccatgccagggagatctttgactctcgcgggaatcccactgttgaggttgatctcttcacctcaaaaggtctcttcagagctgctgtgcccagtggtgcttcaactggtatctatgaggccctagagctccgggacaatgataagactcgctatatggggaagggtaagccttagaacccacagcccatggcctccctgcttccagccccattcctggccttgcccagtcctgtcctctctgggtggcacttgcacttgcaggtttatggcaggtaaacctgctgtgacccatgatgttgatggaagcagtgcaccaccttgtggacaggaaagttggtgtgtggattccggggttcccgagcctgcatgctctgggtcgagagttccaatgcttgcttctattgcagtttgttcccaatctgcgaaatactccttcacggttaggacaggaacccaagcatgagaacagggcctgttaactaaagaaaagtttccccatctcccaggagggttctgtgggccctccagagatcatcagcctcttcacgggctagaaaggatccagggaaggtctaaccaatgacctgccctgaatggtgagctgcaggtgtgtcatttagtgtgattttcctgttgactgactcataggagccctgctctgtggcagagctagcctctggctgtattcaaattgacttagtgtgtgtgcaacattgacctttctagagatagaacatgtggccaaattacagaaaagcacatagggctagatcacgcattctcagtggggcacccggaaaactccaaaaaggctgcagggaggggacaatgatgaaatcaggttgtgaaacactgggctggtgtcgcagtggtggtgctgggtgttcagtcccgctttaatgctgtaagaagcactctacacacacgaacatgttaccatttgaccgttgtttaatggcgtacgtggggacttagccggagcaggatgatgctgtgccttgatggtaatgagtgctcagtaagtaagcatttgtggaagattgaacgcatggcccctgaaatgctctcctctgctttcctgccccctcactgtctctcactcgcagtccttaatcaccggttctcttctgagtctctctcatttttccttcttcatcctctgctgggcaggcgtctccagacccattaagtatattaatgagttcctggcaccagccctgtgcactcaggtaactgattgaacagcctttagtctgcagttggcgtttccagtgcatggtcttgcaaactaacctccagtcagatcgttctgagccagctgctgttttgtgtggctctaaccctctggggtcctaggtaggagcactcagactgggccggaaagtcctccgattctggggggaaaggggagagggggaagaggtcccacagaaggtcccttggtgggcttccgcgtcggcctcaacagtggttctctctaacaatgctgctcaagcctgttttaaagttaatgtcagtaatttgatttgattgttccttccaggtgtctcaaaggctgttgagcacatcaataaaactattgcgcctgccctggttagcaaggtaggacctgcctcctgataactaatgtgtctaatgccaccagagcgtctcccaggcccaggggctttcctgtttatggaagagcttattctgagagctgtagaagcctattggattccctgtcacgcacgagaacaatccatgcatgacataattctaacctgcccgctgcctcaccccacttttgggagcagatggaattgcatcagaagaatgagacacttcgagccctgaggtttcttcccccctgcaactctctggacctttgaagaaattaagatccagattttaagagtggctctcaggggtgtttgtggtagtgtccatggtgactaatttctcatgaactttggaattatttactataattctactgactttaacagtggagttcctgttaagtaaaatctggaaatctcagta

SEQ ID NO: 2503 - protein, 124 aa, Homo sapiens; identical to SEQ ID NO: 2461

SEQ ID NO: 2504 - DNA, 1138 bp, Homo sapiens
ggcgcacgtggccccggacacgcagcgctgcggcggggccagcgccccaaccccggagtggggccgaggcgcgcagcctctcaacgactcgacgccaacggggtctctcggatcgcggcgcgaggcaggaggggcggggcaggagggccgcggcaggcccgggccgccaaagttgtcagcaaggtcgagggccggacgtggggccccagagcgacgctgagtgcgtgcgggactcggagtacgtgacggagccccgagctctcatgcccgccacgccgccccgggccatcccccggagccccggctccgcacaccccagttcggctcaccggtcctatctggggccagagtttcgcccgcaccactacagggccgctggggagtcggggccccccagatctgcccgcctcaagtccgcgggacgtcacccccctttccacgctactgcagccgtcgcagtcccacccctttccgggaggtgagggaatgagtgacggctctcccgacgaatggcgaggcggagctgagggggcgtgccccggaggcgggaagtgggtggggctcgccttagctaggcaggaagtcggcgcgggcggcgcggacagtatctgtgggtacccggagcacggagatctcgccggctttacgttcacctcggtgtctgcagcaccctccgcttcctctcctaggcgacgagacccagtggctagaagttcaccatgtctattctcaagatccatgccagggagatctttgactctcgcgggaatcccactgttgaggttgatctcttcacctcaaaaggtctcttcagagctgctgtgcccagtggtgcttcaactggtatctatgaggccctagagctccgggacaatgataagactcgctatatggggaaggagcgtctcccaggcccaggggctttcctgtttatggaagagcttattctgagagctgtagaagcctattggattccctgtcacgcacgagaacaatccatgcatgacataattctaacctgcccgctgcctcaccccacttttgggagcagatggaattgcatcagaagaatgagacacttcgagccctgaggtttcttcccccctgcaactctctggacctttgaagaaattaagat

SEQ ID NO: 2505 - protein, 124 aa, Homo sapiens; identical to SEQ ID NO: 2461

SEQ ID NO: 2506 - DNA, 822 bp, Homo sapiens
atgaatggttcacaagaatccagcaaggagaaagggacagggtcaccttggcgggtgccaggcggagcccggccagacgggcgcggctggagggcagcgcgcaggcgcaggcggcgcacgtggccccggacacgcagcgctgcggcggggccagcgccccaaccccggagtggggccgaggcgcgcagcctctcaacgactcgacgccaacggggtctctcggatcgcggcgcgaggcaggaggggcggggcaggagggccgcggcaggcccgggccgccaaagttgtcagcaaggtcgagggccggacgtggggccccagagcgacgctgagtgcgtgcgggactcggagtacgtgacggagccccgagctctcatgcccgccacgccgccccgggccatcccccggagccccggctccgcacaccccagttcggctcaccggtcctatctggggccagagtttcgcccgcaccactacagggccgctggggagtcggggccccccagatctgcccgcctcaagtccgcgggacgtcacccccctttccacgctactgcagccgtcgcagtcccacccctttccgggaggtgagggaatgagtgacggctctcccgacgaatggcgaggcggagctgagggggcgtgccccggaggcgggaagtgggtggggctcgccttagctaggcaggaagtcggcgcgggcggcgcggacagtatctgtgggtacccggagcacggagatctcgccggctttacgttcacctcggtgtctgcagcaccctccgcttcctctcctaggcgacgagacccagtggctag

SEQ ID NO: 2507 - protein, 197 aa, Homo sapiens
MNGSQESSKEKGTGSPWRVPGGARPDGRGWRAARRRRRRTWPRTRSAAAGPAPQPRSGAEARSLSTTRRQRGLSDRGARQEGRGRRAAAGPGRQSCQQGRGPDVGPQSDAECVRDSEYVTEPRALMPATPPRAIPRSPGSAHPSSAHRSYLGPEFRPHHYRAAGESGPPRSARLKSAGRHPPFHATAAVAVPPLSGR

SEQ ID NO: 2508 - DNA, 456 bp, Homo sapiens
gacggctgcagtagcgtggaaaggggggtgacgtcccgcggacttgaggcgggcagatctggggggccccgactccccagcggccctgtagtggtgcgggcgaaactctggccccagataggaccgggaactagatcaaacctacctggattcttgtgaaccattcatgtgaattatttggaactggaatttcacacagacccggggaatttctcaaagttcaagacgggtcatattccgtggaatacggaaggagttggagtgatttcacttttctgatcaagaactgatagccattaaaactcagctccgcaatatatccccccactccaagggagggctgagatgatcacttcgttttctgttacggctacttttatatttttcaacattactgctggtctgtaagagaactaaaacatctgattttcctcatttccttgtaaagaggtgttc

SEQ ID NO: 2509 - protein, 52 aa, Homo sapiens
DGCSSVERGVTSRGLEAGRSGGPRLPSGPVVVRAKLWPQIGPGTRSNLPGFL

SEQ ID NO: 2510 - DNA, 729 bp, Homo sapiens
catgcccaagagaaaggctgaaggggatgctaaaggaggtaaagccaaggtgaaggacgaaccacagagaaggtctgcaaggttgtctgctaaacctgctcctccaaagccagagcccaagcctaaaaagacccctgcaaagaaggcagagaaggtacccaaagggaaaaagggaaaagctgatgtttgacacacatggccaccttggcacaaaagccttgtggtgtggaaaaacaaatttgtttttatgtcctcttctccctttccatctttcagcatagacttaactcctttaatcccaggcatctgttgggacctgacccctagtcattggttaccagtgtgtcaggcaatctggactttccagtgatgccactgagatggcacctgtcaaaagagcagtggttccatttctagattgtggatcttcagataaattctgccattttcatttcacttcctgaaagtcagagtcggcttgtgaaaagttgttaaacaacatgctaaatgtgaaatgtcaaccctcactctaaactttccctgttcagagcatgagatgaagacttctttgggttttatagcggctttctgatttttcgtagtccattgaagaagggagtttgaaagttgttgtatactgttaacaattgtctgcccatgtcctgcctgaaataccatgattgtttatggaaagtatctttaataaagctggatacagtttggcttgga

SEQ ID NO: 2511 - protein, 62 aa, Homo sapiens
MPKRKAEGDAKGGKAKVKDEPQRRSARLSAKPAPPKPEPKPKKTPAKKAEKVPKGKKGKADV

SEQ ID NO: 2512 - DNA, 1334 bp, Homo sapiens
cttcattacagatgtgcagcaccatgagggccctggtgcttctgctgtccctgttcctgctgggtggccaggcccagcatgtgtctgactggacctactcagaaggggcactggacgaagcgcactggccacagcactaccccgcctgtgggggccagagacagtcgcctatcaacctacagaggacgaaggtgcggtacaacccctccttgaaggggctcaatatgacaggctatgagacccaggcaggggagttccccatggtcaacaatggccacacagtgcagatcagcctgccctccaccatgcgcatgacagtggctgacggcactgtatacatagcccagcagatgcactttcactggggaggtgcgtcctcggagatcagcggctctgagcacaccgtggacgggatcagacatgtgatcgagattcacattgttcactacaattctaaatacaagagctatgatatagcccaagatgcgccggatggtttggctgtactggcagccttcgttgaggtgaagaattaccctgaaaacacttattacagcaacttcatttctcatctggccaacatcaagtacccaggacaaagaacaaccctgactggccttgacgttcaggacatgctgcccaggaacctccagcactactacacctaccatggctcactcaccacgcctccctgcactgagaacgtccactggtttgtgctggcagattttgtcaagctctccaggacacaggtttggaagctggagaattccttactggatcaccgcaacaagaccatccacaacgattaccgcaggacccagcccctgaaccacagagtggtggaatccaacttcccgaatcaggaatacactctaggctctgaattccagttttacctacataagattgaggaaattcttgactacttaagaagagcattgaactgaggaaagctaagaggaagattcaatattaactagcttgaagcctgacctagccagaagtgcctgtccgctgcagccgcaccctaccttgtctaagaaaccatgtgtgtctggaacacgctgctccccctggggcagctgttgggattctgattaaaagaggggaaacgatcatcctggacaggaagtgagatggcttcagttcatgagacgggatctgagttagacatcaccagtggaaattgattggaatagaaacttaaaggaaatggaaccctaactattctcccatcaaatcatatatgttgacctgtctgaattataaaccagcctgacctttcctttagcattagatgtaataaaataactttggaaatttgtcattta

SEQ ID NO: 2513 - protein, 312 aa, Homo sapiens
MCSTMRALVLLLSLFLLGGQAQHVSDWTYSEGALDEAHWPQHYPACGGQRQSPINLQRTKVRYNPSLKGLNMTGYETQAGEFPMVNNGHTVQISLPSTMRMTVADGTVYIAQQMHFHWGGASSEISGSEHTVDGIRHVIEIHIVHYNSKYKSYDIAQDAPDGLAVLAAFVEVKNYPENTYYSNFISHLANIKYPGQRTTLTGLDVQDMLPRNLQHYYTYHGSLTTPPCTENVHWFVLADFVKLSRTQVWKLENSLLDHRNKTIHNDYRRTQPLNHRVVESNFPNQEYTLGSEFQFYLHKIEEILDYLRRALN

SEQ ID NO: 2514 - DNA, 547 bp, Homo sapiens
attacagatgtgcagcaccatgagggccctggtgcttctgctgtccctgttcctgctgggtggccaggcccagcatgtgtctgactggacctactcagaaggggcactggacgaagcgcactggccacagcactaccccgcctgtgggggccagagacagtcgcctatcaacctacagaggacgaaggtgcggtacaacccctccttgaaggggctcaatatgacaggctatgagacccaggcaggggagttccccatggtcaacaatggccacacagtgcagatcagcctgccctccaccatgcgcatgacagtggctgacggcactgtatacatagcccagcagatgcactttcactggggaggtgcgtcctcggagatcagcgaacgtccactggtttgtgctggcagattttgtcaagctctccaggacacaggtttggaagctggagaattccttactggatcaccgcaacaagaccatccacaacgattaccgcaggacccagcccctgaaccacagagtggtggaatccaacttcccgaa

SEQ ID NO: 2515 - protein, 179 aa, Homo sapiens
MCSTMRALVLLLSLFLLGGQAQHVSDWTYSEGALDEAHWPQHYPACGGQRQSPINLQRTKVRYNPSLKGLNMTGYETQAGEFPMVNNGHTVQISLPSTMRMTVADGTVYIAQQMHFHWGGASSEISERPLVCAGRFCQALQDTGLEAGEFLTGSPQQDHPQRLPQDPAPEPQSGGIQLP

SEQ ID NO: 2516 - DNA, 1001 bp, Homo sapiens
attacagatgtgcagcaccatgagggccctggtgcttctgctgtccctgttcctgctgggtggccaggcccagcatgtgtctgactggacctactcagattcacattgttcactacaattctaaatacaagagctatgatatagcccaagatgcgccggatggtttggctgtactggcagccttcgttgaggtgaagaattaccctgaaaacacttattacagcaacttcatttctcatctggccaacatcaagtacccaggacaaagaacaaccctgactggccttgacgttcaggacatgctgcccaggaacctccagcactactacacctaccatggctcactcaccacgcctccctgcactgagaacgtccactggtttgtgctggcagattttgtcaagctctccaggacacaggtttggaagctggagaattccttactggatcaccgcaacaagaccatccacaacgattaccgcaggacccagcccctgaaccacagagtggtggaatccaacttcccgaatcaggaatacactctaggctctgaattccagttttacctacataagattgaggaaattcttgactacttaagaagagcattgaactgaggaaagctaagaggaagattcaatattaactagcttgaagcctgacctagccagaagtgcctgtccgctgcagccgcaccctaccttgtctaagaaaccatgtgtgtctggaacacgctgctccccctggggcagctgttgggattctgattaaaagaggggaaacgatcatcctggacaggaagtgagatggcttcagttcatgagacgggatctgagttagacatcaccagtggaaattgattggaatagaaacttaaaggaaatggaaccctaactattctcccatcaaatcatatatgttgacctgtctgaattataaaccagcctgacctttcctttagcattagatgtaataaaataactttggaaatttgtcattta

SEQ ID NO: 2517 - protein, 180 aa, Homo sapiens
MCLTGPTQIHIVHYNSKYKSYDIAQDAPDGLAVLAAFVEVKNYPENTYYSNFISHLANIKYPGQRTTLTGLDVQDMLPRNLQHYYTYHGSLTTPPCTENVHWFVLADFVKLSRTQVWKLENSLLDHRNKTIHNDYRRTQPLNHRVVESNFPNQEYTLGSEFQFYLHKIEEILDYLRRALN

SEQ ID NO: 2518 - DNA, 1176 bp, Homo sapiens
gcaccatgagggccctggtgcttctgctgtccctgttcctgctgggtggccaggcccagcatgtgtctgactggacctactcagaaggggcactggacgaagcgcactggccacagcactaccccgcctgtgggggccagagacagtcgcctatcaacctacagaggacgaaggtgcggtacaacccctccttgaaggggctcaatatgacaggctatgagacccaggcaggggagttccccatggtcaacaatggccacacagattggcaggcggaactcttcctcccctccttgtcctctccttgtggagaaggggcgaagcacaaaggccaaaggcagtggctttgttcaccctccctggacagctggtgggaagcaatcattgatggaggatctctatgggcaacgcttgctgagtgcgggcttcgtgctgagggcccagaagagggaaggcatatggaagagaagagcccagcttcccaaggggcttgcagcggctcccgcctcccaatttccagaggaccctgtaccttcttcctttagggctctgctcaaatttctgtggtccggaagcctgttcctttggggttctcacctcacacgacagcatgtcggacattagagtggacccaaagttcacattaattatatatatattaaaaacaatttttttttttgagatggagtcttgctctgtcaccccggctggagtgcagtggtgcaatcttggctcactgaaacctccacttcccagattcaagcaattctcctgcctcagcttccctggtacctgggactacaggcatgtgccaccacgcccagctaatttttgtatttttagtagagatgcggttttgtcatactggccagtctggtctcgaactccttgcctcaagtgctctgcccaccttggcctcccaaagtgttgagattatatgcataagccaccgtgcccagcctgatataaagtattttgaaagatttttataatttagcttttgaagttatttggctattgccattggctacttttcagcaagctccaagcacattcaggaattctactgaagggggaaaaaaagctaatctacaaactttgaatctaatgagattttgatgaacactaagcttaacagtaaagttgacatgacgtattaaagatttgttaattttt

SEQ ID NO: 2519 - protein, 179 aa, Homo sapiens
MRALVLLLSLFLLGGQAQHVSDWTYSEGALDEAHWPQHYPACGGQRQSPINLQRTKVRYNPSLKGLNMTGYETQAGEFPMVNNGHTDWQAELFLPSLSSPCGEGAKHKGQRQWLCSPSLDSWWEAIIDGGSLWATLAECGLRAEGPEEGRHMEEKSPASQGACSGSRLPISRGPCTFFL

SEQ ID NO: 2520 - DNA, 269 bp, Homo sapiens
ccggggccgcgacgcgtctctccagcccgggatccggggagctgggctgtccccagaccgacgggacagcggcatctcctccacctgaaaaggaaagaggaccagtttgcaggactccgaactgggcccgcgagatctccacctgcgcaaaacgaaagggcggattctccttggactcacgaggcaaccgctccccggggtgagaacgggggactcattcctccggcactgggagaagacgattctttaggaggaggacagggaagcga

SEQ ID NO: 2521 - protein, 88 aa, Homo sapiens
PGPRRVSPARDPGSWAVPRPTGQRHLLHLKRKEDQFAGLRTGPARSPPAQNERADSPWTHEATAPRGENGGLIPPALGEDDSLGGGQG

SEQ ID NO: 2522 - DNA, 5684 bp, Homo sapiens
tgaggcctgaggcctggggcggggtggcggccgggctggccttggcctcgcgccttcccctgcggccgccgcgggctccgcgggcggtatcggagtgtcgtgcggcgcgtggccgcgtgacacgcgcacttgtcggagtgacgggccctgcggaagaggaggtgcggcccagggcgcaggggagccctcgggagcgggcccggccctcagcgccgccccggccgtgtcccggaggagcggcctgcgccgccgcgcgagaggaagcacccaggcatgtggaatatgctcatagtggcgatgtgcttggcccttctgggctgcctgcaagcccaggagctccagggacatgtctccataatcctgctgggagcaactggggacctggctaagaagtacttatggcagggactgttccagctgtacctggatgaagcggggaggggtcacagttttagcttccatggagctgctctgacagcccccaagcagggtcaagagctcatggccaaggccctggaatccctctcctgccccaaggacatggcacccagtcactgtgcagagcacaaggatcagttcctgcagctgagccagtaccgccaactgaagacggccgaggactatcaggccctgaacaaggacatcgaggcacagctccagcacgcaggcctccgggaggctggcaggatcttctacttctcagtgccacccttcgcctatgaagacattgcccgcaacatcaacagtagctgccggccaggcccgggcgcctggctgcgggttgtccttgagaaaccctttggccatgaccacttctcagcccagcagctggccacagaactcgggacctttttccaggaggaggagatgtaccgggtggaccattacttaggcaagcaggctgtggcgcagatcctgcctttccgagaccagaaccgcaaggctttggacggcctctggaaccggcaccatgtggagcgggtggagatcatcatgaaagagaccgtggatgctgaaggccgcaccagcttctatgaggagtacggtgtcattcgcgacgtcctccagaaccatctgacggaggtcctcaccctcgtggccatggagctgccccacaatgtcagcagtgcggaggctgtgctgcggcacaagcttcaggtcttccaggcgctgcggggcctgcagaggggcagtgccgtcgtgggccagtaccagtcttacagtgagcaggtgcgcagagagctgcagaagccagacagcttccacagcctgacgccgaccttcgcagccgtcctagtgcacattgacaaccttcgctgggagggcgtgcctttcatcctgatgtctggcaaagccttggacgagagagtgggctacgctcggatcttgttcaagaaccaggcctgctgtgtgcagagcgaaaagcactgggccgcggcgcagagccagtgcctgccccggcagctcgtcttccacatcggccatggcgacctgggcagccctgccgtgctggtcagcaggaacctgttcaggccctccctgccctccagctggaaggaaatggagggaccacctgggctccgccttttcggcagccctctgtccgattactacgcctacagccctgtgcgggagcgggacgcccactccgtcctcttatcccatatcttccatggccggaagaatttcttcatcaccacagagaacttgctggcctcctggaacttctggacccctctgctggagagcctggcccataaggccccacgcctctaccctggaggagctgagaatggccgtctgttggactttgagttcagtagcggccggttgttcttttcccagcagcagccggagcagctggtgccagggccagggccggccccaatgcccagtgacttccaggtcctcagggccaagtaccgagagagcccgctggtctccgcctggtccgaggagctgatctctaagctggctaatgacatcgaggccaccgctgtgcgagccgtgcggcgctttggccagttccacctggcactgtcggggggctcgagccccgtggccctgttccagcagctggccacggcgcactatggcttcccctgggcccacacgcacctgtggctggttgacgagcgctgcgtcccactctcagacccggagtccaacttccagggcctgcaggcccacctgctgcagcacgtccggatcccctactacaacatccaccccatgcctgtgcacctgcagcagcggctctgcgccgaggaggaccagggcgcccagatctatgccagggagatctcagccctggtggccaacagcagcttcgacctggtgctgctgggcatgggtgccgacgggcacacagcctccctcttcccacagtcacccactggcctggatggcgagcagctggtcgtgctgaccacgagcccctcccagccacaccgccgcatgagccttagcctgcctctcatcaaccgcgccaagaaggtggcagtcctggtcatgggcaggatgaagcgtgagatcaccacgctggtgagccgggtgggccatgagcccaagaagtggcccatctcgggtgtcctgccgcactccggccagctggtgtggtacatggactacgacgccttcctgggatgagggcgcctgtgccccttgcccgcttcgctcctgtgctttccttcgcccgtgtcttccctcccttctcggccccgccacctgcccagcgtgccctggctctccagaaccttctatcccacagtcaggccccagagagggcaggacaagccttgtcccgatgcctttgaccggcagctctgtgtattggtggatagatgcagaaacaaggaagaaatggagtctgctcctgagaagcttcaaattcaggccaggagagaagtcttaagaaaagacctccagcagttacacattcatatcaaccagcacaacacgggatggcgcccaaactccggcgttcacaagaggagacgtgacgtggtgggctgaggttaatcagggaaggtttcctgggggaggtgatccttgaactggctcccggggaacattcagagcatgattggtagacagaagggtgcagaggcgcccaggggagtacattgccccgtgcaaagcaggggcattggggactgtcttgagaccctgagggggtcaagcccctccttccccagctgcccctccttctagaacctctgcacatctagcctctggccctcctcttcactgcctccacctgctcccgcttgccatccctgtctcctccatcctggctgtgcagtaggaattccaggctcctccctgtgtctttgctgttcttcagactccatttatagagaatgagggctgataacaggaatacagtggcaaagactagactgtggaaagggttccagaaatcttttttcttttttaattaaaaaaaatatttgcagagatgagctcttgctatgttgcccaggctggtctcaaactcctgggctcaagcgatcctcccatctcagcctcccagagtgctgggattacaggtgtgagctactgcgcccagccccagaaatctcagtgctgtttggagctccatttctcatttgatgacttgctctgcgtggggaggtggggtctcattcccccaacttcctcagggaggacccctgccctccgctgctcctctgtcctgctagccttcctccaggaagcacactgggtgcagataatcaggacattccagagatccccaatttaagagggtcatttccatctcaggggactcccggatgggtgtttccgctctcaatagcccctcttgttttaccaggaaagatccagttaaatcacccactgaggtgacagctcattagcggggagagagatggagcatcgagtgacactgggccatccaggcggctctgctcccaccagacaggagctaggcctcactggcaggggggctgcccacagccttttcaggggctcgcttggcgggtgacggggccgcagccaggccttctctccctgccccttggtgaccccgtggcttcctgtctgctggcctctcctgctacttatcacttcaccacgaactctctgcctgagactggggaagtaagcgggtatcttctcagtgagcataggttggggactgtgatcttgagaagccatgggccagcaatacctgcttttctgaagcccccaaggagggctctgacattctttttaaaaacaccacaaagcaaaattcccaggacatgtgtagttttgtttgttcagtatcccacaacttaaggctgggagatggaactcttggttaaggtcgatttttctgtctggcttctccgcaccttccacttgctctctggatcaggcagatataaactttctagcgcattttgagagagggctttcttgggtgagggagcatggcaaagtcggtttctctctggactgtttacacttcaaggcggtggatttagaggaatcctggctttcattttcaatgccagtctgagacatgttcccaagccggggctcttgttcacaccacttactctggccaccaacaacaacccaggccagacagagcatctcttttttttttttttgagacagagtctctgtcgcccaggctggagcccagtggcgagatcttggctcactacaacctccacctcccgggttcaggcaattctcgtgcctaagcctcccgagtagctgcgactacaggcgccggccagcatgcctgtctaatttttgtattttagtagagacagggtttcaccatgttgcccaggctggtctcgaactcctgagctcaggcagtctacccacctcagcctcccaaagtgctgggattacaggcgtgagccaccgcgcccagccagaacatctgtttttacacccagagagcgcccctcgttaggacagaaccacggtgcccagagccaggaagccgccctcctggcgcccagcatctgagcttctacacgtgatgggcgggctcaggagaggacagggagtcgtggtggaagttccacagctggccgcgtgggggggcccttgcaccgcactgccgcctcctgactgcccctatccccgcagcccctgtgccggatttcatttccctcctctctcccagggtacctggccccagcactctcccatctgttcttcaggaaccgactcctctccagttgcaacaccagggagaaaggggcctccacatgcccaagtacccctgcaggatgaagggcaggccggcccttgatgtgccatttctgaataatagtcactgccgccgagtctaggatgtcctgttctaactcagccctgcctcggatgcaccaccgatctgtgcagagtgggtgtgggagtgtgggtgagggtcgaaatgccaaaggtctactttccagaatcaagtgccttctgcaaatcatgttggaaaagtccaaacctggagatgtccctgtgcctccgcccctacccaccccttttccttcagctgtgttaggaaggagaagttttcagaaccctctaggctggtggctttcaaacttcagaccatgatctgcagcaagaaacgtgccttccatcataaatcagtccatttgtttacaactgtgttccaagcaggtttcataaagaaattcttaaccttagaacctcgg

SEQ ID NO: 2523 - protein, 791 aa, Homo sapiens; identical to SEQ ID NO: 35

SEQ ID NO: 2524 - DNA, 9117 bp, Homo sapiens; identical to SEQ ID NO: 34

SEQ ID NO: 2525 - protein, 791 aa, Homo sapiens; identical to SEQ ID NO: 35

SEQ ID NO: 2526 - DNA, 913 bp, Homo sapiens
ctgctttccagtccctgtccttggcccttcaagcgttttttcctcaaccggcaatcgctcgtctggagagaaggagaagctgcaaggtcagtgcaggagagaggcagcaagaaatctgaagcccagagaacagcctggagaaggaggagccgccagctggcaggctgcgcttcagagctgctgatcggatcctggtagccagggctctggacgtgcctggtacaaagggaggagctaagcctccagagtcctggcatgggcaggtgggggagccccaagggccagcacctctgcccccaccccagaagactgcagacagctgtgacggatggccacctggcctgaactgactcctggccctctctttaatcctgttctgactctgaggacattctgatgcagaaggaagaggacctgaagtgctgacagctggtccaagagcacactttgagtagtgagactccggaatactgagcagcgagcaccagagcagcagttctcatcaaaggagggcatcagaacaaacacgcggtcctcgcctcctgctccctttctcaagacagagacattctgatccagtaggtgtagggtgggtcctaacacaggtgtttcgaaacagtctcaaatggtttcatgcgcccatccccttgtaaaaactggttgttcctgaatccaataataatacctatgttaaccaagtagtcggcgtgtgccagatgacttaaacgcacctttccaatcattcctcacaacagtcttgtggaggaggttctgtgaggagtctcattctacagacgaggaaactgggaggtgaaggaaactgtcaagccacaaagcctggaccctcagtcacgatgctaaacagcttcctttgtcaagcagaagaaggaagcattggggtccaaggacctgg

SEQ ID NO: 2527 - protein, 76 aa, Homo sapiens
SPENSLEKEEPPAGRLRFRAADRILVARALDVPGTKGGAKPPESWHGQVGEPQGPAPLPPPQKTADSCDGWPPGLN

SEQ ID NO: 2528 - DNA, 456 bp, Homo sapiens
tccagagagacctgggtttgagccctaccacgctcattgagatgaatggcatcaggcttttcgccaggcatcttcagcagcgtaaaagtgccctctgcccgaggagatgctcagctacgcccgggatgacacccattacctgctatatatctatgacaaaatgaggctggagatgtgggagcgcggcaacgggcagccggtgcagctgcaggtggtgtggcaacggagcagggacatctgcctcaagaaattcatcaaacctatcttcacggatgagtcctaccttgaactctataggaagcagaagaagcaccttaacacacagcagttgacagcctttcagctgctgtttgcctggagggataaaacagctcgcagggaagatgaaagttacgggtaagggattagaggttcttttaatacttgtttccagactgaggagatctaataacaagt

SEQ ID NO: 2529 - protein, 97 aa, Homo sapiens
MLSYARDDTHYLLYIYDKMRLEMWERGNGQPVQLQVVWQRSRDICLKKFIKPIFTDESYLELYRKQKKHLNTQQLTAFQLLFAWRDKTARREDESYG

SEQ ID NO: 2530 - DNA, 487 bp, Homo sapiens
ttgtattaagggcatcccatctctaatttcaggagagtgaatctatctcttgagctgcctgataattcggtgcctccctcacaagagctcttccaggagttcacttcacaaatgtgtactgagttcccactctgtgttaaccagaatggttccagcgatgtctgcaggaaacaacgtctgcttggaggagttcagagggtactggagggaggaagcacagttggagctagacgctttcttcaggagcttacctggcgcatgcgtggtgcgcacgcgtcccgtctcctcggccgacaagctctcgcgagacgagccgtgcaggctgaaaaaatggcgccacccagtacccgggagcccagggtcctgtcggcgaccagcgcaaccaaatccgacggagagatggtgctgccaggcttcccggacgccgacagctttgtgaaggtgagttcgcggggcctcgggggtaccaggagtcgcccgcggccgc

SEQ ID NO: 2531 - protein, 124 aa, Homo sapiens
MCTEFPLCVNQNGSSDVCRKQRLLGGVQRVLEGGSTVGARRFLQELTWRMRGAHASRLLGRQALARRAVQAEKMAPPSTREPRVLSATSATKSDGEMVLPGFPDADSFVKVSSRGLGGTRSRPR

SEQ ID NO: 2532 - DNA, 440 bp, Homo sapiens
ttaactggatatgctgaacatttattgaagacttaatgggtggaatgaattgtattaagggcatcccatctctaatttcaggagagtgaatctatctcttgagctgcctgataattcggtgcctccctcacaagagctcttccaggagttcacttcacaaatgtgtactgagttcccactctgtgttaaccagaatggttccagcgatgtctgcaggaaacaacgtctgcttggaggagttcagagggtactggagggaggaagcacagttggagctagacgctttcttcaggagcttacccgggagcccagggtcctgtcggcgaccagcgcaaccaaatccgacggagagatggtgctgccaggcttcccggacgccgacagctttgtgaaggtgagttcgcggggcctcgggggtaccaggagtcgcccgcggccgc

SEQ ID NO: 2533 - protein, 92 aa, Homo sapiens
MCTEFPLCVNQNGSSDVCRKQRLLGGVQRVLEGGSTVGARRFLQELTREPRVLSATSATKSDGEMVLPGFPDADSFVKVSSRGLGGTRSRPR

SEQ ID NO: 2534 - DNA, 364 bp, Homo sapiens
aactggatatgctgaacatttattgaagacttaatgggtggaatgaattgtattaagggcatcccatctctaatttcaggagagtgaatctatctcttgagctgcctgataattcggtgcctccctcacaagagctcttccaggagttcacttcacaaatgtgtactgagttcccactctgtgttaaccagaatggttccagcgatgtctgcaggaaacaacgtctgcttggaggagttcagagggtactggagggaggaagcacagttggagctagacgctttcttcaggagcttaccagagcgctcgaaagtgccaccctaatcgcaggcttcccaacctaatcgcaggcttcccaacctaa

SEQ ID NO: 2535 - protein, 61 aa, Homo sapiens
MCTEFPLCVNQNGSSDVCRKQRLLGGVQRVLEGGSTVGARRFLQELTRALESATLIAGFPT

SEQ ID NO: 2536 - DNA, 684 bp, Homo sapiens
ctgaggcttttgtactttagtaaatgcttccactaaactgaaaccatggtgagaaagtttgactttgttaaatattttgaaatgtaaatgaaaagaactactgtatattaaaagttggtttgaaccaactttctagctgctgttgaagaatatattgtcagaaacacaaggcttgatttggttcccaggacagtgaaacatagtaataccacgtaaatcaagccattcattttggggaacagaagatccataactttagaaatacgggttttgacttaactcacaagagaactcatcataaacccagtgatgctgcgactcacacgcttcaattcaagacctgaccgctagtagggaggtttattcagatcgctggcagcctcggctgagcagatgcacagaggggatcactgtgcagtgggaccaccctcactggccttctgcagcagggttctgggatgttttcagtggtcaaaatactctgtttagagcaagggctcagaaaacagaaatactgtcatggaggtgctgaacacagggaaggtctggtacatattggaaattatgagcagaacaaatactcaactaaatgcacaaagtataaagtgtagccatgtctagacaccatgttgtatcagaataatttttgtgccaataaatgacatcagaattttaaacatatgt

SEQ ID NO: 2537 - protein, 50 aa, Homo sapiens
MFSVVKILCLEQGLRKQKYCHGGAEHREGLVHIGNYEQNKYSTKCTKYKV

SEQ ID NO: 2538 - DNA, 1430 bp, Homo sapiens
agaaagcattacagaattgaccataacctgcgtgaaatagtcagagagcaggagactctgccgtggagcctgcgggtgctttcgtgtggagtagggctgtggagattcagaaaaggggacttcactgtgaaccgtagctgcgaagagagcacttgggttggtggcatctaaccatcacttcacctgacaaaggaaattttggacggtgtggaacttggagagccagcccataagaaaacggggaccacagtgccagaatctattcattctttcattggagacggtttggtgaaaccagaggccctaaataagaaagctatccagattattaacagggttcgagataagctcactggtcgggacttctctcatgatgacactttggatgttccaacgcaagttgagctgctcatcaaacaagcgacatcccatgaaaacctctgccagtgctatattggctggtgccctttctggtaactggaggcccagatgtgcccatcacgttttttctgaggcttttgtactttagtaaatgcttccactaaactgaaaccatggtgagaaagtttgactttgttaaatattttgaaatgtaaatgaaaagaactactgtatattaaaagttggtttgaaccaactttctagctgctgttgaagaatatattgtcagaaacacaaggcttgatttggttcccaggacagtgaaacatagtaataccacgtaaatcaagccattcattttggggaacagaagatccataactttagaaatacgggttttgacttaactcacaagagaactcatcataagtacttgctgatggaagaatgacctagttgctcctctcaacatgggtacagcaaactcagcacagccaagaagcctcaggtcgtggagaacatggattaggatcctagactgtaaagacacagaagatgctgacctcacccctgccacctatcccaagacctcactggtctgtggacagcagcagaaatgtttgcaagataggccaaaatgagtacaaaaggtctgtcttccatcagacccagtgatgctgcgactcacacgcttcaattcaagacctgaccgctagtagggaggtttattcagatcgctggcagcctcggctgagcagatgcacagaggggatcactgtgcagtgggaccaccctcactggccttctgcagcagggttctgggatgttttcagtggtcaaaatactctgtttagagcaagggctcagaaaacagaaatactgtcatggaggtgctgaacacagggaaggtctggtacatattggaaattatgagcagaacaaatactcaactaaatgcacaaagtataaagtgtagccatgtctagacaccatgttgtatcagaataatttttgtgccaataaatgacatcagaattttaaacatatgt

SEQ ID NO: 2539 - protein, 52 aa, Homo sapiens
MMTLWMFQRKLSCSSNKRHPMKTSASAILAGALSGNWRPRCAHHVFSEAFVL

SEQ ID NO: 2540 - DNA, 1612 bp, Homo sapiens
ctggtttcctgtggatcacagtcctgccctgattccttctcctaagacattctcaccctgatacgtcaacatggcctgtgtctgcttcctaagtgagggtaacagaccccctcggcttgctttgggtggagagttagtaactcctgtggtgagtggctctgtcccatttctaggttacaggcctggatggcaactacagaatcacatgccacacagtgatggaggtgctgcgagagcacaaggacagtgtcatggccgtgctggaagcctttgtctatgaccccttgctgaactggaggctgatggacacaaataccaaaggcaacaagcgatcccgaacgaggacggattcctactctgctggccagtcagtcgaaattttggacggtgtggaacttggagagccagcccataagaaaacggggaccacagtgccagaatctattcattctttcattggagacggtttggtgaaaccagaggccctaaataagaaagctatccagattattaacagggttcgagataagctcactggtcgggacttctctcatgatgacactttggatgttccaacgcaagttgagctgctcatcaaacaagcgacatcccatgaaaacctctgccagtgctatattggctggtgccctttctggtaactggaggcccagatgtgcccatcacgttttttctgaggcttttgtactttagtaaatgcttccactaaactgaaaccatggtgagaaagtttgactttgttaaatattttgaaatgtaaatgaaaagaactactgtatattaaaagttggtttgaaccaactttctagctgctgttgaagaatatattgtcagaaacacaaggcttgatttggttcccaggacagtgaaacatagtaataccacgtaaatcaagccattcattttggggaacagaagatccataactttagaaatacgggttttgacttaactcacaagagaactcatcataagtacttgctgatggaagaatgacctagttgctcctctcaacatgggtacagcaaactcagcacagccaagaagcctcaggtcgtggagaacatggattaggatcctagactgtaaagacacagaagatgctgacctcacccctgccacctatcccaagacctcactggtctgtggacagcagcagaaatgtttgcaagataggccaaaatgagtacaaaaggtctgtcttccatcagacccagtgatgctgcgactcacacgcttcaattcaagacctgaccgctagtagggaggtttattcagatcgctggcagcctcggctgagcagatgcacagaggggatcactgtgcagtgggaccaccctcactggccttctgcagcagggttctgggatgttttcagtggtcaaaatactctgtttagagcaagggctcagaaaacagaaatactgtcatggaggtgctgaacacagggaaggtctggtacatattggaaattatgagcagaacaaatactcaactaaatgcacaaagtataaagtgtagccatgtctagacaccatgttgtatcagaataatttttgtgccaataaatgacatcagaattttaaacatatgt

SEQ ID NO: 2541 - protein, 146 aa, Homo sapiens
MEVLREHKDSVMAVLEAFVYDPLLNWRLMDTNTKGNKRSRTRTDSYSAGQSVEILDGVELGEPAHKKTGTTVPESIHSFIGDGLVKPEALNKKAIQIINRVRDKLTGRDFSHDDTLDVPTQVELLIKQATSHENLCQCYIGWCPFW

SEQ ID NO: 2542 - DNA, 4020 bp, Homo sapiens
ctttctctgtcaggctcctatgctcttcatgtcttcctttgtccactatctggtgacctgtcaaaactttgctcccttgaaatattgtgatgactgctgcttgcccccacttctgcttgccatttctgctctcccctaaatgtacactttatacccagtgcagctctgctttctgggtgaaagtgccagccctgtgcctgctccaggcgtgctttgctggcctcgctctcactcctcgcctgcatgtatcccctgcacggtcacattcatgggcttgtttcccgtgaaccaatctgcacatctctggccttattcttcccccttgccaagtagtccccaccgctgccttcttgtttccctccttgcccttctgcagctctcttccagacctaccccaaatccctcttcttgacaaagctttccaaatgcctgtccttgctactcccattgtgccttgcagagtacctaggtcttcaggtttgtgcgtgagctcccctaggaggccgggagatcccttgaggcaagagctctctcctgctcctcttgctgtgcccttctcgcagtgcactcatagtacgttatatagttagtgctccacaaagtgagtggatcatgttgaatttagtaaaacagccatttctgagtgtctccttgaagtgtttgctttatggacacacagaacaggcaggagcagctgttcctcagcatcgaccttgcgctcctctgagccctgctgttggtcacagctccagtgtctgtccttgcctttctccccaaccaggcctggcatgcgtgggcagtgatgaacttcgaagctgtgctacactacaaacatcagaaccaagcccgcgatgagaagaagaaactgcgtcatgccagcggggccaacatcaccaacgccaccactgccgccaccacggccgccactgccaccaccactgccagcaccgagggcagcaacagtgagagcgaggccgagagcaccgagaacagccccaccccatcgccgctgcagaagaaggtcactgaggatctgtccaaaaccctcctgatgtacacggtgcctgccgtccagggcttcttccgttccatctccttgtcacgaggcaacaacctccaggatacactcagagttctcaccttatggtttgattatggtcactggccagatgtcaatgaggccttagtggagggggtgaaagccatccagattgatacctggctacaggttatacctcagctcattgcaagaattgatacgcccagacccttggtgggacgtctcattcaccagcttctcacagacattggtcggtaccacccccaggccctcatctacccactgacagtggcttctaagtctaccacgacagcccggcacaatgcagccaacaagattctgaagaacatgtgtgagcacagcaacaccctggtccagcaggccatgatggtgagcgaggagctgatccgagtggccatcctctggcatgagatgtggcatgaaggcctggaagaggcatctcgtttgtactttggggaaaggaacgtgaaaggcatgtttgaggtgctggagcccttgcatgctatgatggaacggggcccccagactctgaaggaaacatcctttaatcaggcctatggtcgagatttaatggaggcccaagagtggtgcaggaagtacatgaaatcagggaatgtcaaggacctcacccaagcctgggacctctattatcatgtgttccgacgaatctcaaagcagctgcctcagctcacatccttagagctgcaatatgtttccccaaaacttctgatgtgccgggaccttgaattggctgtgccaggaacatatgaccccaaccagccaatcattcgcattcagtccatagcaccgtctttgcaagtcatcacatccaagcagaggccccggaaattgacacttatgggcagcaacggacatgagtttgttttccttctaaaaggccatgaagatctgcgccaggatgagcgtgtgatgcagctcttcggcctggttaacacccttctggccaatgacccaacatctcttcggaaaaacctcagcatccagagatacgctgtcatccctttatcgaccaactcgggcctcattggctgggttccccactgtgacacactgcacgccctcatccgggactacagggagaagaagaagatccttctcaacatcgagcatcgcatcatgttgcggatggctccggactatgaccacttgactctgatgcagaaggtggaggtgtttgagcatgccgtcaataatacagctggggacgacctggccaagctgctgtggctgaaaagccccagctccgaggtgtggtttgaccgaagaaccaattatacccgttctttagcggtcatgtcaatggttgggtatattttaggcctgggagatagacacccatccaacctgatgctggaccgtctgagtgggaagatcctgcacattgactttggggactgctttgaggttgctatgacccgagagaagtttccagagaagattccatttagactaacaagaatgttgaccaatgctatggaggttacaggcctggatggcaactacagaatcacatgccacacagtgatggaggtgctgcgagagcacaaggacagtgtcatggccgtgctggaagcctttgtctatgaccccttgctgaactggaggctgatggacacaaataccaaaggcaacaagcgatcccgaacgaggacggattcctactctgctggccagtcagtcgaaattttggacggtgtggaacttggagagccagcccataagaaaacggggaccacagtgccagaatctattcattctttcattggagacggtttggtgaaaccagaggccctaaataagaaagctatccagattattaacagggttcgagataagctcactggtcgggacttctctcatgatgacactttggatgttccaacgcaagttgagctgctcatcaaacaagcgacatcccatgaaaacctctgccagtgctatattggctggtgccctttctggtaactggaggcccagatgtgcccatcacgttttttctgaggcttttgtactttagtaaatgcttccactaaactgaaaccatggtgagaaagtttgactttgttaaatattttgaaatgtaaatgaaaagaactactgtatattaaaagttggtttgaaccaactttctagctgctgttgaagaatatattgtcagaaacacaaggcttgatttggttcccaggacagtgaaacatagtaataccacgtaaatcaagccattcattttggggaacagaagatccataactttagaaatacgggttttgacttaactcacaagagaactcatcataagtacttgctgatggaagaatgacctagttgctcctctcaacatgggtacagcaaactcagcacagccaagaagcctcaggtcgtggagaacatggattaggatcctagactgtaaagacacagaagatgctgacctcacccctgccacctatcccaagacctcactggtctgtggacagcagcagaaatgtttgcaagataggccaaaatgagtacaaaaggtctgtcttccatcagacccagtgatgctgcgactcacacgcttcaattcaagacctgaccgctagtagggaggtttattcagatcgctggcagcctcggctgagcagatgcacagaggggatcactgtgcagtgggaccaccctcactggccttctgcagcagggttctgggatgttttcagtggtcaaaatactctgtttagagcaagggctcagaaaacagaaatactgtcatggaggtgctgaacacagggaaggtctggtacatattggaaattatgagcagaacaaatactcaactaaatgcacaaagtataaagtgtagccatgtctagacaccatgttgtatcagaataatttttgtgccaataaatgacatcagaattttaaacatatgt

SEQ ID NO: 2543 - protein, 754 aa, Homo sapiens
MNFEAVLHYKHQNQARDEKKKLRHASGANITNATTAATTAATATTTASTEGSNSESEAESTENSPTPSPLQKKVTEDLSKTLLMYTVPAVQGFFRSISLSRGNNLQDTLRVLTLWFDYGHWPDVNEALVEGVKAIQIDTWLQVIPQLIARIDTPRPLVGRLIHQLLTDIGRYHPQALIYPLTVASKSTTTARHNAANKILKNMCEHSNTLVQQAMMVSEELIRVAILWHEMWHEGLEEASRLYFGERNVKGMFEVLEPLHAMMERGPQTLKETSFNQAYGRDLMEAQEWCRKYMKSGNVKDLTQAWDLYYHVFRRISKQLPQLTSLELQYVSPKLLMCRDLELAVPGTYDPNQPIIRIQSIAPSLQVITSKQRPRKLTLMGSNGHEFVFLLKGHEDLRQDERVMQLFGLVNTLLANDPTSLRKNLSIQRYAVIPLSTNSGLIGWVPHCDTLHALIRDYREKKKILLNIEHRIMLRMAPDYDHLTLMQKVEVFEHAVNNTAGDDLAKLLWLKSPSSEVWFDRRTNYTRSLAVMSMVGYILGLGDRHPSNLMLDRLSGKILHIDFGDCFEVAMTREKFPEKIPFRLTRMLTNAMEVTGLDGNYRITCHTVMEVLREHKDSVMAVLEAFVYDPLLNWRLMDTNTKGNKRSRTRTDSYSAGQSVEILDGVELGEPAHKKTGTTVPESIHSFIGDGLVKPEALNKKAIQIINRVRDKLTGRDFSHDDTLDVPTQVELLIKQATSHENLCQCYIGWCPFW

SEQ ID NO: 2544 - DNA, 8724 bp, Homo sapiens
gctcccggcttagaggacagcggggaaggcgggcggtggggcagggggcctgaagcggcggtaccggtgctggcggcggcagctgaggccttggccgaagccgcgcgaacctcagggcaagatgcttggaaccggacctgccgccgccaccaccgctgccaccacatctagcaatgtgagcgtcctgcagcagtttgccagtggcctaaagagccggaatgaggaaaccagggccaaagccgccaaggagctccagcactatgtcaccatggaactccgagagatgagtcaagaggagtctactcgcttctatgaccaactgaaccatcacatttttgaattggtttccagctcagatgccaatgagaggaaaggtggcatcttggccatagctagcctcataggagtggaaggtgggaatgccacccgaattggcagatttgccaactatcttcggaacctcctcccctccaatgacccagttgtcatggaaatggcatccaaggccattggccgtcttgccatggcaggggacacttttaccgctgagtacgtggaatttgaggtgaagcgagccctggaatggctgggtgctgaccgcaatgagggccggagacatgcagctgtcctggttctccgtgagctggccatcagcgtccctaccttcttcttccagcaagtgcaacccttctttgacaacatttttgtggccgtgtgggaccccaaacaggccatccgtgagggagctgtagccgcccttcgtgcctgtctgattctcacaacccagcgtgagccgaaggagatgcagaagcctcagtggtacaggcacacatttgaagaagcagagaagggatttgatgagaccttggccaaagagaagggcatgaatcgggatgatcggatccatggagccttgttgatccttaacgagctggtccgaatcagcagcatggagggagagcgtctgagagaagaaatggaagaaatcacacagcagcagctggtacacgacaagtactgcaaagatctcatgggcttcggaacaaaacctcgtcacattacccccttcaccagtttccaggctgtacagccccagcagtcaaatgccttggtggggctgctggggtacagctctcaccaaggcctcatgggatttgggacctcccccagtccagctaagtccaccctggtggagagccggtgttgcagagacttgatggaggagaaatttgatcaggtgtgccagtgggtgctgaaatgcaggaatagcaagaactcgctgatccaaatgacaatccttaatttgttgccccgcttggctgcattccgaccttctgccttcacagatacccagtatctccaagataccatgaaccatgtcctaagctgtgtcaagaaggagaaggaacgtacagcggccttccaagccctggggctactttctgtggctgtgaggtctgagtttaaggtctatttgcctcgcgtgctggacatcatccgagcggccctgcccccaaaggacttcgcccataagaggcagaaggcaatgcaggtggatgccacagtcttcacttgcatcagcatgctggctcgagcaatggggccaggcatccagcaggatatcaaggagctgctggagcccatgctggcagtgggactaagccctgccctcactgcagtgctctacgacctgagccgtcagattccacagctaaagaaggacattcaagatgggctactgaaaatgctgtccctggtccttatgcacaaaccccttcgccacccaggcatgcccaagggcctggcccatcagctggcctctcctggcctcacgaccctccctgaggccagcgatgtgggcagcatcactcttgccctccgaacgcttggcagctttgaatttgaaggccactctctgacccaatttgttcgccactgtgcggatcatttcctgaacagtgagcacaaggagatccgcatggaggctgcccgcacctgctcccgcctgctcacaccctccatccacctcatcagtggccatgctcatgtggttagccagaccgcagtgcaagtggtggcagatgtgcttagcaaactgctcgtagttgggataacagatcctgaccctgacattcgctactgtgtcttggcgtccctggacgagcgctttgatgcacacctggcccaggcggagaacttgcaggccttgtttgtggctctgaatgaccaggtgtttgagatccgggagctggccatctgcactgtgggccgactcagtagcatgaaccctgcctttgtcatgcctttcctgcgcaagatgctcatccagattttgacagagttggagcacagtgggattggaagaatcaaagagcagagtgcccgcatgctggggcacctggtctccaatgccccccgactcatccgcccctacatggagcctattctgaaggcattaattttgaaactgaaagatccagaccctgatccaaacccaggtgtgatcaataatgtcctggcaacaataggagaattggcacaggttagtggcctggaaatgaggaaatgggttgatgaactttttattatcatcatggacatgctccaggattcctctttgttggccaaaaggcaggtggctctgtggaccctgggacagttggtggccagcactggctatgtagtagagccctacaggaagtaccctactttgcttgaggtgctactgaattttctgaagactgagcagaaccagggtacacgcagagaggccatccgtgtgttagggcttttaggggctttggatccttacaagcacaaagtgaacattggcatgatagaccagtcccgggatgcctctgctgtcagcctgtcagaatccaagtcaagtcaggattcctctgactatagcactagtgaaatgctggtcaacatgggaaacttgcctctggatgagttctacccagctgtgtccatggtggccctgatgcggatcttccgagaccagtcactctctcatcatcacaccatggttgtccaggccatcaccttcatcttcaagtccctgggactcaaatgtgtgcagttcctgccccaggtcatgcccacgttccttaacgtcattcgagtctgtgatggggccatccgggaatttttgttccagcagctgggaatgttggtgtcctttgtgaagagccacatcagaccttatatggatgaaatagtcaccctcatgagagaattctgggtcatgaacacctcaattcagagcacgatcattcttctcattgagcaaattgtggtagctcttgggggtgaatttaagctctacctgccccagctgatcccacacatgctgcgtgtcttcatgcatgacaacagcccaggccgcattgtctctatcaagttactggctgcaatccagctgtttggcgccaacctggatgactacctgcatttactgctgcctcctattgttaagttgtttgatgcccctgaagctccactgccatctcgaaaggcagcgctagagactgtggaccgcctgacggagtccctggatttcactgactatgcctcccggatcattcaccctattgttcgaacactggaccagagcccagaactgcgctccacagccatggacacgctgtcttcacttgtttttcagctggggaagaagtaccaaattttcattccaatggtgaataaagttctggtgcgacaccgaatcaatcatcagcgctatgatgtgctcatctgcagaattgtcaagggatacacacttgctgatgaagaggaggatcctttgatttaccagcatcggatgcttaggagtggccaaggggatgcattggctagtggaccagtggaaacaggacccatgaagaaactgcacgtcagcaccatcaacctccaaaaggcctggggcgctgccaggagggtctccaaagatgactggctggaatggctgagacggctgagcctggagctgctgaaggactcatcatcgccctccctgcgctcctgctgggccctggcacaggcctacaacccgatggccagggatctcttcaatgctgcatttgtgtcctgctggtctgaactgaatgaagatcaacaggatgagctcatcagaagcatcgagttggccctcacctcacaagacatcgctgaagtcacacagaccctcttaaacttggctgaattcatggaacacagtgacaagggccccctgccactgagagatgacaatggcattgttctgctgggtgagagagctgccaagtgccgagcatatgccaaagcactacactacaaagaactggagttccagaaaggccccacccctgccattctagaatctctcatcagcattaataataagctacagcagccggaggcagcggccggagtgttagaatatgccatgaaacactttggagagctggagatccaggctacctggtatgagaaactgcacgagtgggaggatgcccttgtggcctatgacaagaaaatggacaccaacaaggacgacccagagctgatgctgggccgcatgcgctgcctcgaggccttgggggaatggggtcaactccaccagcagtgctgtgaaaagtggaccctggttaatgatgagacccaagccaagatggcccggatggctgctgcagctgcatggggtttaggtcagtgggacagcatggaagaatacacctgtatgatccctcgggacacccatgatggggcattttatagagctgtgctggcactgcatcaggacctcttctccttggcacaacagtgcattgacaaggccagggacctgctggatgctgaattaactgcgatggcaggagagagttacagtcgggcatatggggccatggtttcttgccacatgctgtccgagctggaggaggttatccagtacaaacttgtccccgagcgacgagagatcatccgccagatctggtgggagagactgcagggctgccagcgtatcgtagaggactggcagaaaatccttatggtgcggtcccttgtggtcagccctcatgaagacatgagaacctggctcaagtatgcaagcctgtgcggcaagagtggcaggctggctcttgctcataaaactttagtgttgctcctgggagttgatccgtctcggcaacttgaccatcctctgccaacagttcaccctcaggtgacctatgcctacatgaaaaacatgtggaagagtgcccgcaagatcgatgccttccagcacatgcagcattttgtccagaccatgcagcaacaggcccagcatgccatcgctactgaggaccagcagcataagcaggaactgcacaagctcatggcccgatgcttcctgaaacttggagagtggcagctgaatctacagggcatcaatgagagcacaatccccaaagtgctgcagtactacagcgccgccacagagcacgaccgcagctggtacaaggcctggcatgcgtgggcagtgatgaacttcgaagctgtgctacactacaaacatcagaaccaagcccgcgatgagaagaagaaactgcgtcatgccagcggggccaacatcaccaacgccaccactgccgccaccacggccgccactgccaccaccactgccagcaccgagggcagcaacagtgagagcgaggccgagagcaccgagaacagccccaccccatcgccgctgcagaagaaggtcactgaggatctgtccaaaaccctcctgatgtacacggtgcctgccgtccagggcttcttccgttccatctccttgtcacgaggcaacaacctccaggatacactcagagttctcaccttatggtttgattatggtcactggccagatgtcaatgaggccttagtggagggggtgaaagccatccagattgatacctggctacaggttatacctcagctcattgcaagaattgatacgcccagacccttggtgggacgtctcattcaccagcttctcacagacattggtcggtaccacccccaggccctcatctacccactgacagtggcttctaagtctaccacgacagcccggcacaatgcagccaacaagattctgaagaacatgtgtgagcacagcaacaccctggtccagcaggccatgatggtgagcgaggagctgatccgagtggccatcctctggcatgagatgtggcatgaaggcctggaagaggcatctcgtttgtactttggggaaaggaacgtgaaaggcatgtttgaggtgctggagcccttgcatgctatgatggaacggggcccccagactctgaaggaaacatcctttaatcaggcctatggtcgagatttaatggaggcccaagagtggtgcaggaagtacatgaaatcagggaatgtcaaggacctcacccaagcctgggacctctattatcatgtgttccgacgaatctcaaagcagctgcctcagctcacatccttagagctgcaatatgtttccccaaaacttctgatgtgccgggaccttgaattggctgtgccaggaacatatgaccccaaccagccaatcattcgcattcagtccatagcaccgtctttgcaagtcatcacatccaagcagaggccccggaaattgacacttatgggcagcaacggacatgagtttgttttccttctaaaaggccatgaagatctgcgccaggatgagcgtgtgatgcagctcttcggcctggttaacacccttctggccaatgacccaacatctcttcggaaaaacctcagcatccagagatacgctgtcatccctttatcgaccaactcgggcctcattggctgggttccccactgtgacacactgcacgccctcatccgggactacagggagaagaagaagatccttctcaacatcgagcatcgcatcatgttgcggatggctccggactatgaccacttgactctgatgcagaaggtggaggtgtttgagcatgccgtcaataatacagctggggacgacctggccaagctgctgtggctgaaaagccccagctccgaggtgtggtttgaccgaagaaccaattatacccgttctttagcggtcatgtcaatggttgggtatattttaggcctgggagatagacacccatccaacctgatgctggaccgtctgagtgggaagatcctgcacattgactttggggactgctttgaggttgctatgacccgagagaagtttccagagaagattccatttagactaacaagaatgttgaccaatgctatggaggttacaggcctggatggcaactacagaatcacatgccacacagtgatggaggtgctgcgagagcacaaggacagtgtcatggccgtgctggaagcctttgtctatgaccccttgctgaactggaggctgatggacacaaataccaaaggcaacaagcgatcccgaacgaggacggattcctactctgctggccagtcagtcgaaattttggacggtgtggaacttggagagccagcccataagaaaacggggaccacagtgccagaatctattcattctttcattggagacggtttggtgaaaccagaggccctaaataagaaagctatccagattattaacagggttcgagataagctcactggtcgggacttctctcatgatgacactttggatgttccaacgcaagttgagctgctcatcaaacaagcgacatcccatgaaaacctctgccagtgctatattggctggtgccctttctggtaactggaggcccagatgtgcccatcacgttttttctgaggcttttgtactttagtaaatgcttccactaaactgaaaccatggtgagaaagtttgactttgttaaatattttgaaatgtaaatgaaaagaactactgtatattaaaagttggtttgaaccaactttctagctgctgttgaagaatatattgtcagaaacacaaggcttgatttggttcccaggacagtgaaacatagtaataccacgtaaatcaagccattcattttggggaacagaagatccataactttagaaatacgggttttgacttaactcacaagagaactcatcataagtacttgctgatggaagaatgacctagttgctcctctcaacatgggtacagcaaactcagcacagccaagaagcctcaggtcgtggagaacatggattaggatcctagactgtaaagacacagaagatgctgacctcacccctgccacctatcccaagacctcactggtctgtggacagcagcagaaatgtttgcaagataggccaaaatgagtacaaaaggtctgtcttccatcagacccagtgatgctgcgactcacacgcttcaattcaagacctgaccgctagtagggaggtttattcagatcgctggcagcctcggctgagcagatgcacagaggggatcactgtgcagtgggaccaccctcactggccttctgcagcagggttctgggatgttttcagtggtcaaaatactctgtttagagcaagggctcagaaaacagaaatactgtcatggaggtgctgaacacagggaaggtctggtacatattggaaattatgagcagaacaaatactcaactaaatgcacaaagtataaagtgtagccatgtctagacaccatgttgtatcagaataatttttgtgccaataaatgacatcagaattttaaacatatgt

SEQ ID NO: 2545 - protein, 2549 aa, Homo sapiens; identical to SEQ ID NO: 41

SEQ ID NO: 2546 - DNA, 656 bp, Homo sapiens
gattttttcatccgttatctctgttgatccctccctgatctgtcttctgtttctcaaagacacccatccaacctgatgctggaccgtctgagtgggaagatcctgcacattgactttggggactgctttgaggttgctatgacccgagagaagtttccagagaagattccatttagactaacaagaatgttgaccaatgctatggaggttacaggcctggatggcaactacagaatcacatgccacacagtgatggaggtgctgcgagagcacaaggacagtgtcatggccgtgctggaagcctttgtctatgaccccttgctgaactggaggctgatggacacaaataccaaaggcaacaagcgatcccgaacgaggacggattcctactctgctggccagtcagtcggggtgcaaaaagaaaatgtgaggtacagtggtcgcctgaagaagcacagaaagcattacagaattgaccataacctgcgtgaaatagtcagagagcaggagactctgccgtggagcctgcgggtgctttcgtgtggagtagggctgtggagattcagaaaaggggacttcactgtgaaccgtagctgcgaagagagcacttgggttggtggcatctaaccatcacttcacctgacaaagggtaattt

SEQ ID NO: 2547 - protein, 183 aa, Homo sapiens
MLDRLSGKILHIDFGDCFEVAMTREKFPEKIPFRLTRMLTNAMEVTGLDGNYRITCHTVMEVLREHKDSVMAVLEAFVYDPLLNWRLMDTNTKGNKRSRTRTDSYSAGQSVGVQKENVRYSGRLKKHRKHYRIDHNLREIVREQETLPWSLRVLSCGVGLWRFRKGDFTVNRSCEESTWVGGI

SEQ ID NO: 2548 - DNA, 708 bp, Homo sapiens
aatgggataactggccatccttcccagaacatttagactcctgactcccagacctggagtgacagtttctcatgttaaaatgatcagaatatctggcggatgatctctcgtcgctcggggacaagtttgtactggataacctcctccagctcggacagcatgtggcaagaaaccatggcctgatggaagcaaatcgcattccaaactaattactgcacgaacaatccaaaagacaggattaatttaaatcattccttctggtgtcagggtatctgccgatcagagaaaacaggcatgtttccagcagcctggatgaaaagagaaattcgctgaagaagggcattttcccagaactgaatggcttgagaggaggtattatccaatttctcatcgaagacagaaatgtatggcatccaaaactttaacatctatctaaggatggggctggttaccagaaagaccaagtaattatcgggtttgaactttcagccctgtccactgacatccaggaaaggtgaagaggttgaaaatgaaaggcaataaaaactcttgaacaatgagcttccaggttgatgaaggtgctgggagggtgaaggtaaaccccagtaccacaggacagaagcttctgcactccagacccttctagaccttccctcattgtacctgttcacctctatcttttataataccctttataataaacaagta

SEQ ID NO: 2549 - protein, 60 aa, Homo sapiens
FKSFLLVSGYLPIRENRHVSSSLDEKRNSLKKGIFPELNGLRGGIIQFLIEDRNVWHPKL

SEQ ID NO: 2550 - DNA, 673 bp, Homo sapiens
agagaagagaataagaagagactggaaaattggtcattctctcacagcttaagtttagatctggcggatgatctctcgtcgctcggggacaagtttgtactggataacctcctccagctcggacagcatgtggcaagaaaccatggcctgatggaagcaaatcgcattccaaactaattactgcacgaacaatccaaaagacaggattaatttaaatcattccttctggtgtcagggtatctgccgatcagagaaaacaggcatgtttccagcagcctggatgaaaagagaaattcgctgaagaagggcattttcccagaactgaatggcttgagaggaggtattatccaatttctcatcgaagacagaaatgtatggcatccaaaactttaacatctatctaaggatggggctggttaccagaaagaccaagtaattatcgggtttgaactttcagccctgtccactgacatccaggaaaggtgaagaggttgaaaatgaaaggcaataaaaactcttgaacaatgagcttccaggttgatgaaggtgctgggagggtgaaggtaaaccccagtaccacaggacagaagcttctgcactccagacccttctagaccttccctcattgtacctgttcacctctatcttttataataccctttataataaacaa

SEQ ID NO: 2551 - protein, 60 aa, Homo sapiens; identical to SEQ ID NO: 2549

SEQ ID NO: 2552 - DNA, 498 bp, Homo sapiens
gtgggagaatgtaagtagtcgagtgtggcctaagagtcaaagggaagaagaatggcagcagaagctaaagctggagaggtggaggggggccgtgcccggggagcccaggtgaggagcgggactgatcctctgtagacatgggaaggaatcctagaggtttttccctcttgttccattgttttcctgagttccaccaggaaagtggccttggtaattgccaaacaatttttttttattttttattttttttagagacatagtctcattctgttacccacctgaaaatagcaaatgttgacagagattgtgaagcaattgggcttttcatgtcctattggtagaaatgtaaattggtaaagccactttggaaaacaatctgtcagtatcttataaagctaaacatatccttatatgtaactcaacaattctgctatagatattttccagcagaagtgcaagcacacatgctccagaagacatggacaagagtgtccgcgt

SEQ ID NO: 2553 - protein, 40 aa, Homo sapiens
MGRNPRGFSLLFHCFPEFHQESGLGNCQTIFFYFLFFLET

SEQ ID NO: 2554 - DNA, 2289 bp, Homo sapiens
cagccatggtaggggtggaggtacaggcagcaaacaatatttaagatgctgacttgtggagcattcgggcttggaaggaaagctataggctacccattcagctcccctgtcagagactcaagctttgagaaaggctagcaaagagcaaggaaagagagaaaacaacaaagtggcgaggccctcagagtgaaagcgtaaggttcagtcagcctgctgcagctttgcagacctcagctgggcatctccagactcccctgaaggaagagccttcctcacccaaacccacaaaagatgctgaaaaagcctctctcagctgtgacctggctctgcattttcatcgtggcctttgtcagccacccagcgtggctgcagaagctctctaagcacaagacaccagcacagccacagctcaaagcggccaactgctgtgaggaggtgaaggagctcaaggcccaagttgccaaccttagcagcctgctgagtgaactgaacaagaagcaggagagggactgggtcagcgtggtcatgcaggtgatggagctggagagcaacagcaagcgcatggagtcgcggctcacagatgctgagagcaagtactccgagatgaacaaccaaattgacatcatgcagctgcaggcagcacagacggtcactcagacctccgcagatgccatctacgactgctcttccctctaccagaagaactaccgcatctctggagtgtataagcttcctcctgatgacttcctgggcagccctgaactggaggtgttctgtgacatggagacttcaggcggaggctggaccatcatccagagacgaaaaagtggccttgtctccttctaccgggactggaagcagtacaagcagggctttggcagcatccgtggggacttctggctggggaacgaacacatccaccggctctccagacagccaacccggctgcgtgtagagatggaggactgggagggcaacctgcgctacgctgagtatagccactttgttttgggcaatgaactcaacagctatcgcctcttcctggggaactacactggcaatgtggggaacgacgccctccagtatcataacaacacagccttcagcaccaaggacaaggacaatgacaactgcttggacaagtgtgcacagctccgcaaaggtggctactggtacaactgctgcacagactccaacctcaatggagtgtactaccgcctgggtgagcacaataagcacctggatggcatcacctggtatggctggcatggatctacctactccctcaaacgggtggagatgaaaatccgcccagaagacttcaagccttaaaaggaggctgccgtggagcacggatacagaaactgagacacgtggagactggatgagggcagatgaggacaggaagagagtgttagaaagggtaggactgagaaacagcctataatctccaaagaaagaataagtctccaaggagcacaaaaaaatcatatgtaccaaggatgttacagtaaacaggatgaactatttaaacccactgggtcctgccacatccttctcaaggtggtagactgagtggggtctctctgcccaagatccctgacatagcagtagcttgtcttttccacatgatttgtctgtgaaagaaaataattttgagatcgttttatctattttctctacggcttaggctatgtgagggcaaaacacaaatccctttgctaaaaagaaccatattattttgattctcaaaggataggcctttgagtgttagagaaaggagtgaaggaggcaggtgggaaatggtatttctatttttaaatccagtgaaattatcttgagtctacacattatttttaaaacacaaaaattgttcggctggaactgacccaggctggacttgcggggaggaaactccagggcactgcatctggcgatcagactctgagcactgcccctgctcgccttggtcatgtacagcactgaaaggaatgaagcaccagcaggaggtggacagagtctctcatggatgccggcacaaaactgccttaaaatattcatagttaatacaggtatatctatttttatttactttgtaagaaacaagctcaaggagcttccttttaaattttgtctgtaggaaatggttgaaaactgaaggtagatggtgttatagttaataataaatgctgtaaataagcatctcactttgtaaaaataaaatattgtggttttgttttaaacattcaacgtttcttttccttctacaataaacactttcaaaatgtg

SEQ ID NO: 2555 - protein, 346 aa, Homo sapiens; identical to SEQ ID NO: 43

SEQ ID NO: 2556 - DNA, 2409 bp, Homo sapiens
cagccatggtaggggtggaggtacaggcagcaaacaatatttaagatgctgacttgtggagcattcgggcttggaaggaaagctataggctacccattcagctcccctgtcagagactcaagctttgagaaaggctagcaaagagcaaggaaagagagaaaacaacaaagtggcgaggccctcagagtgaaagcgtaaggttcagtcagcctgctgcagctttgcagacctcagctgggcatctccagactcccctgaaggaagagccttcctcacccaaacccacaaaagatgctgaaaaagcctctctcagctgtgacctggctctgcattttcatcgtggcctttgtcagccacccagcgtggctgcagaagctctctaagcacaagacaccagcacagccacagctcaaagcggccaactgctgtgaggaggtgaaggagctcaaggcccaagttgccaaccttagcagcctgctgagtgaactgaacaagaagcaggagagggactgggtcagcgtggtcatgcaggtgatggagctggagagcaacagcaagcgcatggagtcgcggctcacagatgctgagagcaagtactccgagatgaacaaccaaattgacatcatgcagctgcaggcagcacagacggtcactcagacctccgcagatgccatctacgactgctcttccctctaccagaagaactaccgcatctctggagtgtataagcttcctcctgatgacttcctgggcagccctgaactggaggtgttctgtgacatggagacttcaggcggaggctggaccatcatccagagacgaaaaagtggccttgtctccttctaccgggactggaagcagtacaagcagggctttggcagcatccgtggggacttctggctggggaacgaacacatccaccggctctccagacagccaacccggctgcgtgtagagatggaggactgggagggcaacctgcgctacgctgagtatagccactttgttttgggcaatgaactcaacagctatcgcctcttcctggggaactacactggcaatgtggggaacgacgccctccagtatcataacaacacagccttcagcaccaaggacaaggacaatgacaactgcttggacaagtgtgcacagctccgcaaaggtggctactggtacaactgctgcacagactccaacctcaatggagtgtactaccgcctgggtgagcacaataagcacctggatggcatcacctggtatggctggcatggatctacctactccctcaaacgggtggagatgaaaatccgcccagaagacttcaagccttaaaaggaggctgccgtggagcacggatacagaaactgagacacgtggagactggatgagggcagatgaggacaggaagagagtgttagaaagggtaggactgagaaacagcctataatctccaaagaaagaataagtctccaaggagcacaaaaaaatcatatgtaccaaggatgttacagtaaacaggatgaactatttaaacccactgggtcctgccacatccttctcaaggtggtagactgagtggggtctctctgcccaagatccctgacatagcagtagcttgtcttttccacatgatttgtctgtgaaagaaaataattttgagatcgttttatctattttctctacggcttaggctatgtgagggcaaaacacaaatccctttgctaaaaagaaccatattattttgattctcaaaggataggcctttgagtgttagagaaaggagtgaaggaggcaggtgggaaatggtatttctatttttaaatccagtgaaattatcttgagtctacacattatttttaaaacacaaaaattgttcggctggaactgacccaggctggacttgcggggaggaaactccagggcactgcatctggcgatcagactctgagcactgcccctgctcgccttggtcatgtacagcactgaaaggaatgaagcaccagcaggaggtggacagagtctctcatggatgccggcacaaaactgccttaaaatattcatagttaatacaggtatatctatttttatttactttgtaagaaacaagctcaaggagcttccttttaaattttgtctgtaggaaatggttgaaaactgaaggtagatggtgttatagttaataataaatgctgtaaataagcatctcactttgtaaaaataaaatattgtggttttgttttaaacattcaacgtttcttttccttctacaataaacactttcaaaatgtgagtatcttctttttaaattcttaccattaccacttacagcaggataaaaagttaaagttaaatcagagggtgagcagtgacagaggcccggggtttgttttggtgttcagggcaaccaag

SEQ ID NO: 2557 - protein, 346 aa, Homo sapiens; identical to SEQ ID NO: 43

SEQ ID NO: 2558 - DNA, 1525 bp, Homo sapiens
ccagcccgcgccgccggcacctgtttccgggcgggcctccagaggccggcgcacaagatggcggctctggcggcctaaagaaggcggccgcggctcagccgtgggctctaacgcggggctgggggccggagacagacttcgcccaggtgacgggtagtaggggcggcgccgcttggcctcgtggggtgtaagacccacttgctgttgcccccggaccttgccgccacaccagccctgtcctggggcggaaccgaaggaaggtcgggccctgctgccccgccccgtccttcctccttcccgggcggtcactgtgcgtggctcacttttagagtttacttcaaccacgtggagcttccatggcggcctctcaggtcctgggggagaagattaacatcctgtcgggagagactgtcaaagctggggacagggacccgctggggaacgactgtcccgagcaagataggctcccccagcgctcctggaggcagaagtgtgcctcctacgtgttggccctgaggccctggagcttcagtgcctcactcacaccggtggccctgggcagtgcccttgcctacagatcccacggtgtcctggatcccaggctcttggtgggttgtgccgtggctgtcctggctgtgcacggggccggtaatttggtcaacacttactatgacttttccaagggcattgaccacaaaaagagtgatgacaggacacttgtggaccgaatcttggagccgcaggatgtcgtccggttcggagtcttcctctacacgttgggctgcgtctgtgccgcttgcctctactacctgtcccctctgaaactggagcacttggctcttatctactttggaggcctgtctggctcctttctctacacaggaggaattggattcaagtacgtggctctgggagacctcatcatcctcatcacttttggcccgctggctgtgatgttcgcctacgccatccaggtggggtccctggccatcttcccactggtctatgccatccccctcgccctcagcaccgaggccattctccattccaacaacaccagggacatggagtccgaccgggaggctggtatcgtcacgctggccatcctcatcggccccacgttctcctacattctctacaacacactgctcttcctgccctacctggtcttcagcatcctggccacacactgcaccatcagcctggcactccccctgcttaccattcccatggccttctcccttgagagacagtttcgaagccaggccttcaacaaactgccccagaggactgccaagctcaacctcctgctgggacttttctatgtctttggcatcattctggcaccagcaggcagtctgcccaaaatttaaggggacaagtagctccccccacgacatgtctccctttcttagaatatattaaagtcagagtctctgaggaaggaatgtgatttggcagtcagggtactaagcatgggtgggaactcctgccttataaaaattgtttttgtgttcttaaagat

SEQ ID NO: 2559 - protein, 338 aa, Homo sapiens; identical to SEQ ID NO: 45

SEQ ID NO: 2560 - DNA, 1599 bp, Homo sapiens
ccagcccgcgccgccggcacctgtttccgggcgggcctccagaggccggcgcacaagatggcggctctggcggcctaaagaaggcggccgcggctcagccgtgggctctaacgcggggctgggggccggagacagacttcgcccaggtgacgggtagtaggggcggcgccgcttggcctcgtggggtgtaagacccacttgctgttgcccccggaccttgccgccacaccagccctgtcctggggcggaaccgaaggaaggtcgggccctgctgccccgccccgtccttcctccttcccgggcggtcactgtgcgtggctcacttttagagtttacttcaaccacgtggagcttccatggcggcctctcaggtcctgggggagaagattaacatcctgtcgggagagactgtcaaagctggggacagggacccgctggggaacgactgtcccgagcaagataggctcccccagcgctcctggaggcagaagtgtgcctcctacgtgttggccctgaggccctggagcttcagtgcctcactcacaccggtggccctgggcagtgcccttgcctacagatcccacggtgtcctggatcccaggctcttggtgggttgtgccgtggctgtcctggctgtgcacggggccggtaatttggtcaacacttactatgacttttccaagggcattgaccacaaaaagagtgatgacaggacacttgtggaccgaatcttggagccgcaggatgtcgtccggttcggagtcttcctctacacgttgggctgcgtctgtgccgcttgcctctactacctgtcccctctgaaactggagcacttggctcttatctactttggaggcctgtctggctcctttctctacacaggaggaattggattcaagtacgtggctctgggagacctcatcatcctcatcacttttggcccgctggctgtgatgttcgcctacgccatccaggtggggtccctggccatcttcccactggtctatgccatccccctcgccctcagcaccgaggccattctccattccaacaacaccagggacatggagtccgaccgggaggctggtatcgtcacgctggccatcctcatcggccccacgttctcctacattctctacaacacactgctcttcctgccctacctggtcttcagcatcctggccacacactgcaccatcagcctggcactccccctgcttaccattcccatggccttctcccttgagagacagtttcgaagccaggccttcaacaaactgccccagaggactgccaagctcaacctcctgctgggacttttctatgtctttggcatcattctggcaccagcaggcagtctgcccaaaatttaaggggacaagtagctccccccacgacatgtctccctttcttagaatatattaaagtcagagtctctgaggaaggaatgtgatttggcagtcagggtactaagcatgggtgggaactcctgccttataaaaattgtttttgtgttcttaaagataatatgttgtttttctgttttttgttttttccattttatggggaatttaaaaaccattcttgtatcagaaggtg

SEQ ID NO: 2561 - protein, 338 aa, Homo sapiens; identical to SEQ ID NO: 45

SEQ ID NO: 2562 - DNA, 3675 bp, Homo sapiens
ccagcccgcgccgccggcacctgtttccgggcgggcctccagaggccggcgcacaagatggcggctctggcggcctaaagaaggcggccgcggctcagccgtgggctctaacgcggggctgggggccggagacagacttcgcccaggtgacgggtagtaggggcggcgccgcttggcctcgtggggtgtaagacccacttgctgttgcccccggaccttgccgccacaccagccctgtcctggggcggaaccgaaggaaggtcgggccctgctgccccgccccgtccttcctccttcccgggcggtcactgtgcgtggctcacttttagagtttacttcaaccacgtggagcttccatggcggcctctcaggtcctgggggagaagattaacatcctgtcgggagagactgtcaaagctggggacagggacccgctggggaacgactgtcccgagcaagataggctcccccagcgctcctggaggcagaagtgtgcctcctacgtgttggccctgaggccctggagcttcagtgcctcactcacaccggtggccctgggcagtgcccttgcctacagatcccacggtgtcctggatcccaggctcttggtgggttgtgccgtggctgtcctggctgtgcacggggccggtaatttggtcaacacttactatgacttttccaagggcattgaccacaaaaagagtgatgacaggacacttgtggaccgaatcttggagccgcaggatgtcgtccggttcggagtcttcctctacacgttgggctgcgtctgtgccgcttgcctctactacctgtcccctctgaaactggagcacttggctcttatctactttggaggcctgtctggctcctttctctacacaggaggaattggattcaagtacgtggctctgggagacctcatcatcctcatcacttttggcccgctggctgtgatgttcgcctacgccatccaggtggggtccctggccatcttcccactggtctatgccatccccctcgccctcagcaccgaggccattctccattccaacaacaccagggacatggagtccgaccgggaggctggtatcgtcacgctggccatcctcatcggccccacgttctcctacattctctacaacacactgctcttcctgccctacctggtcttcagcatcctggccacacactgcaccatcagcctggcactccccctgcttaccattcccatggccttctcccttgagagacagtttcgaagccaggccttcaacaaactgccccagaggactgccaagctcaacctcctgctgggacttttctatgtctttggcatcattctggcaccagcaggcagtctgcccaaaatttaaggggacaagtagctccccccacgacatgtctccctttcttagaatatattaaagtcagagtctctgaggaaggaatgtgatttggcagtcagggtactaagcatgggtgggaactcctgccttataaaaattgtttttgtgttcttaaagataatatgttgtttttctgttttttgttttttccattttatggggaatttaaaaaccattcttgtatcagaaggtgaattaggcgcatggtctttgttttattaataatttccactagagggtgttctcaggtcactttgcagtgaagtggacttagttcctccttgttctgtacaaaatgtctccagactttgtaaaggagctgcccagtttggcctcctgtcccgaaaagaccctaataactaggcagagtgttgtcctgctttcttcgtctcgtaggatgtgctatgattggtgccaggcctcactaacacaggggctacctgtctcttattctcagcacctgtgtcctgagatacgctgcctgagacagagagagtccctcattaacagcctgtgtggctgtcagctttttgcctaaattgtgattcagatgcttttgttctctctcctttcacttattgccacagttgaggaaaagtgtcagattaccctgcagcaagacaagccaaggactgggagggaaaaaaaaaccactctggaggcaactgagaaaatcactgcttttggataggaatcagtagggtggctgttttccctttgttgaatctactagagtgacaggaaggactcccagccctttcagtaactatcaggagccctgaaacggtagaggcactgccatccttgtgggatactcaaagcccacagggcttttccctccctattgcatcttctgatgctccccacacctaccctccacctctccacctctgtggtgttcccatttgtgtgtttcccatctgtggagccagactgagcaatagcttagcagcgagtcagggacagctgccactttccacagagccacaggatgggcagagcagggacccagggaatgaatagccagtggacaaacagtcttgagctctgttcagccagagtgatgggccctgccagttaaggggctgtgtcttcatccttgaagacagatgtgcaatattgaccctgcctctccccagggctttgtggaaagatagttgagggctttagtgagatcacactcagagtggggcaattccagcatttatcctggctgcgtttcattgcattgtctgtgaagtataatttctgggccagaattgctcagttgcatttgatccaggactatagattggaaatgggtcatcattgttttctgttgtgattatagccattctagtaggcgtttaaggtcatggcctgcagaaaatgatgtaagaactagttcttaatctttcagatcaagctaatgatgatatggaaccttgagttcgaattgattggtttacttggaaaaaaacatgtttgaaaattgcaaaagttccgccgggcgcggtggctcatgcctgtaatcccagcactttgggaggccgagacgggcggatcacgaggtcaggagatcgagaccatcttggctaacacggtgaaaccccgtttctactaaaaatacaaaaaattagccaggcgtgttggcgggcgcctgtagtcccagctacctgggcggctgaggcaggagcatggcgtgaacccaggaggcggagcttgcagtgagctgagatcatgccactgcactccaacctgggggacacagcaagactccgtctcaaaaaaaaaaaaagaaaaagaaaattgcaaaagttcctctaaagttaaatcaaaggtggtttgtctagcagagagccagaatcttctaatagtgggcagagcccagagacaaggggaagaaagatgaccttctccccagtccttcccagcaccatttttgtttcacaccaggcttgtggcattttggtgctcacaggggttttgccttctgacctctccttggagtaggccattctcatgcagggctcaccctgaggcaggaggaccaagggctccctgcgtccacggaccacgtatgccttggtggtcactcccatcggggctatcagttctgcactgtgccctggtgcggattttaatgcatatttttatatataaatgttcccaaaggccaaatttgttgccaggttttatacgcaggtcaccataatttgtattatgttccctgagtcaatgaaggttttctttagacttcttaattaaaaagagaagaaagaaaatgttc

SEQ ID NO: 2563 - protein, 338 aa, Homo sapiens; identical to SEQ ID NO: 45

SEQ ID NO: 2564 - DNA, 1218 bp, Homo sapiens
ccagcccgcgccgccggcacctgtttccgggcgggcctccagaggccggcgcacaagatggcggctctggcggcctaaagaaggcggccgcggctcagccgtgggctctaacgcggggctgggggccggagacagacttcgcccaggtgacgggtagtaggggcggcgccgcttggcctcgtggggtgtaagacccacttgctgttgcccccggaccttgccgccacaccagccctgtcctggggcggaaccgaaggaaggtcgggccctgctgccccgccccgtccttcctccttcccgggcggtcactgtgcgtggctcacttttagagtttacttcaaccacgtggagcttccatggcggcctctcaggtcctgggggagaagattaacatcctgtcgggagagactgtcaaagctggggacagggacccgctggggaacgactgtcccgagcaagataggctcccccagcgctcctggaggcagaagtgtgcctcctacgtgttggccctgaggccctggagcttcagtgcctcactcacaccggtggccctgggcagtgcccttgcctacagatcccacggtgtcctggatcccaggctcttggtgggttgtgccgtggctgtcctggctgtgcacggggccggtaatttggtcaacacttactatgacttttccaagggcattgaccacaaaaagagtgatgacaggacacttgtggaccgaatcttggagccgcaggatgtcgtccggttcggagtcttcctctacacgttgggctgcgtctgtgccgcttgcctctactacctgtcccctctgaaactggagcacttggctcttatctactttggaggcctgtctggctcctttctctacacaggaggaattggattcaagtacgtggctctgggagacctcatcatcctcatcacttttggcccgctggctgtgatgttcgcctacgccatccaggctggagtgcaatggtgcaatctcagctcgctgcaacctctgcctccagggttcaagcgattctcctgcctcagcctcctgagtagctgggattaacagcccatctcagcactagcacagtgcatggtgcaacagagcaggcagtcagtaactggttgttgaatgactgagttacatgggaagggctgggccctccagggctgactgacaggtgtgagagtttggaccactgcatcacatcagc

SEQ ID NO: 2565 - protein, 237 aa, Homo sapiens
MAASQVLGEKINILSGETVKAGDRDPLGNDCPEQDRLPQRSWRQKCASYVLALRPWSFSASLTPVALGSALAYRSHGVLDPRLLVGCAVAVLAVHGAGNLVNTYYDFSKGIDHKKSDDRTLVDRILEPQDVVRFGVFLYTLGCVCAACLYYLSPLKLEHLALIYFGGLSGSFLYTGGIGFKYVALGDLIILITFGPLAVMFAYAIQAGVQWCNLSSLQPLPPGFKRFSCLSLLSSWD

SEQ ID NO: 2566 - DNA, 2009 bp, Homo sapiens
ccagcccgcgccgccggcacctgtttccgggcgggcctccagaggccggcgcacaagatggcggctctggcggcctaaagaaggcggccgcggctcagccgtgggctctaacgcggggctgggggccggagacagacttcgcccaggtgacgggtagtaggggcggcgccgcttggcctcgtggggtgtaagacccacttgctgttgcccccggaccttgccgccacaccagccctgtcctggggcggaaccgaaggaaggtcgggccctgctgccccgccccgtccttcctccttcccgggcggtcactgtgcgtggctcacttttagagtttacttcaaccacgtggagcttccatggcggcctctcaggtcctgggggagaagattaacatcctgtcgggagagactgtcaaagctggggacagggacccgctggggaacgactgtcccgagcaagataggctcccccagcgctcctggaggcagaagtgtgcctcctacgtgttggccctgaggccctggagcttcagtgcctcactcacaccggtggccctgggcagtgcccttgcctacagatcccacggtgtcctggatcccaggctcttggtgggttgtgccgtggctgtcctggctgtgcacggggccggtaatttggtcaacacttactatgacttttccaagggcattgaccacaaaaagagtgatgacaggacacttgtggaccgaatcttggagccgcaggatgtcgtccggttcggagtcttcctctacacgttgggctgcgtctgtgccgcttgcctctactacctgtcccctctgaaactggagcacttggctcttatctactttggaggcctgtctggctcctttctctacacaggaggaattggattcaagtacgtggctctgggagacctcatcatcctcatcacttttggcccgctggctgtgatgttcgcctacgccatccagtcctcatctagccactgaagcagagtgcccacatcaggagcagccagtgctcaagctcccagaaactgcctagtgacctgccttctagacctgcctcctgagaatggggctggccaccttcgaggagagggaagtgagccccttcctgcctcggggtgggcagcatctggagctgacaattgtatgcatgttcaggacacaggatactcaactcttcgggttcagtgtgctgtgtggagggagaggaagttgacacacgtgaaccatagaataaacaacgaccacagaacatcaaggtagagatggggctgctgggtatcaggaaggcttccaggaagaggtgacaatgagcggcgatcaaggtttctaggaagaggtggccataagaggtgactgttccatggaaaccgaggtgctgatggacagctcaattcccccagctggagaaagcccccctgttgctgcctgagagagtaagactcgaagttttccttaatcagcctcttttggctgtgcagttagacaactggagcattgaggcaggtgtgccaagggcactctgaccactgccaaggtcaaagccttctgcagaatgaaaactccgacacttccttgctgagaaacaaacaagagagaatggcggggcatttaatcatccacagctgccaatacctaatcaagatgaatggcctggagagacaaggccagggaaagcatcccgtgaagcaggagcgctgagcccaagtctcctgcgagtcaggggagcccctcagccctgggccacattgaggccaagggaataccaggtgggaggccctcagattcaggggaagtgctgagggggtcagaggtcaccatggtcaccaatgagggccttccagctgacacttgccttggccaaagacctttactgagagcctgctctgtcccaggaggcaagataaacgaggcacacccctgccctttgaggacacacagtgaactaatagcaaaagctacatgcatacattatcctgccacctcaagtgtcaacat

SEQ ID NO: 2567 - protein, 211 aa, Homo sapiens
MAASQVLGEKINILSGETVKAGDRDPLGNDCPEQDRLPQRSWRQKCASYVLALRPWSFSASLTPVALGSALAYRSHGVLDPRLLVGCAVAVLAVHGAGNLVNTYYDFSKGIDHKKSDDRTLVDRILEPQDVVRFGVFLYTLGCVCAACLYYLSPLKLEHLALIYFGGLSGSFLYTGGIGFKYVALGDLIILITFGPLAVMFAYAIQSSSSH

SEQ ID NO: 2568 - DNA, 1881 bp, Homo sapiens
cagaggccggcgcacaagatggcggctctggcggcctaaagaaggcggccgcggctcagccgtgggctctaacgcggggctgggggccggagacagacttcgcccaggtgacgggtagtaggggcggcgccgcttggcctcgtggggtgtaagacccacttgctgttgcccccggaccttgccgccacaccagccctgtcctggggcggaaccgaaggaaggtcgggccctgctgccccgccccgtccttcctccttcccgggcggtcactgtgcgtggctcacttttagagtttacttcaaccacgtggagcttccatggcggcctctcaggtcctgggggagaagattaacatcctgtcgggagagactgtcaaagctggggacagggacccgctggggaacgactgtcccgagcaagataggctcccccagcgctcctggaggcagaagtgtgcctcctacgtgttggccctgaggccctggagcttcagtgcctcactcacaccggtggccctgggcagtgcccttgcctacagatcccacggtgtcctggatcccaggctcttggtgggttgtgccgtggctgtcctggctgtgcacggggccggtaatttggtcaacacttactatgacttttccaagggcattgaccacaaaaagagtgatgacaggacacttgtggaccgaatcttggagccgcaggatgtcgtccggttcggagtcttcctctacacgttgggctgcgtctgtgccgcttgcctctactacctgtcccctctgaaactggagcacttggctcttatctactttggaggcctgtctggctcctttctctacacaggagtcctcatctagccactgaagcagagtgcccacatcaggagcagccagtgctcaagctcccagaaactgcctagtgacctgccttctagacctgcctcctgagaatggggctggccaccttcgaggagagggaagtgagccccttcctgcctcggggtgggcagcatctggagctgacaattgtatgcatgttcaggacacaggatactcaactcttcgggttcagtgtgctgtgtggagggagaggaagttgacacacgtgaaccatagaataaacaacgaccacagaacatcaaggtagagatggggctgctgggtatcaggaaggcttccaggaagaggtgacaatgagcggcgatcaaggtttctaggaagaggtggccataagaggtgactgttccatggaaaccgaggtgctgatggacagctcaattcccccagctggagaaagcccccctgttgctgcctgagagagtaagactcgaagttttccttaatcagcctcttttggctgtgcagttagacaactggagcattgaggcaggtgtgccaagggcactctgaccactgccaaggtcaaagccttctgcagaatgaaaactccgacacttccttgctgagaaacaaacaagagagaatggcggggcatttaatcatccacagctgccaatacctaatcaagatgaatggcctggagagacaaggccagggaaagcatcccgtgaagcaggagcgctgagcccaagtctcctgcgagtcaggggagcccctcagccctgggccacattgaggccaagggaataccaggtgggaggccctcagattcaggggaagtgctgagggggtcagaggtcaccatggtcaccaatgagggccttccagctgacacttgccttggccaaagacctttactgagagcctgctctgtcccaggaggcaagataaacgaggcacacccctgccctttgaggacacacagtgaactaatagcaaaagctacatgcatacattatcctgccacctcaagtgtcaacat

SEQ ID NO: 2569 - protein, 179 aa, Homo sapiens
MAASQVLGEKINILSGETVKAGDRDPLGNDCPEQDRLPQRSWRQKCASYVLALRPWSFSASLTPVALGSALAYRSHGVLDPRLLVGCAVAVLAVHGAGNLVNTYYDFSKGIDHKKSDDRTLVDRILEPQDVVRFGVFLYTLGCVCAACLYYLSPLKLEHLALIYFGGLSGSFLYTGVLI

SEQ ID NO: 2570 - DNA, 1945 bp, Homo sapiens
aggaggggggtgctcgcgccgccgggagaggcgagcgcgaggcagagagcgcgattcggctccaaactccggcgctgcagccgatcggactctgggccgcggtgggcaccgcgcgcagctagggagccgagaaccgcggcgagccccgaggacgcccagagcgcgagggtcgctgcgcctcgcagagccggagccgagtcgagccgggcgcccgggctgcctggccgcggcggcatgggggcgcccccgcggctctccgcgctgcccgccaccgcctcggccagtggccggaggcaggagcgcgtctgagcccatggcgaggggacccgccgccaccgcctccacccccgccgccccgccaccgccgccagctcccgggcaccatgcgaaccgccccgagcctccgccgctgcgtctgcctgctgctcgccgcgatcctggacctggcgcgcggctacctgacagtcaacattgagcctctcccccctgtggtggctggagacgccgtgactttgaagtgtaacttcaagacagatgggcgcatgcgggagatcgtgtggtaccgggtgacggatggtggcaccatcaagcaaaagatcttcaccttcgacgccatgttctccaccaactactcacacatggagaactaccgcaagcgagaggacctggtgtaccagtccactgtgaggctgcccgaggtccggatctcagacaatggtccctatgagtgccatgtgggcatctacgaccgcgccaccagggagaaggtggtcctggcatcaggcaacatcttcctcaacgtcatggctcctcccacctccattgaagtggtggctgctgacacaccagcccccttcagccgctaccaagcccagaacttcacgctggtctgcatcgtgtctggaggaaaaccagcacccatggtttatttcaaacgagatggggaaccaatcgacgcagtgcccctatcagagccaccagctgcgagctccggccccctacaggacagcaggcccttccgcagccttctgcaccgtgacctggatgacaccaagatgcagaagtcactgtccctcctggacgccgagaaccggggtgggcgaccctacacggagcgcccctcccgtggcctgaccccagatcccaacatcctcctccagccaaccacagagaacataccagagacggtcgtgagccgtgagtttccccgctgggtccacagcgccgagcccacctacttcctgcgccacagccgcaccccgagcagtgacggcactgtggaagtacgtgccctgctcacctggaccctcaacccacagatcgacaacgaggccctcttcagctgcgaggtcaagcacccagctctgtcgatgcccatgcaggcagaggtcacgctggttgcccccaaaggacccaaaattgtgatgacgcccagcagagcccgggtaggggacacagtgaggattctggtccatgggtttcagaacgaagtcttcccggagcccatgttcacgtggacgcgggttgggagccgcctcctggacggcagcgctgagttcgacgggaaggagctggtgctggagcgggttcccgccgagctcaatggctccatgtatcgctgcaccgcccagaacccactgggctccaccgacacgcacacccggctcatcgtgtttgaaaacccaaatatcccaagaggaacggaggactctaatggttccattggccccactggtgcccggctcaccttggtgctcgccctgacagtgattctggagctgacgtgaaggcacccgccccggccactccatcaggcactgacatctccacgaccggttttcatttcttttctaaactatttccagtcttgttcttagtctctttccatctgtgtcttggcttcttcagtcggtttaattaaaacaaacagaacaattttccccac

SEQ ID NO: 2571 - protein, 467 aa, Homo sapiens
MRTAPSLRRCVCLLLAAILDLARGYLTVNIEPLPPVVAGDAVTLKCNFKTDGRMREIVWYRVTDGGTIKQKIFTFDAMFSTNYSHMENYRKREDLVYQSTVRLPEVRISDNGPYECHVGIYDRATREKVVLASGNIFLNVMAPPTSIEVVAADTPAPFSRYQAQNFTLVCIVSGGKPAPMVYFKRDGEPIDAVPLSEPPAASSGPLQDSRPFRSLLHRDLDDTKMQKSLSLLDAENRGGRPYTERPSRGLTPDPNILLQPTTENIPETVVSREFPRWVHSAEPTYFLRHSRTPSSDGTVEVRALLTWTLNPQIDNEALFSCEVKHPALSMPMQAEVTLVAPKGPKIVMTPSRARVGDTVRILVHGFQNEVFPEPMFTWTRVGSRLLDGSAEFDGKELVLERVPAELNGSMYRCTAQNPLGSTDTHTRLIVFENPNIPRGTEDSNGSIGPTGARLTLVLALTVILELT

SEQ ID NO: 2572 - DNA, 5660 bp, Homo sapiens
agtgcaggtggaggccccggcggggcaaagtggcaggaacctcttaaagggcgagagcggcgcggagccagaacgcggtcggcccggtccccgccgcacccagcccagagaagagtttagtgactgaggccgaaaattcacagcaccaacagaaggaagagggtgaggaagccataaactcaggccaacaagaacctcagcaggaggaatcttgtcaaacagcagctgaaggagataattggtgtgaacagaagctgaaagcttctaatggagacactcctacacatgaagacttgaccaagaacaaggagcggacatcagaaagcagaggactttcacgactattctcctcgtttctcaaaaggcccaaatctcaggtgtccgaggaagaaggcaaagaagtagagtcagataaagaaaaaggtgaaggaggtcagaaagagatagaatttggaaccagtcttgatgaagagatcattttaaaggccccaattgcagctcctgaaccggaactcaaaacagacccatctttggatcttcattcattaagcagtgcagaaacacagcctgctcaggaagaactcagagaagatccagattttgaaattaaggaaggagaaggacttgaagagtgctccaaaatagaagtaaaagaagaaagccctcaatcaaaagcagaaacagaattaaaagcttcccaaaaaccaatcagaaaacacaggaacatgcactgcaaggtttctttgttggatgacacagtttatgaatgtgttgtggagacatggctggattccgccaaagaaataaaaaagcaggttcgtggtgtcccttggaattttacatttaatgtaaagttttatccacctgacccagcacagttaacagaagacataacaagatattatttatgtcttcagcttcggcaggacatagttgcaggacgtctgccctgttcctttgcaaccttagcattattaggttcttacaccatccagtctgaactgggagactacgacccagaactccatggcgtggattatgttagtgattttaaactggccccgaatcagaccaaggaacttgaagagaaggtcatggaactgcataagtcatacaggtccatgactccagctcaggctgacttggagtttcttgagaatgccaaaaagttgtctatgtatggagttgatcttcataaagcaaaggacttggaaggagtagatatcatcctaggtgtctgctctagtggccttctggtttacaaagataagctgagaattaaccgcttcccttggcccaaagtgctgaagatttcttataaacgtagtagctttttcatcaagattcggcctggagagcaagagcagtatgaaagtaccatcggattcaaacttcccagttaccgagcagctaagaaattatggaaagtctgtgtagaacatcacacgtttttcagattgacatctacagacaccattcccaaaagcaaatttcttgcgctaggatccaaatttcgatacagtggccggactcaagctcagaccaggcaagctagtgctctaattgacaggcctgccccacacttcgagcgtacagcaagtaaacgggcgtcccggagcctcgatggagcagcagctgtcgattcggcagaccgaagtcctcggcccacttctgcacctgccattactcagggtcaggttgcagaaggtggcgtcctagatgcctctgctaaaaaaacagtggtccctaaagcacagaaggaaacagtgaaggctgaagtgaaaaaggaagacgagccacctgagcaagctgagccagagcccacagaagcatggaaggatttagacaagagtcaagaggagatcaaaaaacatcatgccagcatcagtgagctgaaaaagaacttcatggagtctgtaccagaaccacggcctagtgaatgggataaacgcttatccactcactcacccttccgaactcttaacatcaatgggcaaatccccacaggagaaggacctcccctggtgaagacacaaactgtcaccatctcagataatgccaatgctgtgaaaagtgaaatcccaaccaaagacgtccctattgtccacactgagaccaagaccatcacttatgaggctgcccagactgacgacaacagtggagacttggacccaggagtcttgctgacagctcaaactatcacatctgagaccccaagcagcaccaccacaactcaaattaccaagactgtaaaaggtgggatttcagagacacgtattgaaaagagaattgtgatcacaggagatgctgatattgaccatgatcaggtccttgtacaagccatcaaggaggcaaaggagcagcacccagacatgtcagtgaccaaggtggtcgtccaccaggagaccgagattgctgatgagtgagctcaggaactaacctaccccaactctgcccttctcccatccaagagaaaccagcaaaatgataaagaagctaacctgccatagtcagacttcagactttcaagattattctaaatcaccagaaaattaatttcagtttctattgggagtttataccaagagattcttctagatctcattgatccttttgaagagctttttctatattaggatatcagaattgttcaacttttcactctatagactgttttaagagttttggggtttttttaattgggtggtttgtaaccccttcagcctagcctctctgcccatttatttccaaccccaacagacactgacagggtccatggaattcttcgggaaatcctccaaggactcttgtcagctgtgttggaagccaaagccagcttagtgggacttccgcgtctctccctagtcttatcccctttggatgatggcagaaacttcatgaaccagccctttctcagagccagtgatgtgagtgtatcagaatgccagggagggcaccagccctgatccacagacctcggaaagatgcccctgttcctttgttgcgggtggttttggtaaggcagagccctctgctgagaatgtagtattgtttttcccctctccctcctgctttctttttggagcttctttgggtcaaagacatggaagttgcttcagatatctgatactgtgaatgtttgaacatatccgtggccttcacctctccagctacccttttacctcatcagaagcagtggctcagctaagtgctccccctagctcccatctcaggagaccaaatctcacagaaaaataggcactttgggccaaaagctctaatggaacatttttagtggtgatttggggaaggaaagttaatgaggtttttaaaataaggttttctagttttgagagtgtgcacttcacacaggggaatggggttacttctgtctgatcctgggcctttctttcatcccaaatgacaaggaatgtggctcagagaagggtttttcttttttgacctttcttctctcaacaggaacctgcctgaggacacccttctagagcaaggaattgacttttaggagccgttctccccacaagacaccacatgacaaggggtataagccccagccctgctcattcccactcaccagctgaggtctgtcaggttttgaaggcttgattttgtggtgggtttggggcttagttttcctttttttcattttgatttttgaaagtgaagatgatgccctaattcctggtaaggatttggggcatagttttttgtttttttgagacggagtttcgctcttgttgcccaagctggagtgcagtggcgcgatctcggctcactgcaacctccgcctcctgggttcaagcagttctcttgcctcagcctcccaagtagctgggatgacaggcgcacaccaccacgcccagcaaattttttgtatttttagtagaaacgggatttcaccttgttaggctggtctcgaactcctgacctcaggtgatccacccaccttggcctcccaaagtgctgggattacaggtgtgagccaccacgcccggccgatttggggcatttttatttaacagaacttctctaaccttccaactgcttcccacaaacacattggcctcaaggctccttagaatcccagttccagcttcctaaaatagacagtgggtatcgggcagcagtcactggggctcaagggcagtgagcaagagaaatgtctaaagctgcttctcccaacaccgtccaaagtctccactgcctgagttttgtttcggctggtttgaactcatttcgggtgtgtgcatttttcttttggtacccatgtgagacatgaacaacaggagggagggaaagagcccaggtgggacgtgggacaggcttaggggaaagagcttgtcctatctcaggaacaaaattataggctgtgggcagagggtctgaaaggtgggctttggggtagtgcccaagcctggtcgtgttgccaggagtggtgacaagaaatgcagcttacatcaaacgaacatgtagtgcatgcccactgcctgatggccagatggcctgtaggaagagctaccagggcttccagacctgtggaacgaagaggatggggaaaaggcagagggcactgagtgtccctttaaaaactaacccactgaatattccgtgtgatctagaacagtgtggcagctttcacagcacaggaccgttcatcgggggcctaaacgtttccctcagctctgtcaccaactcacttctctcggcttcgttgtctgtaaattggatgaaaagagctctaatgcctttcaggctcttagaagccatagatttggacaagcccagcaagatgggtgtccttccaggcctcttcccctttcctccatctctggcaacagttcttggggtttggcaattgtttggattttttttctttctgcagttgtgtgtatgtgtgtttgtgtgaagaaaaacagactctgtccaggtagaaatggtgaggagggggaagagaattacatttccagggtcagaaacttggcaacagttttcctagagtgactcagacacaccacagtaacaactctcgctgcaattttattttaatttgagaaataaagatttcctccaagccacatgaggactctggcacccacccacaaagcaagacctgtatttataagccgagggctcagggagcctaactgcgggacccgtcagggccccgtgacccatccccgtccccacccccccctccaccgctgggcccatcagtgtgtgttggggggatgcttggcagctgggggtgaggagacaacaaacctcgggaactggagccagagctgcggcctgactgacgccttttgatgctcacgggaaatttctgcccaggatctcagccccaggctggttgtttctacaaatctctctcaaatgtattattttggtgacaaaaatgaaggagctttgtaaattttttttaaaattatgaatcatatcaagtagttgtttacatttcttgaaaaaataggaactcgggcagcagaatcagattggcagaatctttagactacacaggcaataatcaagtctgctgttttggcctttcgtagtagaagtggttgtagtgtttagatatctgtttggtcttgcttcttgtattgcatttttttcaataaacaacaacaaaaagaactctc

SEQ ID NO: 2573 - protein, 566 aa, Homo sapiens
MHCKVSLLDDTVYECVVETWLDSAKEIKKQVRGVPWNFTFNVKFYPPDPAQLTEDITRYYLCLQLRQDIVAGRLPCSFATLALLGSYTIQSELGDYDPELHGVDYVSDFKLAPNQTKELEEKVMELHKSYRSMTPAQADLEFLENAKKLSMYGVDLHKAKDLEGVDIILGVCSSGLLVYKDKLRINRFPWPKVLKISYKRSSFFIKIRPGEQEQYESTIGFKLPSYRAAKKLWKVCVEHHTFFRLTSTDTIPKSKFLALGSKFRYSGRTQAQTRQASALIDRPAPHFERTASKRASRSLDGAAAVDSADRSPRPTSAPAITQGQVAEGGVLDASAKKTVVPKAQKETVKAEVKKEDEPPEQAEPEPTEAWKDLDKSQEEIKKHHASISELKKNFMESVPEPRPSEWDKRLSTHSPFRTLNINGQIPTGEGPPLVKTQTVTISDNANAVKSEIPTKDVPIVHTETKTITYEAAQTDDNSGDLDPGVLLTAQTITSETPSSTTTTQITKTVKGGISETRIEKRIVITGDADIDHDQVLVQAIKEAKEQHPDMSVTKVVVHQETEIADE

SEQ ID NO: 2574 - DNA, 5806 bp, Homo sapiens
agtgcaggtggaggccccggcggggcaaagtggcaggaacctcttaaagggcgagagcggcgcggagccagaacgcggtcggcccggtccccgccgcacccagcccagagaagagtttagtgactgaggccgaaaattcacagcaccaacagaaggaagagggtgaggaagccataaactcaggccaacaagaacctcagcaggaggaatcttgtcaaacagcagctgaaggagataattggtgtgaacagaagctgaaagcttctaatggagacactcctacacatgaagacttgaccaagaacaaggagcggacatcagaaagcagaggactttcacgactattctcctcgtttctcaaaaggcccaaatctcaggtgtccgaggaagaaggcaaagaagtagagtcagataaagaaaaaggtgaaggaggtcagaaagagatagaatttggaaccagtcttgatgaagagatcattttaaaggccccaattgcagctcctgaaccggaactcaaaacagacccatctttggatcttcattcattaagcagtgcagaaacacagcctcaccattacaattaagaattattttcagagtcttcttatttctgaagcatgtgaatattatctgcatcgttaaaagtcctgctcaggaagaactcagagaagatccagattttgaaattaaggaaggagaaggacttgaagagtgctccaaaatagaagtaaaagaagaaagccctcaatcaaaagcagaaacagaattaaaagcttcccaaaaaccaatcagaaaacacaggaacatgcactgcaaggtttctttgttggatgacacagtttatgaatgtgttgtggagaaacatgctaagggacaagatttgcttaaacgagtatgtgagcatctcaatcttttggaagaagactattttggtctagccatttgggataacgcaacctctaagacatggctggattccgccaaagaaataaaaaagcaggttcgtggtgtcccttggaattttacatttaatgtaaagttttatccacctgacccagcacagttaacagaagacataacaagatattatttatgtcttcagcttcggcaggacatagttgcaggacgtctgccctgttcctttgcaaccttagcattattaggttcttacaccatccagtctgaactgggagactacgacccagaactccatggcgtggattatgttagtgattttaaactggccccgaatcagaccaaggaacttgaagagaaggtcatggaactgcataagtcatacaggtccatgactccagctcaggctgacttggagtttcttgagaatgccaaaaagttgtctatgtatggagttgatcttcataaagcaaaggacttggaaggagtagatatcatcctaggtgtctgctctagtggccttctggtttacaaagataagctgagaattaaccgcttcccttggcccaaagtgctgaagatttcttataaacgtagtagctttttcatcaagattcggcctggagagcaagagcagtatgaaagtaccatcggattcaaacttcccagttaccgagcagctaagaaattatggaaagtctgtgtagaacatcacacgtttttcagattgacatctacagacaccattcccaaaagcaaatttcttgcgctaggatccaaatttcgatacagtggccggactcaagctcagaccaggcaagctagtgctctaattgacaggcctgccccacacttcgagcgtacagcaagtaaacgggcgtcccggagcctcgatggagcagcagctgtcgattcggcagaccgaagtcctcggcccacttctgcacctgccattactcagggtcaggttgcagaaggtggcgtcctagatgcctctgctaaaaaaacagtggtccctaaagcacagaaggaaacagtgaaggctgaagtgaaaaaggaagacgagccacctgagcaagctgagccagagcccacagaagcatggaagaaaaagagagaaagactagatggtgaaaacatttatatcagacatagcaatttaatgttggaggatttagacaagagtcaagaggagatcaaaaaacatcatgccagcatcagtgagctgaaaaagaacttcatggagtctgtaccagaaccacggcctagtgaatgggataaacgcttatccactcactcacccttccgaactcttaacatcaatgggcaaatccccacaggagaaggacctcccctggtgaagacacaaactgtcaccatctcagataatgccaatgctgtgaaaagtgaaatcccaaccaaagacgtccctattgtccacactgagaccaagaccatcacttatgaggctgcccagactgtaaaaggtgggatttcagagacacgtattgaaaagagaattgtgatcacaggagatgctgatattgaccatgatcaggtccttgtacaagccatcaaggaggcaaaggagcagcacccagacatgtcagtgaccaaggtggtcgtccaccaggagaccgagattgctgatgagtgagctcaggaactaacctaccccaactctgcccttctcccatccaagagaaaccagcaaaatgataaagaagctaacctgccatagtcagacttcagactttcaagattattctaaatcaccagaaaattaatttcagtttctattgggagtttataccaagagattcttctagatctcattgatccttttgaagagctttttctatattaggatatcagaattgttcaacttttcactctatagactgttttaagagttttggggtttttttaattgggtggtttgtaaccccttcagcctagcctctctgcccatttatttccaaccccaacagacactgacagggtccatggaattcttcgggaaatcctccaaggactcttgtcagctgtgttggaagccaaagccagcttagtgggacttccgcgtctctccctagtcttatcccctttggatgatggcagaaacttcatgaaccagccctttctcagagccagtgatgtgagtgtatcagaatgccagggagggcaccagccctgatccacagacctcggaaagatgcccctgttcctttgttgcgggtggttttggtaaggcagagccctctgctgagaatgtagtattgtttttcccctctccctcctgctttctttttggagcttctttgggtcaaagacatggaagttgcttcagatatctgatactgtgaatgtttgaacatatccgtggccttcacctctccagctacccttttacctcatcagaagcagtggctcagctaagtgctccccctagctcccatctcaggagaccaaatctcacagaaaaataggcactttgggccaaaagctctaatggaacatttttagtggtgatttggggaaggaaagttaatgaggtttttaaaataaggttttctagttttgagagtgtgcacttcacacaggggaatggggttacttctgtctgatcctgggcctttctttcatcccaaatgacaaggaatgtggctcagagaagggtttttcttttttgacctttcttctctcaacaggaacctgcctgaggacacccttctagagcaaggaattgacttttaggagccgttctccccacaagacaccacatgacaaggggtataagccccagccctgctcattcccactcaccagctgaggtctgtcaggttttgaaggcttgattttgtggtgggtttggggcttagttttcctttttttcattttgatttttgaaagtgaagatgatgccctaattcctggtaaggatttggggcatagttttttgtttttttgagacggagtttcgctcttgttgcccaagctggagtgcagtggcgcgatctcggctcactgcaacctccgcctcctgggttcaagcagttctcttgcctcagcctcccaagtagctgggatgacaggcgcacaccaccacgcccagcaaattttttgtatttttagtagaaacgggatttcaccttgttaggctggtctcgaactcctgacctcaggtgatccacccaccttggcctcccaaagtgctgggattacaggtgtgagccaccacgcccggccgatttggggcatttttatttaacagaacttctctaaccttccaactgcttcccacaaacacattggcctcaaggctccttagaatcccagttccagcttcctaaaatagacagtgggtatcgggcagcagtcactggggctcaagggcagtgagcaagagaaatgtctaaagctgcttctcccaacaccgtccaaagtctccactgcctgagttttgtttcggctggtttgaactcatttcgggtgtgtgcatttttcttttggtacccatgtgagacatgaacaacaggagggagggaaagagcccaggtgggacgtgggacaggcttaggggaaagagcttgtcctatctcaggaacaaaattataggctgtgggcagagggtctgaaaggtgggctttggggtagtgcccaagcctggtcgtgttgccaggagtggtgacaagaaatgcagcttacatcaaacgaacatgtagtgcatgcccactgcctgatggccagatggcctgtaggaagagctaccagggcttccagacctgtggaacgaagaggatggggaaaaggcagagggcactgagtgtccctttaaaaactaacccactgaatattccgtgtgatctagaacagtgtggcagctttcacagcacaggaccgttcatcgggggcctaaacgtttccctcagctctgtcaccaactcacttctctcggcttcgttgtctgtaaattggatgaaaagagctctaatgcctttcaggctcttagaagccatagatttggacaagcccagcaagatgggtgtccttccaggcctcttcccctttcctccatctctggcaacagttcttggggtttggcaattgtttggattttttttctttctgcagttgtgtgtatgtgtgtttgtgtgaagaaaaacagactctgtccaggtagaaatggtgaggagggggaagagaattacatttccagggtcagaaacttggcaacagttttcctagagtgactcagacacaccacagtaacaactctcgctgcaattttattttaatttgagaaataaagatttcctccaagccacatgaggactctggcacccacccacaaagcaagacctgtatttataagccgagggctcagggagcctaactgcgggacccgtcagggccccgtgacccatccccgtccccacccccccctccaccgctgggcccatcagtgtgtgttggggggatgcttggcagctgggggtgaggagacaacaaacctcgggaactggagccagagctgcggcctgactgacgccttttgatgctcacgggaaatttctgcccaggatctcagccccaggctggttgtttctacaaatctctctcaaatgtattattttggtgacaaaaatgaaggagctttgtaaattttttttaaaattatgaatcatatcaagtagttgtttacatttcttgaaaaaataggaactcgggcagcagaatcagattggcagaatctttagactacacaggcaataatcaagtctgctgttttggcctttcgtagtagaagtggttgtagtgtttagatatctgtttggtcttgcttcttgtattgcatttttttcaataaacaacaacaaaaagaactctc

SEQ ID NO: 2575 - protein, 588 aa, Homo sapiens; identical to SEQ ID NO: 49

SEQ ID NO: 2576 - DNA, 5965 bp, Homo sapiens
agtgcaggtggaggccccggcggggcaaagtggcaggaacctcttaaagggcgagagcggcgcggagccagaacgcggtcggcccggtccccgccgcacccagcccagagaagagtttagtgactgaggccgaaaattcacagcaccaacagaaggaagagggtgaggaagccataaactcaggccaacaagaacctcagcaggaggaatcttgtcaaacagcagctgaaggagataattggtgtgaacagaagctgaaagcttctaatggagacactcctacacatgaagacttgaccaagaacaaggagcggacatcagaaagcagaggactttcacgactattctcctcgtttctcaaaaggcccaaatctcaggtgtccgaggaagaaggcaaagaagtagagtcagataaagaaaaaggtgaaggaggtcagaaagagatagaatttggaaccagtcttgatgaagagatcattttaaaggccccaattgcagctcctgaaccggaactcaaaacagacccatctttggatcttcattcattaagcagtgcagaaacacagcctcaccattacaattaagaattattttcagagtcttcttatttctgaagcatgtgaatattatctgcatcgttaaaagtcctgctcaggaagaactcagagaagatccagattttgaaattaaggaaggagaaggacttgaagagtgctccaaaatagaagtaaaagaagaaagccctcaatcaaaagcagaaacagaattaaaagcttcccaaaaaccaatcagaaaacacaggaacatgcactgcaaggtttctttgttggatgacacagtttatgaatgtgttgtggagaaacatgctaagggacaagatttgcttaaacgagtatgtgagcatctcaatcttttggaagaagactattttggtctagccatttgggataacgcaacctctaagacatggctggattccgccaaagaaataaaaaagcaggttcgtggtgtcccttggaattttacatttaatgtaaagttttatccacctgacccagcacagttaacagaagacataacaagatattatttatgtcttcagcttcggcaggacatagttgcaggacgtctgccctgttcctttgcaaccttagcattattaggttcttacaccatccagtctgaactgggagactacgacccagaactccatggcgtggattatgttagtgattttaaactggccccgaatcagaccaaggaacttgaagagaaggtcatggaactgcataagtcatacaggtccatgactccagctcaggctgacttggagtttcttgagaatgccaaaaagttgtctatgtatggagttgatcttcataaagcaaaggacttggaaggagtagatatcatcctaggtgtctgctctagtggccttctggtttacaaagataagctgagaattaaccgcttcccttggcccaaagtgctgaagatttcttataaacgtagtagctttttcatcaagattcggcctggagagcaagagcagtatgaaagtaccatcggattcaaacttcccagttaccgagcagctaagaaattatggaaagtctgtgtagaacatcacacgtttttcagattgacatctacagacaccattcccaaaagcaaatttcttgcgctaggatccaaatttcgatacagtggccggactcaagctcagaccaggcaagctagtgctctaattgacaggcctgccccacacttcgagcgtacagcaagtaaacgggcgtcccggagcctcgatggagcagcagctgtcgattcggcagaccgaagtcctcggcccacttctgcacctgccattactcagggtcaggttgcagaaggtggcgtcctagatgcctctgctaaaaaaacagtggtccctaaagcacagaaggaaacagtgaaggctgaagtgaaaaaggaagacgagccacctgagcaagctgagccagagcccacagaagcatggaaggtggaaaaaacccacatcgaggtgacagtacccacctcaaatggtgaccaaacacagaaaaagagagaaagactagatggtgaaaacatttatatcagacatagcaatttaatgttggaggatttagacaagagtcaagaggagatcaaaaaacatcatgccagcatcagtgagctgaaaaagaacttcatggagtctgtaccagaaccacggcctagtgaatgggataaacgcttatccactcactcacccttccgaactcttaacatcaatgggcaaatccccacaggagaaggacctcccctggtgaagacacaaactgtcaccatctcagataatgccaatgctgtgaaaagtgaaatcccaaccaaagacgtccctattgtccacactgagaccaagaccatcacttatgaggctgcccagactgacgacaacagtggagacttggacccaggagtcttgctgacagctcaaactatcacatctgagaccccaagcagcaccaccacaactcaaattaccaagactgtaaaaggtgggatttcagagacacgtattgaaaagagaattgtgatcacaggagatgctgatattgaccatgatcaggtccttgtacaagccatcaaggaggcaaaggagcagcacccagacatgtcagtgaccaaggtggtcgtccaccaggagaccgagattgctgatgagtgagctcaggaactaacctaccccaactctgcccttctcccatccaagagaaaccagcaaaatgataaagaagctaacctgccatagtcagacttcagactttcaagattattctaaatcaccagaaaattaatttcagtttctattgggagtttataccaagagattcttctagatctcattgatccttttgaagagctttttctatattaggatatcagaattgttcaacttttcactctatagactgttttaagagttttggggtttttttaattgggtggtttgtaaccccttcagcctagcctctctgcccatttatttccaaccccaacagacactgacagggtccatggaattcttcgggaaatcctccaaggactcttgtcagctgtgttggaagccaaagccagcttagtgggacttccgcgtctctccctagtcttatcccctttggatgatggcagaaacttcatgaaccagccctttctcagagccagtgatgtgagtgtatcagaatgccagggagggcaccagccctgatccacagacctcggaaagatgcccctgttcctttgttgcgggtggttttggtaaggcagagccctctgctgagaatgtagtattgtttttcccctctccctcctgctttctttttggagcttctttgggtcaaagacatggaagttgcttcagatatctgatactgtgaatgtttgaacatatccgtggccttcacctctccagctacccttttacctcatcagaagcagtggctcagctaagtgctccccctagctcccatctcaggagaccaaatctcacagaaaaataggcactttgggccaaaagctctaatggaacatttttagtggtgatttggggaaggaaagttaatgaggtttttaaaataaggttttctagttttgagagtgtgcacttcacacaggggaatggggttacttctgtctgatcctgggcctttctttcatcccaaatgacaaggaatgtggctcagagaagggtttttcttttttgacctttcttctctcaacaggaacctgcctgaggacacccttctagagcaaggaattgacttttaggagccgttctccccacaagacaccacatgacaaggggtataagccccagccctgctcattcccactcaccagctgaggtctgtcaggttttgaaggcttgattttgtggtgggtttggggcttagttttcctttttttcattttgatttttgaaagtgaagatgatgccctaattcctggtaaggatttggggcatagttttttgtttttttgagacggagtttcgctcttgttgcccaagctggagtgcagtggcgcgatctcggctcactgcaacctccgcctcctgggttcaagcagttctcttgcctcagcctcccaagtagctgggatgacaggcgcacaccaccacgcccagcaaattttttgtatttttagtagaaacgggatttcaccttgttaggctggtctcgaactcctgacctcaggtgatccacccaccttggcctcccaaagtgctgggattacaggtgtgagccaccacgcccggccgatttggggcatttttatttaacagaacttctctaaccttccaactgcttcccacaaacacattggcctcaaggctccttagaatcccagttccagcttcctaaaatagacagtgggtatcgggcagcagtcactggggctcaagggcagtgagcaagagaaatgtctaaagctgcttctcccaacaccgtccaaagtctccactgcctgagttttgtttcggctggtttgaactcatttcgggtgtgtgcatttttcttttggtacccatgtgagacatgaacaacaggagggagggaaagagcccaggtgggacgtgggacaggcttaggggaaagagcttgtcctatctcaggaacaaaattataggctgtgggcagagggtctgaaaggtgggctttggggtagtgcccaagcctggtcgtgttgccaggagtggtgacaagaaatgcagcttacatcaaacgaacatgtagtgcatgcccactgcctgatggccagatggcctgtaggaagagctaccagggcttccagacctgtggaacgaagaggatggggaaaaggcagagggcactgagtgtccctttaaaaactaacccactgaatattccgtgtgatctagaacagtgtggcagctttcacagcacaggaccgttcatcgggggcctaaacgtttccctcagctctgtcaccaactcacttctctcggcttcgttgtctgtaaattggatgaaaagagctctaatgcctttcaggctcttagaagccatagatttggacaagcccagcaagatgggtgtccttccaggcctcttcccctttcctccatctctggcaacagttcttggggtttggcaattgtttggattttttttctttctgcagttgtgtgtatgtgtgtttgtgtgaagaaaaacagactctgtccaggtagaaatggtgaggagggggaagagaattacatttccagggtcagaaacttggcaacagttttcctagagtgactcagacacaccacagtaacaactctcgctgcaattttattttaatttgagaaataaagatttcctccaagccacatgaggactctggcacccacccacaaagcaagacctgtatttataagccgagggctcagggagcctaactgcgggacccgtcagggccccgtgacccatccccgtccccacccccccctccaccgctgggcccatcagtgtgtgttggggggatgcttggcagctgggggtgaggagacaacaaacctcgggaactggagccagagctgcggcctgactgacgccttttgatgctcacgggaaatttctgcccaggatctcagccccaggctggttgtttctacaaatctctctcaaatgtattattttggtgacaaaaatgaaggagctttgtaaattttttttaaaattatgaatcatatcaagtagttgtttacatttcttgaaaaaataggaactcgggcagcagaatcagattggcagaatctttagactacacaggcaataatcaagtctgctgttttggcctttcgtagtagaagtggttgtagtgtttagatatctgtttggtcttgcttcttgtattgcatttttttcaataaacaacaacaaaaagaactctc

SEQ ID NO: 2577 - protein, 641 aa, Homo sapiens; identical to SEQ ID NO: 51

SEQ ID NO: 2578 - DNA, 6060 bp, Homo sapiens
agtgcaggtggaggccccggcggggcaaagtggcaggaacctcttaaagggcgagagcggcgcggagccagaacgcggtcggcccggtccccgccgcacccagcccagagaagagtttagtgactgaggccgaaaattcacagcaccaacagaaggaagagggtgaggaagccataaactcaggccaacaagaacctcagcaggaggaatcttgtcaaacagcagctgaaggagataattggtgtgaacagaagctgaaagcttctaatggagacactcctacacatgaagacttgaccaagaacaaggagcggacatcagaaagcagaggactttcacgactattctcctcgtttctcaaaaggcccaaatctcaggtgtccgaggaagaaggcaaagaagtagagtcagataaagaaaaaggtgaaggaggtcagaaagagatagaatttggaaccagtcttgatgaagagatcattttaaaggccccaattgcagctcctgaaccggaactcaaaacagacccatctttggatcttcattcattaagcagtgcagaaacacagcctgctcaggaagaactcagagaagatccagattttgaaattaaggaaggagaaggacttgaagagtgctccaaaatagaagtaaaagaagaaagccctcaatcaaaagcagaaacagaattaaaagcttcccaaaaaccaatcagaaaacacaggaacatgcactgcaaggtttctttgttggatgacacagtttatgaatgtgttgtggagacatggctggattccgccaaagaaataaaaaagcaggttcgtggtgtcccttggaattttacatttaatgtaaagttttatccacctgacccagcacagttaacagaagacataacaagatattatttatgtcttcagcttcggcaggacatagttgcaggacgtctgccctgttcctttgcaaccttagcattattaggttcttacaccatccagtctgaactgggagactacgacccagaactccatggcgtggattatgttagtgattttaaactggccccgaatcagaccaaggaacttgaagagaaggtcatggaactgcataagtcatacaggtccatgactccagctcaggctgacttggagtttcttgagaatgccaaaaagttgtctatgtatggagttgatcttcataaagcaaaggacttggaaggagtagatatcatcctaggtgtctgctctagtggccttctggtttacaaagataagctgagaattaaccgcttcccttggcccaaagtgctgaagatttcttataaacgtagtagctttttcatcaagattcggcctggagagcaagagcagtatgaaagtaccatcggattcaaacttcccagttaccgagcagctaagaaattatggaaagtctgtgtagaacatcacacgtttttcagattgacatctacagacaccattcccaaaagcaaatttcttgcgctaggatccaaatttcgatacagtggccggactcaagctcagaccaggcaagctagtgctctaattgacaggcctgccccacacttcgagcgtacagcaagtaaacgggcgtcccggagcctcgatggagcagcagctgtcgattcggcagaccgaagtcctcggcccacttctgcacctgccattactcagggtcaggttgcagaaggtggcgtcctagatgcctctgctaaaaaaacagtggtccctaaagcacagaaggaaacagtgaaggctgaagtgaaaaaggaagacgagccacctgagcaagctgagccagagcccacagaagcatggaaggatttagacaagagtcaagaggagatcaaaaaacatcatgccagcatcagtgagctgaaaaagaacttcatggagtctgtaccagaaccacggcctagtgaatgggataaacgcttatccactcactcacccttccgaactcttaacatcaatgggcaaatccccacaggagaaggacctcccctggtgaagacacaaactgtcaccatctcagataatgccaatgctgtgaaaagtgaaatcccaaccaaagacgtccctattgtccacactgagaccaagaccatcacttatgaggctgcccagactgacgacaacagtggagacttggacccaggagtcttgctgacagctcaaactatcacatctgagaccccaagcagcaccaccacaactcaaattaccaagactgtaaaaggtgggatttcagagacacgtattgaaaagagaattgtgatcacaggagatgctgatattgaccatgatcaggtccttgtacaagccatcaaggaggcaaaggagcagcacccagacatgtcagtgaccaaggtggtcgtccaccaggagaccgagattgctgatgagtgagctcaggaactaacctaccccaactctgcccttctcccatccaagagaaaccagcaaaatgataaagaagctaacctgccatagtcagacttcagactttcaagattattctaaatcaccagaaaattaatttcagtttctattgggagtttataccaagagattcttctagatctcattgatccttttgaagagctttttctatattaggatatcagaattgttcaacttttcactctatagactgttttaagagttttggggtttttttaattgggtggtttgtaaccccttcagcctagcctctctgcccatttatttccaaccccaacagacactgacagggtccatggaattcttcgggaaatcctccaaggactcttgtcagctgtgttggaagccaaagccagcttagtgggacttccgcgtctctccctagtcttatcccctttggatgatggcagaaacttcatgaaccagccctttctcagagccagtgatgtgagtgtatcagaatgccagggagggcaccagccctgatccacagacctcggaaagatgcccctgttcctttgttgcgggtggttttggtaaggcagagccctctgctgagaatgtagtattgtttttcccctctccctcctgctttctttttggagcttctttgggtcaaagacatggaagttgcttcagatatctgatactgtgaatgtttgaacatatccgtggccttcacctctccagctacccttttacctcatcagaagcagtggctcagctaagtgctccccctagctcccatctcaggagaccaaatctcacagaaaaataggcactttgggccaaaagctctaatggaacatttttagtggtgatttggggaaggaaagttaatgaggtttttaaaataaggttttctagttttgagagtgtgcacttcacacaggggaatggggttacttctgtctgatcctgggcctttctttcatcccaaatgacaaggaatgtggctcagagaagggtttttcttttttgacctttcttctctcaacaggaacctgcctgaggacacccttctagagcaaggaattgacttttaggagccgttctccccacaagacaccacatgacaaggggtataagccccagccctgctcattcccactcaccagctgaggtctgtcaggttttgaaggcttgattttgtggtgggtttggggcttagttttcctttttttcattttgatttttgaaagtgaagatgatgccctaattcctggtaaggatttggggcatagttttttgtttttttgagacggagtttcgctcttgttgcccaagctggagtgcagtggcgcgatctcggctcactgcaacctccgcctcctgggttcaagcagttctcttgcctcagcctcccaagtagctgggatgacaggcgcacaccaccacgcccagcaaattttttgtatttttagtagaaacgggatttcaccttgttaggctggtctcgaactcctgacctcaggtgatccacccaccttggcctcccaaagtgctgggattacaggtgtgagccaccacgcccggccgatttggggcatttttatttaacagaacttctctaaccttccaactgcttcccacaaacacattggcctcaaggctccttagaatcccagttccagcttcctaaaatagacagtgggtatcgggcagcagtcactggggctcaagggcagtgagcaagagaaatgtctaaagctgcttctcccaacaccgtccaaagtctccactgcctgagttttgtttcggctggtttgaactcatttcgggtgtgtgcatttttcttttggtacccatgtgagacatgaacaacaggagggagggaaagagcccaggtgggacgtgggacaggcttaggggaaagagcttgtcctatctcaggaacaaaattataggctgtgggcagagggtctgaaaggtgggctttggggtagtgcccaagcctggtcgtgttgccaggagtggtgacaagaaatgcagcttacatcaaacgaacatgtagtgcatgcccactgcctgatggccagatggcctgtaggaagagctaccagggcttccagacctgtggaacgaagaggatggggaaaaggcagagggcactgagtgtccctttaaaaactaacccactgaatattccgtgtgatctagaacagtgtggcagctttcacagcacaggaccgttcatcgggggcctaaacgtttccctcagctctgtcaccaactcacttctctcggcttcgttgtctgtaaattggatgaaaagagctctaatgcctttcaggctcttagaagccatagatttggacaagcccagcaagatgggtgtccttccaggcctcttcccctttcctccatctctggcaacagttcttggggtttggcaattgtttggattttttttctttctgcagttgtgtgtatgtgtgtttgtgtgaagaaaaacagactctgtccaggtagaaatggtgaggagggggaagagaattacatttccagggtcagaaacttggcaacagttttcctagagtgactcagacacaccacagtaacaactctcgctgcaattttattttaatttgagaaataaagatttcctccaagccacatgaggactctggcacccacccacaaagcaagacctgtatttataagccgagggctcagggagcctaactgcgggacccgtcagggccccgtgacccatccccgtccccacccccccctccaccgctgggcccatcagtgtgtgttggggggatgcttggcagctgggggtgaggagacaacaaacctcgggaactggagccagagctgcggcctgactgacgccttttgatgctcacgggaaatttctgcccaggatctcagccccaggctggttgtttctacaaatctctctcaaatgtattattttggtgacaaaaatgaaggagctttgtaaattttttttaaaattatgaatcatatcaagtagttgtttacatttcttgaaaaaataggaactcgggcagcagaatcagattggcagaatctttagactacacaggcaataatcaagtctgctgttttggcctttcgtagtagaagtggttgtagtgtttagatatctgtttggtcttgcttcttgtattgcatttttttcaataaacaacaacaaaaagaactctctctgtgaggattgatccacttttaaatttctcttctaccagcaacttgggaaaaattaaatatgggtgggggagacctaaactcaagtcattttctaaagtaagttacccacattgaccaaaatgcagcttcaacgttgagtaaagggatttctgagagctggccaatgccttttgccagctgcagtgagattctgcagcataggccacgataaaggaaggagagaaggggcttctcagacttatttgcagaagggcccagaactcagtatgaaggcattggcagtagtgtagctctagagggatataccccagatggctgagggaagaaagggattgaggtggtaggagttcaaggctcagtccccgtcccagatggcagtggagagtctcatcccgtg

SEQ ID NO: 2579 - protein, 566 aa, Homo sapiens; identical to SEQ ID NO: 2573

SEQ ID NO: 2580 - DNA, 6206 bp, Homo sapiens
agtgcaggtggaggccccggcggggcaaagtggcaggaacctcttaaagggcgagagcggcgcggagccagaacgcggtcggcccggtccccgccgcacccagcccagagaagagtttagtgactgaggccgaaaattcacagcaccaacagaaggaagagggtgaggaagccataaactcaggccaacaagaacctcagcaggaggaatcttgtcaaacagcagctgaaggagataattggtgtgaacagaagctgaaagcttctaatggagacactcctacacatgaagacttgaccaagaacaaggagcggacatcagaaagcagaggactttcacgactattctcctcgtttctcaaaaggcccaaatctcaggtgtccgaggaagaaggcaaagaagtagagtcagataaagaaaaaggtgaaggaggtcagaaagagatagaatttggaaccagtcttgatgaagagatcattttaaaggccccaattgcagctcctgaaccggaactcaaaacagacccatctttggatcttcattcattaagcagtgcagaaacacagcctcaccattacaattaagaattattttcagagtcttcttatttctgaagcatgtgaatattatctgcatcgttaaaagtcctgctcaggaagaactcagagaagatccagattttgaaattaaggaaggagaaggacttgaagagtgctccaaaatagaagtaaaagaagaaagccctcaatcaaaagcagaaacagaattaaaagcttcccaaaaaccaatcagaaaacacaggaacatgcactgcaaggtttctttgttggatgacacagtttatgaatgtgttgtggagaaacatgctaagggacaagatttgcttaaacgagtatgtgagcatctcaatcttttggaagaagactattttggtctagccatttgggataacgcaacctctaagacatggctggattccgccaaagaaataaaaaagcaggttcgtggtgtcccttggaattttacatttaatgtaaagttttatccacctgacccagcacagttaacagaagacataacaagatattatttatgtcttcagcttcggcaggacatagttgcaggacgtctgccctgttcctttgcaaccttagcattattaggttcttacaccatccagtctgaactgggagactacgacccagaactccatggcgtggattatgttagtgattttaaactggccccgaatcagaccaaggaacttgaagagaaggtcatggaactgcataagtcatacaggtccatgactccagctcaggctgacttggagtttcttgagaatgccaaaaagttgtctatgtatggagttgatcttcataaagcaaaggacttggaaggagtagatatcatcctaggtgtctgctctagtggccttctggtttacaaagataagctgagaattaaccgcttcccttggcccaaagtgctgaagatttcttataaacgtagtagctttttcatcaagattcggcctggagagcaagagcagtatgaaagtaccatcggattcaaacttcccagttaccgagcagctaagaaattatggaaagtctgtgtagaacatcacacgtttttcagattgacatctacagacaccattcccaaaagcaaatttcttgcgctaggatccaaatttcgatacagtggccggactcaagctcagaccaggcaagctagtgctctaattgacaggcctgccccacacttcgagcgtacagcaagtaaacgggcgtcccggagcctcgatggagcagcagctgtcgattcggcagaccgaagtcctcggcccacttctgcacctgccattactcagggtcaggttgcagaaggtggcgtcctagatgcctctgctaaaaaaacagtggtccctaaagcacagaaggaaacagtgaaggctgaagtgaaaaaggaagacgagccacctgagcaagctgagccagagcccacagaagcatggaagaaaaagagagaaagactagatggtgaaaacatttatatcagacatagcaatttaatgttggaggatttagacaagagtcaagaggagatcaaaaaacatcatgccagcatcagtgagctgaaaaagaacttcatggagtctgtaccagaaccacggcctagtgaatgggataaacgcttatccactcactcacccttccgaactcttaacatcaatgggcaaatccccacaggagaaggacctcccctggtgaagacacaaactgtcaccatctcagataatgccaatgctgtgaaaagtgaaatcccaaccaaagacgtccctattgtccacactgagaccaagaccatcacttatgaggctgcccagactgtaaaaggtgggatttcagagacacgtattgaaaagagaattgtgatcacaggagatgctgatattgaccatgatcaggtccttgtacaagccatcaaggaggcaaaggagcagcacccagacatgtcagtgaccaaggtggtcgtccaccaggagaccgagattgctgatgagtgagctcaggaactaacctaccccaactctgcccttctcccatccaagagaaaccagcaaaatgataaagaagctaacctgccatagtcagacttcagactttcaagattattctaaatcaccagaaaattaatttcagtttctattgggagtttataccaagagattcttctagatctcattgatccttttgaagagctttttctatattaggatatcagaattgttcaacttttcactctatagactgttttaagagttttggggtttttttaattgggtggtttgtaaccccttcagcctagcctctctgcccatttatttccaaccccaacagacactgacagggtccatggaattcttcgggaaatcctccaaggactcttgtcagctgtgttggaagccaaagccagcttagtgggacttccgcgtctctccctagtcttatcccctttggatgatggcagaaacttcatgaaccagccctttctcagagccagtgatgtgagtgtatcagaatgccagggagggcaccagccctgatccacagacctcggaaagatgcccctgttcctttgttgcgggtggttttggtaaggcagagccctctgctgagaatgtagtattgtttttcccctctccctcctgctttctttttggagcttctttgggtcaaagacatggaagttgcttcagatatctgatactgtgaatgtttgaacatatccgtggccttcacctctccagctacccttttacctcatcagaagcagtggctcagctaagtgctccccctagctcccatctcaggagaccaaatctcacagaaaaataggcactttgggccaaaagctctaatggaacatttttagtggtgatttggggaaggaaagttaatgaggtttttaaaataaggttttctagttttgagagtgtgcacttcacacaggggaatggggttacttctgtctgatcctgggcctttctttcatcccaaatgacaaggaatgtggctcagagaagggtttttcttttttgacctttcttctctcaacaggaacctgcctgaggacacccttctagagcaaggaattgacttttaggagccgttctccccacaagacaccacatgacaaggggtataagccccagccctgctcattcccactcaccagctgaggtctgtcaggttttgaaggcttgattttgtggtgggtttggggcttagttttcctttttttcattttgatttttgaaagtgaagatgatgccctaattcctggtaaggatttggggcatagttttttgtttttttgagacggagtttcgctcttgttgcccaagctggagtgcagtggcgcgatctcggctcactgcaacctccgcctcctgggttcaagcagttctcttgcctcagcctcccaagtagctgggatgacaggcgcacaccaccacgcccagcaaattttttgtatttttagtagaaacgggatttcaccttgttaggctggtctcgaactcctgacctcaggtgatccacccaccttggcctcccaaagtgctgggattacaggtgtgagccaccacgcccggccgatttggggcatttttatttaacagaacttctctaaccttccaactgcttcccacaaacacattggcctcaaggctccttagaatcccagttccagcttcctaaaatagacagtgggtatcgggcagcagtcactggggctcaagggcagtgagcaagagaaatgtctaaagctgcttctcccaacaccgtccaaagtctccactgcctgagttttgtttcggctggtttgaactcatttcgggtgtgtgcatttttcttttggtacccatgtgagacatgaacaacaggagggagggaaagagcccaggtgggacgtgggacaggcttaggggaaagagcttgtcctatctcaggaacaaaattataggctgtgggcagagggtctgaaaggtgggctttggggtagtgcccaagcctggtcgtgttgccaggagtggtgacaagaaatgcagcttacatcaaacgaacatgtagtgcatgcccactgcctgatggccagatggcctgtaggaagagctaccagggcttccagacctgtggaacgaagaggatggggaaaaggcagagggcactgagtgtccctttaaaaactaacccactgaatattccgtgtgatctagaacagtgtggcagctttcacagcacaggaccgttcatcgggggcctaaacgtttccctcagctctgtcaccaactcacttctctcggcttcgttgtctgtaaattggatgaaaagagctctaatgcctttcaggctcttagaagccatagatttggacaagcccagcaagatgggtgtccttccaggcctcttcccctttcctccatctctggcaacagttcttggggtttggcaattgtttggattttttttctttctgcagttgtgtgtatgtgtgtttgtgtgaagaaaaacagactctgtccaggtagaaatggtgaggagggggaagagaattacatttccagggtcagaaacttggcaacagttttcctagagtgactcagacacaccacagtaacaactctcgctgcaattttattttaatttgagaaataaagatttcctccaagccacatgaggactctggcacccacccacaaagcaagacctgtatttataagccgagggctcagggagcctaactgcgggacccgtcagggccccgtgacccatccccgtccccacccccccctccaccgctgggcccatcagtgtgtgttggggggatgcttggcagctgggggtgaggagacaacaaacctcgggaactggagccagagctgcggcctgactgacgccttttgatgctcacgggaaatttctgcccaggatctcagccccaggctggttgtttctacaaatctctctcaaatgtattattttggtgacaaaaatgaaggagctttgtaaattttttttaaaattatgaatcatatcaagtagttgtttacatttcttgaaaaaataggaactcgggcagcagaatcagattggcagaatctttagactacacaggcaataatcaagtctgctgttttggcctttcgtagtagaagtggttgtagtgtttagatatctgtttggtcttgcttcttgtattgcatttttttcaataaacaacaacaaaaagaactctctctgtgaggattgatccacttttaaatttctcttctaccagcaacttgggaaaaattaaatatgggtgggggagacctaaactcaagtcattttctaaagtaagttacccacattgaccaaaatgcagcttcaacgttgagtaaagggatttctgagagctggccaatgccttttgccagctgcagtgagattctgcagcataggccacgataaaggaaggagagaaggggcttctcagacttatttgcagaagggcccagaactcagtatgaaggcattggcagtagtgtagctctagagggatataccccagatggctgagggaagaaagggattgaggtggtaggagttcaaggctcagtccccgtcccagatggcagtggagagtctcatcccgtg

SEQ ID NO: 2581 - protein, 588 aa, Homo sapiens; identical to SEQ ID NO: 49

SEQ ID NO: 2582 - DNA, 6365 bp, Homo sapiens
agtgcaggtggaggccccggcggggcaaagtggcaggaacctcttaaagggcgagagcggcgcggagccagaacgcggtcggcccggtccccgccgcacccagcccagagaagagtttagtgactgaggccgaaaattcacagcaccaacagaaggaagagggtgaggaagccataaactcaggccaacaagaacctcagcaggaggaatcttgtcaaacagcagctgaaggagataattggtgtgaacagaagctgaaagcttctaatggagacactcctacacatgaagacttgaccaagaacaaggagcggacatcagaaagcagaggactttcacgactattctcctcgtttctcaaaaggcccaaatctcaggtgtccgaggaagaaggcaaagaagtagagtcagataaagaaaaaggtgaaggaggtcagaaagagatagaatttggaaccagtcttgatgaagagatcattttaaaggccccaattgcagctcctgaaccggaactcaaaacagacccatctttggatcttcattcattaagcagtgcagaaacacagcctcaccattacaattaagaattattttcagagtcttcttatttctgaagcatgtgaatattatctgcatcgttaaaagtcctgctcaggaagaactcagagaagatccagattttgaaattaaggaaggagaaggacttgaagagtgctccaaaatagaagtaaaagaagaaagccctcaatcaaaagcagaaacagaattaaaagcttcccaaaaaccaatcagaaaacacaggaacatgcactgcaaggtttctttgttggatgacacagtttatgaatgtgttgtggagaaacatgctaagggacaagatttgcttaaacgagtatgtgagcatctcaatcttttggaagaagactattttggtctagccatttgggataacgcaacctctaagacatggctggattccgccaaagaaataaaaaagcaggttcgtggtgtcccttggaattttacatttaatgtaaagttttatccacctgacccagcacagttaacagaagacataacaagatattatttatgtcttcagcttcggcaggacatagttgcaggacgtctgccctgttcctttgcaaccttagcattattaggttcttacaccatccagtctgaactgggagactacgacccagaactccatggcgtggattatgttagtgattttaaactggccccgaatcagaccaaggaacttgaagagaaggtcatggaactgcataagtcatacaggtccatgactccagctcaggctgacttggagtttcttgagaatgccaaaaagttgtctatgtatggagttgatcttcataaagcaaaggacttggaaggagtagatatcatcctaggtgtctgctctagtggccttctggtttacaaagataagctgagaattaaccgcttcccttggcccaaagtgctgaagatttcttataaacgtagtagctttttcatcaagattcggcctggagagcaagagcagtatgaaagtaccatcggattcaaacttcccagttaccgagcagctaagaaattatggaaagtctgtgtagaacatcacacgtttttcagattgacatctacagacaccattcccaaaagcaaatttcttgcgctaggatccaaatttcgatacagtggccggactcaagctcagaccaggcaagctagtgctctaattgacaggcctgccccacacttcgagcgtacagcaagtaaacgggcgtcccggagcctcgatggagcagcagctgtcgattcggcagaccgaagtcctcggcccacttctgcacctgccattactcagggtcaggttgcagaaggtggcgtcctagatgcctctgctaaaaaaacagtggtccctaaagcacagaaggaaacagtgaaggctgaagtgaaaaaggaagacgagccacctgagcaagctgagccagagcccacagaagcatggaaggtggaaaaaacccacatcgaggtgacagtacccacctcaaatggtgaccaaacacagaaaaagagagaaagactagatggtgaaaacatttatatcagacatagcaatttaatgttggaggatttagacaagagtcaagaggagatcaaaaaacatcatgccagcatcagtgagctgaaaaagaacttcatggagtctgtaccagaaccacggcctagtgaatgggataaacgcttatccactcactcacccttccgaactcttaacatcaatgggcaaatccccacaggagaaggacctcccctggtgaagacacaaactgtcaccatctcagataatgccaatgctgtgaaaagtgaaatcccaaccaaagacgtccctattgtccacactgagaccaagaccatcacttatgaggctgcccagactgacgacaacagtggagacttggacccaggagtcttgctgacagctcaaactatcacatctgagaccccaagcagcaccaccacaactcaaattaccaagactgtaaaaggtgggatttcagagacacgtattgaaaagagaattgtgatcacaggagatgctgatattgaccatgatcaggtccttgtacaagccatcaaggaggcaaaggagcagcacccagacatgtcagtgaccaaggtggtcgtccaccaggagaccgagattgctgatgagtgagctcaggaactaacctaccccaactctgcccttctcccatccaagagaaaccagcaaaatgataaagaagctaacctgccatagtcagacttcagactttcaagattattctaaatcaccagaaaattaatttcagtttctattgggagtttataccaagagattcttctagatctcattgatccttttgaagagctttttctatattaggatatcagaattgttcaacttttcactctatagactgttttaagagttttggggtttttttaattgggtggtttgtaaccccttcagcctagcctctctgcccatttatttccaaccccaacagacactgacagggtccatggaattcttcgggaaatcctccaaggactcttgtcagctgtgttggaagccaaagccagcttagtgggacttccgcgtctctccctagtcttatcccctttggatgatggcagaaacttcatgaaccagccctttctcagagccagtgatgtgagtgtatcagaatgccagggagggcaccagccctgatccacagacctcggaaagatgcccctgttcctttgttgcgggtggttttggtaaggcagagccctctgctgagaatgtagtattgtttttcccctctccctcctgctttctttttggagcttctttgggtcaaagacatggaagttgcttcagatatctgatactgtgaatgtttgaacatatccgtggccttcacctctccagctacccttttacctcatcagaagcagtggctcagctaagtgctccccctagctcccatctcaggagaccaaatctcacagaaaaataggcactttgggccaaaagctctaatggaacatttttagtggtgatttggggaaggaaagttaatgaggtttttaaaataaggttttctagttttgagagtgtgcacttcacacaggggaatggggttacttctgtctgatcctgggcctttctttcatcccaaatgacaaggaatgtggctcagagaagggtttttcttttttgacctttcttctctcaacaggaacctgcctgaggacacccttctagagcaaggaattgacttttaggagccgttctccccacaagacaccacatgacaaggggtataagccccagccctgctcattcccactcaccagctgaggtctgtcaggttttgaaggcttgattttgtggtgggtttggggcttagttttcctttttttcattttgatttttgaaagtgaagatgatgccctaattcctggtaaggatttggggcatagttttttgtttttttgagacggagtttcgctcttgttgcccaagctggagtgcagtggcgcgatctcggctcactgcaacctccgcctcctgggttcaagcagttctcttgcctcagcctcccaagtagctgggatgacaggcgcacaccaccacgcccagcaaattttttgtatttttagtagaaacgggatttcaccttgttaggctggtctcgaactcctgacctcaggtgatccacccaccttggcctcccaaagtgctgggattacaggtgtgagccaccacgcccggccgatttggggcatttttatttaacagaacttctctaaccttccaactgcttcccacaaacacattggcctcaaggctccttagaatcccagttccagcttcctaaaatagacagtgggtatcgggcagcagtcactggggctcaagggcagtgagcaagagaaatgtctaaagctgcttctcccaacaccgtccaaagtctccactgcctgagttttgtttcggctggtttgaactcatttcgggtgtgtgcatttttcttttggtacccatgtgagacatgaacaacaggagggagggaaagagcccaggtgggacgtgggacaggcttaggggaaagagcttgtcctatctcaggaacaaaattataggctgtgggcagagggtctgaaaggtgggctttggggtagtgcccaagcctggtcgtgttgccaggagtggtgacaagaaatgcagcttacatcaaacgaacatgtagtgcatgcccactgcctgatggccagatggcctgtaggaagagctaccagggcttccagacctgtggaacgaagaggatggggaaaaggcagagggcactgagtgtccctttaaaaactaacccactgaatattccgtgtgatctagaacagtgtggcagctttcacagcacaggaccgttcatcgggggcctaaacgtttccctcagctctgtcaccaactcacttctctcggcttcgttgtctgtaaattggatgaaaagagctctaatgcctttcaggctcttagaagccatagatttggacaagcccagcaagatgggtgtccttccaggcctcttcccctttcctccatctctggcaacagttcttggggtttggcaattgtttggattttttttctttctgcagttgtgtgtatgtgtgtttgtgtgaagaaaaacagactctgtccaggtagaaatggtgaggagggggaagagaattacatttccagggtcagaaacttggcaacagttttcctagagtgactcagacacaccacagtaacaactctcgctgcaattttattttaatttgagaaataaagatttcctccaagccacatgaggactctggcacccacccacaaagcaagacctgtatttataagccgagggctcagggagcctaactgcgggacccgtcagggccccgtgacccatccccgtccccacccccccctccaccgctgggcccatcagtgtgtgttggggggatgcttggcagctgggggtgaggagacaacaaacctcgggaactggagccagagctgcggcctgactgacgccttttgatgctcacgggaaatttctgcccaggatctcagccccaggctggttgtttctacaaatctctctcaaatgtattattttggtgacaaaaatgaaggagctttgtaaattttttttaaaattatgaatcatatcaagtagttgtttacatttcttgaaaaaataggaactcgggcagcagaatcagattggcagaatctttagactacacaggcaataatcaagtctgctgttttggcctttcgtagtagaagtggttgtagtgtttagatatctgtttggtcttgcttcttgtattgcatttttttcaataaacaacaacaaaaagaactctctctgtgaggattgatccacttttaaatttctcttctaccagcaacttgggaaaaattaaatatgggtgggggagacctaaactcaagtcattttctaaagtaagttacccacattgaccaaaatgcagcttcaacgttgagtaaagggatttctgagagctggccaatgccttttgccagctgcagtgagattctgcagcataggccacgataaaggaaggagagaaggggcttctcagacttatttgcagaagggcccagaactcagtatgaaggcattggcagtagtgtagctctagagggatataccccagatggctgagggaagaaagggattgaggtggtaggagttcaaggctcagtccccgtcccagatggcagtggagagtctcatcccgtg

SEQ ID NO: 2583 - protein, 641 aa, Homo sapiens; identical to SEQ ID NO: 51

SEQ ID NO: 2584 - DNA, 2402 bp, Homo sapiens
ggcgggagggcgcgcgccagggtcgctcgctcgctccctccctccgctggtgcgtttagtcagtcagccagcagcagccggcgggcccgcgagccgcagagggcccgagcctcggacgccggcgcctcctcctgccattgttcgtcgggctgcagcagtggcgggcgcaggagcccggccccggagccaccgcaacatcatgacaacagagaagagtttagtgactgaggccgaaaattcacagcaccaacagaaggaagagggtgaggaagccataaactcaggccaacaagaacctcagcaggaggaatcttgtcaaacagcagctgaaggagataattggtgtgaacagaagctgaaagcttctaatggagacactcctacacatgaagacttgaccaagaacaaggagcggacatcagaaagcagaggactttcacgactattctcctcgtttctcaaaaggcccaaatctcaggtgtccgaggaagaaggcaaagaagtagagtcagataaagaaaaaggtgaaggaggtcagaaagagatagaatttggaaccagtcttgatgaagagatcattttaaaggccccaattgcagctcctgaaccggaactcaaaacagacccatctttggatcttcattcattaagcagtgcagaaacacagcctgctcaggaagaactcagagaagatccagattttgaaattaaggaaggagaaggacttgaagagtgctccaaaatagaagtaaaagaagaaagccctcaatcaaaagcagaaacagaattaaaagcttcccaaaaaccaatcagaaaacacaggaacatgcactgcaaggtttctttgttggatgacacagtttatgaatgtgttgtggagaaacatgctaagggacaagatttgcttaaacgagtatgtgagcatctcaatcttttggaagaagactattttggtctagccatttgggataacgcaacctctaagacatggctggattccgccaaagaaataaaaaagcaggttcgtggtgtcccttggaattttacatttaatgtaaagttttatccacctgacccagcacagttaacagaagacataacaagatattatttatgtcttcagcttcggcaggacatagttgcaggacgtctgccctgttcctttgcaaccttagcattattaggttcttacaccatccagtctgaactgggagactacgacccagaactccatggcgtggattatgttagtgattttaaactggccccgaatcagaccaaggaacttgaagagaaggtcatggaactgcataagtcatacaggtccatgactccagctcaggctgacttggagtttcttgagaatgccaaaaagttgtctatgtatggagttgatcttcataaagcaaaggacttggaaggagtagatatcatcctaggtgtctgctctagtggccttctggtttacaaagataagctgagaattaaccgcttcccttggcccaaagtgctgaagatttcttataaacgtagtagctttttcatcaagattcggcctggagagcaagagcagtatgaaagtaccatcggattcaaacttcccagttaccgagcagctaagaaattatggaaagtctgtgtagaacatcacacgtttttcagattgacatctacagacaccattcccaaaagcaaatttcttgcgctaggatccaaatttcgatacagtggccggactcaagctcagaccaggcaagctagtgctctaattgacaggcctgccccacacttcgagcgtacagcaagtaaacgggcgtcccggagcctcgatggagcagcagctgtcgattcggcagaccgaagtcctcggcccacttctgcacctgccattactcagggtcaggttgcagaaggtggcgtcctagatgcctctgctaaaaaaacagtggtccctaaagcacagaaggaaacagtgaaggctgaagtgaaaaaggaagacgagccacctgagcaagctgagccagagcccacagaagcatggaaggtggaaaaaacccacatcgaggtgacagtacccacctcaaatggtgaccaaacacagaaaaagagagaaagactagatggtgaaaacatttatatcagacatagcaatttaatgttggaggatttagacaagagtcaagaggagatcaaaaaacatcatgccagcatcagtgagctgaaaaagaacttcatggagtctgtaccagaaccacggcctagtgaatgggataaacgcttatccactcactcacccttccgaactcttaacatcaatgggcaaatccccacaggagaaggagtgagtactttgtccacatgaccaattgtgaaaatggagggaataaatgtttttatgtatt

SEQ ID NO: 2585 - protein, 720 aa, Homo sapiens
MTTEKSLVTEAENSQHQQKEEGEEAINSGQQEPQQEESCQTAAEGDNWCEQKLKASNGDTPTHEDLTKNKERTSESRGLSRLFSSFLKRPKSQVSEEEGKEVESDKEKGEGGQKEIEFGTSLDEEIILKAPIAAPEPELKTDPSLDLHSLSSAETQPAQEELREDPDFEIKEGEGLEECSKIEVKEESPQSKAETELKASQKPIRKHRNMHCKVSLLDDTVYECVVEKHAKGQDLLKRVCEHLNLLEEDYFGLAIWDNATSKTWLDSAKEIKKQVRGVPWNFTFNVKFYPPDPAQLTEDITRYYLCLQLRQDIVAGRLPCSFATLALLGSYTIQSELGDYDPELHGVDYVSDFKLAPNQTKELEEKVMELHKSYRSMTPAQADLEFLENAKKLSMYGVDLHKAKDLEGVDIILGVCSSGLLVYKDKLRINRFPWPKVLKISYKRSSFFIKIRPGEQEQYESTIGFKLPSYRAAKKLWKVCVEHHTFFRLTSTDTIPKSKFLALGSKFRYSGRTQAQTRQASALIDRPAPHFERTASKRASRSLDGAAAVDSADRSPRPTSAPAITQGQVAEGGVLDASAKKTVVPKAQKETVKAEVKKEDEPPEQAEPEPTEAWKVEKTHIEVTVPTSNGDQTQKKRERLDGENIYIRHSNLMLEDLDKSQEEIKKHHASISELKKNFMESVPEPRPSEWDKRLSTHSPFRTLNINGQIPTGEGVSTLST

SEQ ID NO: 2586 - DNA, 532 bp, Homo sapiens
ggtatgtcatcagtccaaatacctagctaactcactttctgatttagaggccttaactttttgaccaggaacgttttcaaagcaattgcttattctcatagactcaacaaagttattcttcattctttctaaatgaagatgtctcccatgaacctataaaatattttcgtagagttatgtcagtaagactgtaagctatctcagaagttataaggtgacccactctatattaaaaaaaaaaaaaaaaaaaaaaaaactaaaataactatggcggcaggcacggtggctcacgcccgtaatcccagcaatttgggaggccaggacgggtggatcacagcctggccaacatggcaaaaccccgtctttactaaaaatacaaaaattagctgggcctgctggcagacacctgtaatcccagctatttgggaggctgaggcaggagaatcacttgaacctgggaggcagaggttgcagtgagctgagattgcgccactgcacgccacgccagcctgggcaacagagcaagactgtc

SEQ ID NO: 2587 - protein, 69 aa, Homo sapiens [sequence omitted]

SEQ ID NO: 2588 - DNA, 5220 bp, Homo sapiens
gggtcccaagcattcggtagttcctagtaaaagccagatgaccacctcgtcggagtctctgcaaagctttgcctttggctccctctccataagcagcaaggagacagaagagaaggaggagggggcagctggctatcttgatattaaggagatgccaagaggcccaactgggggatgtataggagtggaggaacaggccagtgccttaaagttctcagtaacaccagcttcctgtcagctgcaacctggtgtaaaaaaggcagagagtagtgaagaacatgttacaccaggagagccacctggaaaacaaaatggatcatttcttgactttcatgtgggtaaccagttccccaccctcattcgaagtttccaggtagtaatttattcaatgatgcaggtctaatgactgtctttggaagagggccagaatctgtcctgtggaggaggtggtggtggtatggtgagggtagtggcctccctgctgttttcaaaatcacagactaaaagcctttgattgtgccaaagaaattcattcagagcaattaactgcatggctagaaatgctttcttctctgataacttaacaaaactccagctgtcagtatgaagctggttaagtgtgttcatcttttccttgctcaagtgtgggctatggaaagaggtgaattgcggtgacttctgtggtgaggaggcttcagtgttctgagaccatgcttaaaaaattcaaatactcttaattaaaggggcaactcatcttcttatgagatttcaggccccaaataatttatgtactgcagccacattgtgcagcccaccactcccactgaccccacccacaagagcattcaggatcataggcactgatttcctatgctaaggtggttggccacttaaccttattacaatcaaatggtagtttcagtgtgatttatactcctggggaaggtgagcagatggacaagaaggcctttggtattccactaatgttcattcttctgaaattctgggattaatcaccaggtggtggtagaactgattgtttttttctttccagttttccaaatactgtctcttctcaataactccaaagtgaatctctgacattgatttgaaagaagttaatgaattcgagggtaatgcattccattgccactgctgtttcatgtaccattcgtacttagtggaggaaatgtggctgattttcttaattataatggtacagacacaaggacaaatcaaagtgattgctatttggcaaatcgttttatattcaaattctgaaggtcagtctgaagtgttttatatcaccaatcataactgtctgctcttacagctttccattaagcttatgaaagtgattacagtaatgctgctttttaatatccctcatgatttgacaccttgtcagggttactttggaatactgtcgaagtcttaggcagggtaaacacctttgtagattgagctagctctgtacttaattaaagctaacactttgatcagatcagtgtcagaagattacttctccattgccttcagaaatactctagtaactctttccttactgcttcacagcctcccctggtgaagacacaaactgtcaccatctcagataatgccaatgctgtgaaaagtgaaatcccaaccaaagacgtccctattgtccacactgagaccaagaccatcacttatgaggctgcccagactgacgacaacagtggagacttggacccaggagtcttgctgacagctcaaactatcacatctgagaccccaagcagcaccaccacaactcaaattaccaagactgtaaaaggtgggatttcagagacacgtattgaaaagagaattgtgatcacaggagatgctgatattgaccatgatcaggtccttgtacaagccatcaaggaggcaaaggagcagcacccagacatgtcagtgaccaaggtggtcgtccaccaggagaccgagattgctgatgagtgagctcaggaactaacctaccccaactctgcccttctcccatccaagagaaaccagcaaaatgataaagaagctaacctgccatagtcagacttcagactttcaagattattctaaatcaccagaaaattaatttcagtttctattgggagtttataccaagagattcttctagatctcattgatccttttgaagagctttttctatattaggatatcagaattgttcaacttttcactctatagactgttttaagagttttggggtttttttaattgggtggtttgtaaccccttcagcctagcctctctgcccatttatttccaaccccaacagacactgacagggtccatggaattcttcgggaaatcctccaaggactcttgtcagctgtgttggaagccaaagccagcttagtgggacttccgcgtctctccctagtcttatcccctttggatgatggcagaaacttcatgaaccagccctttctcagagccagtgatgtgagtgtatcagaatgccagggagggcaccagccctgatccacagacctcggaaagatgcccctgttcctttgttgcgggtggttttggtaaggcagagccctctgctgagaatgtagtattgtttttcccctctccctcctgctttctttttggagcttctttgggtcaaagacatggaagttgcttcagatatctgatactgtgaatgtttgaacatatccgtggccttcacctctccagctacccttttacctcatcagaagcagtggctcagctaagtgctccccctagctcccatctcaggagaccaaatctcacagaaaaataggcactttgggccaaaagctctaatggaacatttttagtggtgatttggggaaggaaagttaatgaggtttttaaaataaggttttctagttttgagagtgtgcacttcacacaggggaatggggttacttctgtctgatcctgggcctttctttcatcccaaatgacaaggaatgtggctcagagaagggtttttcttttttgacctttcttctctcaacaggaacctgcctgaggacacccttctagagcaaggaattgacttttaggagccgttctccccacaagacaccacatgacaaggggtataagccccagccctgctcattcccactcaccagctgaggtctgtcaggttttgaaggcttgattttgtggtgggtttggggcttagttttcctttttttcattttgatttttgaaagtgaagatgatgccctaattcctggtaaggatttggggcatagttttttgtttttttgagacggagtttcgctcttgttgcccaagctggagtgcagtggcgcgatctcggctcactgcaacctccgcctcctgggttcaagcagttctcttgcctcagcctcccaagtagctgggatgacaggcgcacaccaccacgcccagcaaattttttgtatttttagtagaaacgggatttcaccttgttaggctggtctcgaactcctgacctcaggtgatccacccaccttggcctcccaaagtgctgggattacaggtgtgagccaccacgcccggccgatttggggcatttttatttaacagaacttctctaaccttccaactgcttcccacaaacacattggcctcaaggctccttagaatcccagttccagcttcctaaaatagacagtgggtatcgggcagcagtcactggggctcaagggcagtgagcaagagaaatgtctaaagctgcttctcccaacaccgtccaaagtctccactgcctgagttttgtttcggctggtttgaactcatttcgggtgtgtgcatttttcttttggtacccatgtgagacatgaacaacaggagggagggaaagagcccaggtgggacgtgggacaggcttaggggaaagagcttgtcctatctcaggaacaaaattataggctgtgggcagagggtctgaaaggtgggctttggggtagtgcccaagcctggtcgtgttgccaggagtggtgacaagaaatgcagcttacatcaaacgaacatgtagtgcatgcccactgcctgatggccagatggcctgtaggaagagctaccagggcttccagacctgtggaacgaagaggatggggaaaaggcagagggcactgagtgtccctttaaaaactaacccactgaatattccgtgtgatctagaacagtgtggcagctttcacagcacaggaccgttcatcgggggcctaaacgtttccctcagctctgtcaccaactcacttctctcggcttcgttgtctgtaaattggatgaaaagagctctaatgcctttcaggctcttagaagccatagatttggacaagcccagcaagatgggtgtccttccaggcctcttcccctttcctccatctctggcaacagttcttggggtttggcaattgtttggattttttttctttctgcagttgtgtgtatgtgtgtttgtgtgaagaaaaacagactctgtccaggtagaaatggtgaggagggggaagagaattacatttccagggtcagaaacttggcaacagttttcctagagtgactcagacacaccacagtaacaactctcgctgcaattttattttaatttgagaaataaagatttcctccaagccacatgaggactctggcacccacccacaaagcaagacctgtatttataagccgagggctcagggagcctaactgcgggacccgtcagggccccgtgacccatccccgtccccacccccccctccaccgctgggcccatcagtgtgtgttggggggatgcttggcagctgggggtgaggagacaacaaacctcgggaactggagccagagctgcggcctgactgacgccttttgatgctcacgggaaatttctgcccaggatctcagccccaggctggttgtttctacaaatctctctcaaatgtattattttggtgacaaaaatgaaggagctttgtaaattttttttaaaattatgaatcatatcaagtagttgtttacatttcttgaaaaaataggaactcgggcagcagaatcagattggcagaatctttagactacacaggcaataatcaagtctgctgttttggcctttcgtagtagaagtggttgtagtgtttagatatctgtttggtcttgcttcttgtattgcatttttttcaataaacaacaacaaaaagaactctc

SEQ ID NO: 2589 - protein, 135 aa, Homo sapiens
MACRKSYQGFQTCGTKRMGKRQRALSVPLKTNPLNIPCDLEQCGSFHSTGPFIGGLNVSLSSVTNSLLSASLSVNWMKRALMPFRLLEAIDLDKPSKMGVLPGLFPFPPSLATVLGVWQLFGFFFFLQLCVCVFV

SEQ ID NO: 2590 - DNA, 752 bp, Homo sapiens
tgattacagtaatgctgctttttaatatccctcatgatttgacaccttgtcagggttactttggaatactgtcgaagtcttaggcagggtaaacacctttgtagattgagctagctctgtacttaattaaagctaacactttgatcagatcagtgtcagaagattacttctccattgccttcagaaatactctagtaactctttccttactgcttcacagcctcccctggtgaagacacaaactgtcaccatctcagataatgccaatgctgtgaaaagtgaaatcccaaccaaagacgtccctattgtccacactgagaccaagaccatcacttatgaggctgcccagactgacgacaacagtggagacttggacccaggagtcttgctgacagctcaaactatcacatctgagaccccaagcagcaccaccacaactcaaattaccaaggtaacagaccagctagaacctctttatggaacccaggggcaggctaagcttgctgccacctctctgcaagaaggaccctagtccataagcaaatattttcagctccatccctagtaagccacattattcaaagagtcctggatggaaaggccctgctgccttccccagcaataaatctagggagataccctgagagtatccctgcctacttagtagtctcctaaaggtaggtgtggttgttctctttacacatctgtctctctggtcagtgagtcccctgtctggctgtggaagtaagttt

SEQ ID NO: 2591 - protein, 131 aa, Homo sapiens
HFDQISVRRLLLHCLQKYSSNSFLTASQPPLVKTQTVTISDNANAVKSEIPTKDVPIVHTETKTITYEAAQTDDNSGDLDPGVLLTAQTITSETPSSTTTTQITKVTDQLEPLYGTQGQAKLAATSLQEGP

SEQ ID NO: 2592 - DNA, 3914 bp, Homo sapiens
atggctttcatggagttgggaaagcacagggtactgtgcccaggaaacgtggagtttgatactggagagttagagtttaacaaaatggattgtgtcatagagggccatggataccaggaagaggaatttgacctttatcctcctccgcgcgcggactgggacccggacccgcgcggcgctgcggcgccagagcgcccagacgacggcgagatgacggccgggagccccgaagaatgcggggaggtgcggaggagccccgagggccgcgtctctcgcttgggccgccgcctgggccgccgccggcgcccgcgctccccgcccgagcctctgcgggtgcgggcgcggctgcggctgcgctcgccgtcgggggcgttcgcggcgctgggggcgctcgtggtactggtgggtatgggcattgcagtggccggctactggccgcaccgggccggggccccagggtcccgggccgccaatgccagctcgccccagatgagcgagctgcgacgcgagggtcgcggcgggggccgggctcacggcccgcacgagcggctgcggctcctcgggccggtgatcatgggcgtcggcctgttcgtgttcatctgcgccaacacactgctgtatgagaaccgagacttggagacgcgacggctccgccagggggtgctgcgggcccaggcgctccggccccccgacggcccgggctgggactgcgccctccttcccagccccggccctaggagtccccgagccgtaggctgcgcagagccagaaatctgggacccgtccccgcgtcggggtacttcacccgtcccgtcagtgcggagtctgcgttcagagcccgctaatcctcgcttggggttacctgccttgctcaacagctacccgctgaagggccccgggctgcccccaccctggggtccacggacgcagactggccatgtgatcatcaccgtgcagccgtctggctcctgcattgaacattccaagtctctggatctgggccttggggagctcctccttggggccccagcagctcgggactgtgctcaccgaagctggccacggctggaccgcctcagtcttgggggctatgccaaattgggaggaggaggggacttgggggcccgggtctgaagagaggggagacagcctgctctgaggctgcagcatggaccatgctaataggaccaaaggaccaggagtcccaacgtctaatagatgtttcagtcacatcccaggctggggatggatgctctgaccacagcagctgtgaagggcatcctgacctgcatgcgggcagagaaatgccagctgcaccagggctcagtgagctggagagggtgcgtttcactgtggggtgtggaggactcgcctcaggaatttcttcagcctctgtaagtggccttagccctaacagggctggaggtccaggccagggtgactgggagatgtacccagtgtcttggcaaacccaagaaagtggtgggcaagggcccctaagactgggaggtaggttgggatgttacaggctggggcaggctccctccaaggcggcactggtgatggagtgtggggcctctgggaagatggaccacgggatgagactctccactgccatctgggacggggactgagccttgaactcctaccacctcaatccctttcttccctcagccatctggggtatatccctctagagctacactactgccaatgccttcatactgagttctgggcccttctgcaaataagtctgagaagccccttctctccttcctttatcgtggcctatgctgcagaatctcactgcagctggcaaaaggcattggccagctctcagaaatccctttactcaacgttgaagctgcattttggtcaatgtgggtaacttactttagaaaatgacttgagtttaggtctcccccacccatatttaatttttcccaagttgctggtagaagagaaatttaaaagtggatcaatcctcacagagagagttctttttgttgttgtttattgaaaaaaatgcaatacaagaagcaagaccaaacagatatctaaacactacaaccacttctactacgaaaggccaaaacagcagacttgattattgcctgtgtagtctaaagattctgccaatctgattctgctgcccgagttcctattttttcaagaaatgtaaacaactacttgatatgattcataattttaaaaaaaatttacaaagctccttcatttttgtcaccaaaataatacatttgagagagatttgtagaaacaaccagcctggggctgagatcctgggcagaaatttcccgtgagcatcaaaaggcgtcagtcaggccgcagctctggctccagttcccgaggtttgttgtctcctcacccccagctgccaagcatccccccaacacacactgatgggcccagcggtggaggggggggtggggacggggatgggtcacggggccctgacgggtcccgcagttaggctccctgagccctcggcttataaatacaggtcttgctttgtgggtgggtgccagagtcctcatgtggcttggaggaaatctttatttctcaaattaaaataaaattgcagcgagagttgttactgtggtgtgtctgagtcactctaggaaaactgttgccaagtttctgaccctggaaatgtaattctcttccccctcctcaccatttctacctggacagagtctgtttttcttcacacaaacacacatacacacaactgcagaaagaaaaaaaatccaaacaattgccaaaccccaagaactgttgccagagatggaggaaaggggaagaggcctggaaggacacccatcttgctgggcttgtccaaatctatggcttctaagagcctgaaaggcattagagctcttttcatccaatttacagacaacgaagccgagagaagtgagttggtgacagagctgagggaaacgtttaggcccccgatgaacggtcctgtgctgtgaaagctgccacactgttctagatcacacggaatattcagtgggttagtttttaaagggacactcagtgccctctgccttttccccatcctcttcgttccacaggtctggaagccctggtagctcttcctacaggccatctggccatcaggcagtgggcatgcactacatgttcgtttgatgtaagctgcatttcttgtcaccactcctggcaacacgaccaggcttgggcactaccccaaagcccacctttcagaccctctgcccacagcctataattttgttcctgagataggacaagctctttcccctaagcctgtcccacgtcccacctgggctctttccctccctcctgttgttcatgtctcacatgggtaccaaaagaaaaatgcacacacccgaaatgagttcaaaccagccgaaacaaaactcaggcagtggagactttggacggtgttgggagaagcagctttagacatttctcttgctcactgcccttgagccccagtgactgctgcccgatacccactgtctattttaggaagctggaactgggattctaaggagccttgaggccaatgtgtttgtgggaagcagttggaaggttagagaagttctgttaaataaaaatgccccaaatcggccgggcgtggtggctcacacctgtaatcccagcactttgggaggccaaggtgggtggatcacctgaggtcaggagttcgagaccagcctaacaaggtgaaatcccgtttctactaaaaatacaaaaaatttgctgggcgtggtggtgtgcgcctgtcatcccagctacttgggaggctgaggcaagagaactgcttgaacccaggaggcggaggttgcagtgagccgagatcgcgccactgcactccagcttgggcaacaagagcgaaactccgtctc

SEQ ID NO: 2593 - protein, 377 aa, Homo sapiens
MAFMELGKHRVLCPGNVEFDTGELEFNKMDCVIEGHGYQEEEFDLYPPPRADWDPDPRGAAAPERPDDGEMTAGSPEECGEVRRSPEGRVSRLGRRLGRRRRPRSPPEPLRVRARLRLRSPSGAFAALGALVVLVGMGIAVAGYWPHRAGAPGSRAANASSPQMSELRREGRGGGRAHGPHERLRLLGPVIMGVGLFVFICANTLLYENRDLETRRLRQGVLRAQALRPPDGPGWDCALLPSPGPRSPRAVGCAEPEIWDPSPRRGTSPVPSVRSLRSEPANPRLGLPALLNSYPLKGPGLPPPWGPRTQTGHVIITVQPSGSCIEHSKSLDLGLGELLLGAPAARDCAHRSWPRLDRLSLGGYAKLGGGGDLGARV

SEQ ID NO: 2594 - DNA, 2613 bp, Homo sapiens
atggctttcatggagttgggaaagcacagggtactgtgcccaggaaacgtggagtttgatactggagagttagagtttaacaaaatggattgtgtcatagagggccatggataccaggaagaggaatttgacctttatcctcctccgcgcgcggactgggacccggacccgcgcggcgctgcggcgccagagcgcccagacgacggcgagatgacggccgggagccccgaagaatgcggggaggtgcggaggagccccgagggccgcgtctctcgcttgggccgccgcctgggccgccgccggcgcccgcgctccccgcccgagcctctgcgggtgcgggcgcggctgcggctgcgctcgccgtcgggggcgttcgcggcgctgggggcgctcgtggtactggtgggtatgggcattgcagtggccggctactggccgcaccgggccggggccccagggtcccgggccgccaatgccagctcgccccagatgagcgagctgcgacgcgagggtcgcggcgggggccgggctcacggcccgcacgagcggctgcggctcctcgggccggtgatcatgggcgtcggcctgttcgtgttcatctgcgccaacacactgctgtatgagaaccgagacttggagacgcgacggctccgccagggggtgctgcgggcccaggcgctccggccccccgacggcccgggctgggactgcgccctccttcccagccccggccctaggagtccccgagccgtaggctgcgcagagccagaaatctgggacccgtccccgcgtcggggtacttcacccgtcccgtcagtgcggagtctgcgttcagagcccgctaatcctcgcttggggttacctgccttgctcaacagctacccgctgaagggccccgggctgcccccaccctggggtccacggacgcagactggccatgtgatcatcaccgtgcagccgtctggctcctgcattgaacattccaagtctctggatctgggccttggggagctcctccttggggccccagcagctcgggactgtgctcaccgaagctggccacggctggaccgcctcagtcttgggggctatgccaaattgggaggaggaggggacttgggggcccgggtctgaagagaggggagacagcctgctctgaggctgcagcatggaccatgctaataggaccaaaggaccaggagtcccaacgtctaatagatgtttcagtcacatcccaggctggggatggatgctctgaccacagcagctgtgaagggcatcctgacctgcatgcgggcagagaaatgccagctgcaccagggctcagtgagctggagagggtgcgtttcactgtggggtgtggaggactcgcctcaggaatttcttcagcctctgtaagtggccttagccctaacagggctggaggtccaggccagggtgactgggagatgtacccagtgtcttggcaaacccaagaaagtggtgggcaagggcccctaagactgggaggtaggttgggatgttacaggctggggcaggctccctccaaggcggcactggtgatggagtgtggggcctctgggaagatggaccacgggatgagactctccactgccatctgggacggggactgagccttgaactcctaccacctcaatccctttcttccctcagccatctggggtatatccctctagagctacactactgccaatgccttcatactgagttctgggcccttctgcaaataagtctgagaagccccttctctccttcctttatcgtggcctatgctgcagaatctcactgcagctggcaaaaggcattggccagctctcagaaatccctttactcaacgttgaagctgcattttggtcaatgtgggtaacttactttagaaaatgacttgagtttaggtctcccccacccatatttaatttttcccaagttgctggtagaagagaaatttaaaagtggatcaatcctcacagagagagttctttttgttgttgtttattgaaaaaaatgcaatacaagaagcaagaccaaacagatatctaaacactacaaccacttctactacgaaaggccaaaacagcagacttgattattgcctgtgtagtctaaagattctgccaatctgattctgctgcccgagttcctattttttcaagaaatgtaaacaactacttgatatgattcataattttaaaaaaaatttacaaagctccttcatttttgtcaccaaaataatacatttgagagagatttgtagaaacaaccagcctggggctgagatcctgggcagaaatttcccgtgagcatcaaaaggcgtcagtcaggccgcagctctggctccagttcccgaggtttgttgtctcctcacccccagctgccaagcatccccccaacacacactgatgggcccagcggtggaggggggggtggggacggggatgggtcacggggccctgacgggtcccgcagttaggctccctgagccctcggcttataaatacaggtcttgctttgtgggtgggtgccagagtcctcatgtggcttggaggaaatctttatttctcaaattaaaataaaattgcagcgagagttgtt

SEQ ID NO: 2595 - protein, 377 aa, Homo sapiens; identical to SEQ ID NO: 2593

SEQ ID NO: 2596 - DNA, 279 bp, Homo sapiens
cagtggtgcagtctcagctcactacagtctccaccaaccaggttcaagtgattctcctgtcagcctcccaagtagttgggatcatagaccaaaatcttcgaatgcattggaaatacgaaagtagagtgtctcttgccctcctggagtttgtgatctagttgctagtgatgaaggcaaagtggatattcagagaacagagtcagaacttcatctgggatcagagcttcttgtgttcactattgctgggcccaattgcaaatgagactagtatgatgtccc

SEQ ID NO: 2597 - protein, 36 aa, Homo sapiens
MKAKWIFREQSQNFIWDQSFLCSLLLGPIANETSMM

SEQ ID NO: 2598 - DNA, 1324 bp, Homo sapiens
gctcccgctcccggagcaagagccggagccggagccagagtcggagccggagcaagaaagagaaaagcaggagccccagcaaggaaaagagccgcagccgcagccatagcgctggcaagagccgcagcaagagcaaagaccaagctgaagagaagatccaaaacaatgacaatgtcgggaaacccaagagccggagtcctagcaggcataaaagtaagagcaaaagacaagaggaagggcaggaagagaagcagagaggagagccgcagtcgcagtcgcagccgcagcaagagtgagaggagcagaaagcgaggcagcaagcgagacagcaaggcgggcagcagcaagaagaagaagaaggaagacactgaccgctcccagtccagatctccatcccgctccgtgtcaaaggagcgggaacatgccaagtctgaatccagccagagggaaggtcgaggagagagtgagaatgctggcaccaatcaggagacccggtccaggtcgagatccaattccaaatcgaaaccaaaccttccatcagaatcacgctccagatcaaagtcagcttcaaaaacccgatctcggtccaagtctagatccaggtctgcttccagatcgccctcccgatctagatctaggtcccactcaaggtcctaactggctatggccacagctggaactacccgagaagtcttttgtacatgtttggtagccgtagcacaagtgattggagtagaacatgtcactgctgtacatttttaactcccctaatggtgtgtctataattgttaaatctaagtgcttcctctcagtaaagcctcctggcaccaggccttcctgctcgactgaaaaaaattttctctttgaaaatccccttttactcatggcccacagtagaatatccaaaacgccttggctttcaggcctggcctttcctacagggagctcagtaacctggacggctctaaggctggaatgaccacataggtaggtatggtgagttcaaccatttttgctcttgaattgatgcccttcgatgtatgccatttagtgaaagtgctaagtcttaagtttcctaccactttggtttcatatttttggacttaacaaagttgtgaatagcacagtcgaggaaaattgatacctgcagtaacccataggaaataaactgtagagttccatattctggtattgtgattatattgttttatattaaaaaagaaaagaaaagaattttttttaattttatttttccccgtcttgcaaagtatagtgacccctgtttccattaaatttgaataaagactatttttgcttgacaaaa

SEQ ID NO: 2599 - protein, 163 aa, Homo sapiens
MTMSGNPRAGVLAGIKVRAKDKRKGRKRSREESRSRSRSRSKSERSRKRGSKRDSKAGSSKKKKKEDTDRSQSRSPSRSVSKEREHAKSESSQREGRGESENAGTNQETRSRSRSNSKSKPNLPSESRSRSKSASKTRSRSKSRSRSASRSPSRSRSRSHSRS

SEQ ID NO: 2600 - DNA, 1262 bp, Homo sapiens
gtcacatgtgacacaaacagtatcccatgtctcctcaggtcgggctcccgctcccggagcaagagccggagccggagccagagtcggagccggagcaagaaagagaaaagcaggagccccagcaaggaaaagagccgcagccgcagccatagcgctggcaagagccgcagcaagagcaaagaccaagctgaagagaagatccaaaacaatgacaatgtcgggaaacccaagagccggagtcctagcaggcataaaagtaagagcaaaagtcggagcaggagtcaggagaggagagtggaggaggagaagcgagggagtgtgagcaggggcaggagccaggagaagagcctccgccagagtcggagccggagcaggagcaaagggggcagcaggagccggagcaggagccgcagcaagagcaaggacaagaggaagggcaggaagagaagcagagaggagagccgcagtcgcagtcgcagccgcagcaagagtgagaggagcagaaagcgaggcagcaagcgagacagcaaggcgggcagcagcaagaagaagaagaaggaagacactgaccgctcccagtccagatctccatcccgctccgtgtcaaaggagcgggaacatgccaaaagtcttttgtacatgtttggtagccgtagcacaagtgattggagtagaacatgtcactgctgtacatttttaactcccctaatggtgtgtctataattgttaaatctaagtgcttcctctcagtaaagcctcctggcaccaggccttcctgctcgactgaaaaaaattttctctttgaaaatccccttttactcatggcccacagtagaatatccaaaacgccttggctttcaggcctggcctttcctacagggagctcagtaacctggacggctctaaggctggaatgaccacataggtaggtatggtgagttcaaccatttttgctcttgaattgatgcccttcgatgtatgccatttagtgaaagtgctaagtcttaagtttcctaccactttggtttcatatttttggacttaacaaagttgtgaatagcacagtcgaggaaaattgatacctgcagtaacccataggaaataaactgtagagttccatattctggtattgtgattatattgttttatattaaaaaagaaaagaaaagaattttttttaattttatttttccccgtcttgcaaagtatagtgacccctgtttccattaaatttgaataaagactatttttgcttgacaaaa

SEQ ID NO: 2601 - protein, 79 aa, Homo sapiens [sequence omitted]

SEQ ID NO: 2602 - DNA, 1866 bp, Homo sapiens
ttttttttccttttcttccactgaaataatcttatttatttgaaccttccaaaggtggatatggttatagaagaagtggccgagataaatatggccctcctactcgcacagagtacagacttattgtggagaatttgtcaagtcggtgcagctggcaagacctaaaggattatatgcgtcaggcaggagaagtgacttatgcagatgctcacaagggacgcaaaaatgaaggggtgattgaatttgtatcttattctgatatgaaaagagctttggaaaagttggatggaactgaagtcaatgggagaaaaatcagattagttgaagacaagccaggttccagacgacgccggtcctactccagaagccggagtcattcaaggtcgggctcccgctcccggagcaagagccggagccggagccagagtcggagccggagcaagaaagagaaaagcaggagccccagcaaggaaaagagccgcagccgcagccatagcgctggcaagagccgcagcaagagcaaagaccaagctgaagagaagatccaaaacaatgacaatgtcgggaaacccaagagccggagtcctagcaggcataaaagtaagagcaaaagtcggagcaggagtcaggagaggagagtggaggaggagaagcgagggagtgtgagcaggggcaggagccaggagaagagcctccgccagagtcggagccggagcaggagcaaagggggcagcaggagccggagcaggagccgcagcaagagcaaggacaagaggaagggcaggaagagaagcagagaggagagccgcagtcgcagtcgcagccgcagcaagagtgagaggagcagaaagcgaggcagcaagcgagacagcaaggcgggcagcagcaagaagaagaagaaggaagacactgaccgctcccagtccagatctccatcccgctccgtgtcaaaggagcgggaacatgccaagtctgaatccagccagagggaaggtcgaggagagagtgagaatgctggcaccaatcaggagacccggtccaggtcgagatccaattccaaatcgaaaccaaaccttccatcagaatcacgctccagatcaaagtcagcttcaaaaacccgatctcggtccaagtctagatccaggtctgcttccagatcgccctcccgatctagatctaggtcccactcaaggtcctaactggctatggccacagctggaactacccgagaagtcttttgtacatgtttggtagccgtagcacaagtgattggagtagaacatgtcactgctgtacatttttaactcccctaatggtgtgtctataattgttaaatctaagtgcttcctctcagtaaagcctcctggcaccaggccttcctgctcgactgaaaaaaattttctctttgaaaatccccttttactcatggcccacagtagaatatccaaaacgccttggctttcaggcctggcctttcctacagggagctcagtaacctggacggctctaaggctggaatgaccacataggtaggtatggtgagttcaaccatttttgctcttgaattgatgcccttcgatgtatgccatttagtgaaagtgctaagtcttaagtttcctaccactttggtttcatatttttggacttaacaaagttgtgaatagcacagtcgaggaaaattgatacctgcagtaacccataggaaataaactgtagagttccatattctggtattgtgattatattgttttatattaaaaaagaaaagaaaagaattttttttaattttatttttccccgtcttgcaaagtatagtgacccctgtttccattaaatttgaataaagactatttttgcttgacaaaa

SEQ ID NO: 2603 - protein, 341 aa, Homo sapiens
MRQAGEVTYADAHKGRKNEGVIEFVSYSDMKRALEKLDGTEVNGRKIRLVEDKPGSRRRRSYSRSRSHSRSGSRSRSKSRSRSQSRSRSKKEKSRSPSKEKSRSRSHSAGKSRSKSKDQAEEKIQNNDNVGKPKSRSPSRHKSKSKSRSRSQERRVEEEKRGSVSRGRSQEKSLRQSRSRSRSKGGSRSRSRSRSKSKDKRKGRKRSREESRSRSRSRSKSERSRKRGSKRDSKAGSSKKKKKEDTDRSQSRSPSRSVSKEREHAKSESSQREGRGESENAGTNQETRSRSRSNSKSKPNLPSESRSRSKSASKTRSRSKSRSRSASRSPSRSRSRSHSRS

SEQ ID NO: 2604 - DNA, 2297 bp, Homo sapiens
gccgagcgggaagcgaacgcgcgctctctccggttaccttccgcctcggggaagggcgggggaagtggaagcgcgcgctcgcgagctgcgtgctcgcgtacgtcgccggggttcggctgcgtccgtcccgccgcccgcccgttgccgccgccgccgctgccgccgtgctctcgctttgcccgccgccgcctaaggggggctggggccggggccagccatcactgccgttgccgggatgccgcgggtgtacatcggccgcctgagctaccaggcccgggagcgcgatgtggagcgcttctttaagggctacgggaagatcctggaggtggatctgaagaacggatatggttttgtggagtttgatgatctgcgtgatgcagatgatgctgtttatgaactgaatggcaaagacctttgtggtgagcgagtaattgttgagcatgcccgcggcccacggcgagatggcagttacggttctggacgcagtggatatggttatagaagaagtggccgagataaatatggccctcctactcgcacagagtacagacttattgtggagaatttgtcaagtcggtgcagctggcaagacctaaaggattatatgcgtcaggcaggagaagtgacttatgcagatgctcacaagggacgcaaaaatgaaggggtgattgaatttgtatcttattctgatatgaaaagagctttggaaaagttggatggaactgaagtcaatgggagaaaaatcagattagttgaagacaagccaggttccagacgacgccggtcctactccagaagccggagtcattcaaggtcgggctcccgctcccggagcaagagccggagccggagccagagtcggagccggagcaagaaagagaaaagcaggagccccagcaaggaaaagagccgcagccgcagccatagcgctggcaagagccgcagcaagagcaaagaccaagctgaagagaagatccaaaacaatgacaatgtcgggaaacccaagagccggagtcctagcaggcataaaagtaagagcaaaagtcggagcaggagtcaggagaggagagtggaggaggagaagcgagggagtgtgagcaggggcaggagccaggagaagagcctccgccagagtcggagccggagcaggagcaaagggggcagcaggagccggagcaggagccgcagcaagagcaaggacaagaggaagggcaggaagagaagcagagaggagagccgcagtcgcagtcgcagccgcagcaagagtgagaggagcagaaagcgaggcagcaagcgagacagcaaggcgggcagcagcaagaagaagaagaaggaagacactgaccgctcccagtccagatctccatcccgctccgtgtcaaaggagcgggaacatgccaagtctgaatccagccagagggaaggtcgaggagagagtgagaatgctggcaccaatcaggagacccggtccaggtcgagatccaattccaaatcgaaaccaaaccttccatcagaatcacgctccagatcaaagtcagcttcaaaaacccgatctcggtccaagtctagatccaggtctgcttccagatcgccctcccgatctagatctaggtcccactcaaggtcctaactggctatggccacagctggaactacccgagaagtcttttgtacatgtttggtagccgtagcacaagtgattggagtagaacatgtcactgctgtacatttttaactcccctaatggtgtgtctataattgttaaatctaagtgcttcctctcagtaaagcctcctggcaccaggccttcctgctcgactgaaaaaaattttctctttgaaaatccccttttactcatggcccacagtagaatatccaaaacgccttggctttcaggcctggcctttcctacagggagctcagtaacctggacggctctaaggctggaatgaccacataggtaggtatggtgagttcaaccatttttgctcttgaattgatgcccttcgatgtatgccatttagtgaaagtgctaagtcttaagtttcctaccactttggtttcatatttttggacttaacaaagttgtgaatagcacagtcgaggaaaattgatacctgcagtaacccataggaaataaactgtagagttccatattctggtattgtgattatattgttttatattaaaaaagaaaagaaaagaattttttttaattttatttttccccgtcttgcaaagtatagtgacccctgtttccattaaatttgaataaagactatttttgcttgacaaaa

SEQ ID NO: 2605 - protein, 464 aa, Homo sapiens
MPRVYIGRLSYQARERDVERFFKGYGKILEVDLKNGYGFVEFDDLRDADDAVYELNGKDLCGERVIVEHARGPRRDGSYGSGRSGYGYRRSGRDKYGPPTRTEYRLIVENLSSRCSWQDLKDYMRQAGEVTYADAHKGRKNEGVIEFVSYSDMKRALEKLDGTEVNGRKIRLVEDKPGSRRRRSYSRSRSHSRSGSRSRSKSRSRSQSRSRSKKEKSRSPSKEKSRSRSHSAGKSRSKSKDQAEEKIQNNDNVGKPKSRSPSRHKSKSKSRSRSQERRVEEEKRGSVSRGRSQEKSLRQSRSRSRSKGGSRSRSRSRSKSKDKRKGRKRSREESRSRSRSRSKSERSRKRGSKRDSKAGSSKKKKKEDTDRSQSRSPSRSVSKEREHAKSESSQREGRGESENAGTNQETRSRSRSNSKSKPNLPSESRSRSKSASKTRSRSKSRSRSASRSPSRSRSRSHSRS

SEQ ID NO: 2606 - DNA, 2387 bp, Homo sapiens
gccgagcgggaagcgaacgcgcgctctctccggttaccttccgcctcggggaagggcgggggaagtggaagcgcgcgctcgcgagctgcgtgctcgcgtacgtcgccggggttcggctgcgtccgtcccgccgcccgcccgttgccgccgccgccgctgccgccgtgctctcgctttgcccgccgccgcctaaggggggctggggccggggccagccatcactgccgttgccgggatgccgcgggtgtacatcggccgcctgagctaccaggcccgggagcgcgatgtggagcgcttctttaagggctacgggaagatcctggaggtggatctgaagaacggatatggttttgtggagtttgatgatctgcgtgatgcagatgatgctgtttatgaactgaatggcaaagacctttgtggtgagcgagtaattgttgagcatgcccgcggcccacggcgagatggcagttacggttctggacgcagtggatatggttatagaagaagtggccgagataaatatggccctcctactcgcacagagtacagacttattgtggagaatttgtcaagtcggtgcagctggcaagacctaaaggattatatgcgtcaggcaggagaagtgacttatgcagatgctcacaagggacgcaaaaatgaaggggtgattgaatttgtatcttattctgatatgaaaagagctttggaaaagttggatggaactgaagtcaatgggagaaaaatcagattagttgaagacaagccaggttccagacgacgccggtcctactccagaagccggagtcattcaaggtctcgctctcgaagcagacattcccgtaagagcagaagccgaagtggcagcagcaaaagcagtcattctaagagtagatctcggtccaggtcgggctcccgctcccggagcaagagccggagccggagccagagtcggagccggagcaagaaagagaaaagcaggagccccagcaaggaaaagagccgcagccgcagccatagcgctggcaagagccgcagcaagagcaaagaccaagctgaagagaagatccaaaacaatgacaatgtcgggaaacccaagagccggagtcctagcaggcataaaagtaagagcaaaagtcggagcaggagtcaggagaggagagtggaggaggagaagcgagggagtgtgagcaggggcaggagccaggagaagagcctccgccagagtcggagccggagcaggagcaaagggggcagcaggagccggagcaggagccgcagcaagagcaaggacaagaggaagggcaggaagagaagcagagaggagagccgcagtcgcagtcgcagccgcagcaagagtgagaggagcagaaagcgaggcagcaagcgagacagcaaggcgggcagcagcaagaagaagaagaaggaagacactgaccgctcccagtccagatctccatcccgctccgtgtcaaaggagcgggaacatgccaagtctgaatccagccagagggaaggtcgaggagagagtgagaatgctggcaccaatcaggagacccggtccaggtcgagatccaattccaaatcgaaaccaaaccttccatcagaatcacgctccagatcaaagtcagcttcaaaaacccgatctcggtccaagtctagatccaggtctgcttccagatcgccctcccgatctagatctaggtcccactcaaggtcctaactggctatggccacagctggaactacccgagaagtcttttgtacatgtttggtagccgtagcacaagtgattggagtagaacatgtcactgctgtacatttttaactcccctaatggtgtgtctataattgttaaatctaagtgcttcctctcagtaaagcctcctggcaccaggccttcctgctcgactgaaaaaaattttctctttgaaaatccccttttactcatggcccacagtagaatatccaaaacgccttggctttcaggcctggcctttcctacagggagctcagtaacctggacggctctaaggctggaatgaccacataggtaggtatggtgagttcaaccatttttgctcttgaattgatgcccttcgatgtatgccatttagtgaaagtgctaagtcttaagtttcctaccactttggtttcatatttttggacttaacaaagttgtgaatagcacagtcgaggaaaattgatacctgcagtaacccataggaaataaactgtagagttccatattctggtattgtgattatattgttttatattaaaaaagaaaagaaaagaattttttttaattttatttttccccgtcttgcaaagtatagtgacccctgtttccattaaatttgaataaagactatttttgcttgacaaaa

SEQ ID NO: 2607 - protein, 494 aa, Homo sapiens; identical to SEQ ID NO: 57

SEQ ID NO: 2608 - DNA, 410 bp, Homo sapiens
ctgaagtcgcaccccagctctgccactcagtgagcacggcaacatccctaatcctgaccagccatggagaggttcggttcttacaaggaaaatgagtgaatgtgggaatggctcaccacattgtgaaaacaaaactcacatcctgctgatggttggctgaggactgtcatgtccacatacaaagaaaagcatgtggcacagttttaggacaaagatatggttttgtggagtttgatgatctgcgtgatgcagatgatgctgtttatgaactgaatggcaaagacctttgtggtgagcgagtaattgttgagcatgcccgcggcccacggcgagatggcagttacggttctggacgcagtaagcattcaaagggcatacttttatcagtaacgtgcttttgttatcatgct

SEQ ID NO: 2609 - protein, 86 aa, Homo sapiens
WLAEDCHVHIQRKACGTVLGQRYGFVEFDDLRDADDAVYELNGKDLCGERVIVEHARGPRRDGSYGSGRSKHSKGILLSVTCFCYH

SEQ ID NO: 2610 - DNA, 1348 bp, Homo sapiens
gctaaatagccaacagatattagccttcgtttttcttagtgaagagctcataatcaaaagagaaggtaagcacaaagacaaaaacaagacttaaaaagaaagctgtttgattcctgttcactgaatgccatttctttcagggtagatttaaggactttccccttaaagtacagtgctactgactctagattgagggttcaagccaccccgtgggttaacttcaacagatgaaaatttttccttggctacagcaacatccctaatcctgaccagccatggagaggttcggttcttacaaggaaaatgagtgaatgtgggaatggctcaccacattgtgaaaacaaaactcacatcctgctgatggttggctgaggactgtcatgtccacatacaaagaaaagcatgtggcacagttttaggacaaaggtgagcagagatccaccgtggaaaggggcatattttcttatagagagaccatccaaggcatgcccctcggtaagcagtgttggtgggtgaccacggtcacacgcatggaggcttgctttcccctgctcctcatacccactccctagcagtttctggtattgagcacccccttagtcatgccttgcccagttagccattgatcagcctgtttccagagcaagccatgggtattagattgcagacaggacttagtctccctgttcagtgaagatgtttggaatacagaagtgaccctaagctgttctgaaaagagttgaggtaaatcctattcagtagaacataacagagcaaagggcagacttggtgtttgggaccattggtataggctattaggatcagagaaaggatatttagcaaggatacaaactcagataataattcttgcctgaagaagtgtggttaacatttcaaaagttgaagtcttagagtaccttagttttaaaaatacgtcattccagttctaccttttcagaattatgactgataacctgagcagtacatcagctattgaatgacgaagatgagcgcattggcaatgggataagaatggactaaagtttagagcagcccatgtaattcagtgtggcttttgtttgtggtatccagatacctgtctatacttggtaagactcatggtgcctgcctttttttacagggaaaatgacagcaacttcccctcattcttttgactaggtttgtgaggatagaatgtgaccagaggaaaatagttttggtaaagacaacacagtgcttgggatcagacgaattttggatttcagggttttttttgggatttgggaatgtttgtattgtacttaatggttgagcattcctaaacaaaatccaaaatgttctgatgagc

SEQ ID NO: 2611 - protein, 37 aa, Homo sapiens
MWHSFRTKVSRDPPWKGAYFLIERPSKACPSVSSVGG

SEQ ID NO: 2612 - DNA, 1256 bp, Homo sapiens
aataagtacaatgctgactttttttgctttttgatgaatagggaaaaaatatttttttaatgtcataattggtgttgaagacatggtccagtaagaagcaattatgaaaaataataaacaatctagcatggatcaagccttatgaagaatctagaaatttaacaacataaaccagaaacaacgactattagattttacactaaaaattcgaaatcaatgagtaggaattcaaaggctctggaaggaagaagtgagcaacccaaaaggaagatggagcgataagaggaaagagcctttcaggaccctaaatacctgggtggtttttttaaggaactgttcattcttacagttatgctgccaaaccatgatatgcatgaaatgtcattgaaagtcaaggttgaaatgaagtcattttagagtttcaaagacaggtatgacagtcaccaaacagcacacaatatgacctcctggcatcattgaggaatcattacagaggaaaacgacttctgggaagaagaccaatggtaaagatgtatttcaagcaaaaattgcctgtatggcaaaaacgctggagagtctgaaaggaaggagtgagtacaaaagaaaaagcataacttagctacgtatgtaagcttatagtcccctagcagaagggcagtggatctccctactgggaagcatgtttgaacatatctagattgtgattagtaattgaaactcagagtgctgggattacaggcgtgagccaccacgcccggccggaaattttttttgagatggagtctctgtctgttgcccaggctggaatgcagtggcacaatcgtggctcacctcccaggtacaagcgattctgctgcctcagcctcccaagtagctgggattacaggtgtgcaccaccacccccggctaatttttgtattttttgtagaaacggggtttcaccacgttggccagcctggttttgaactcctgacctcaaagtgatctacctcacaaagtgctgggattacaggcgtgagccaccacacctggcctattataatttttttatatggagaaggaccaaaataatccaaagatgtaactctttgcattttgggttttttagttttactttttttcacatacaggtatgggcatgtgcacgcacgcactctgtctctcttcttttcttttttttttttttaattaaaaaacccaccggccagttgtggtggctcacgcctataatcccaacactttgggaggccaaggct

SEQ ID NO: 2613 - protein, 62 aa, Homo sapiens
MESLSVAQAGMQWHNRGSPPRYKRFCCLSLPSSWDYRCAPPPPANFCIFCRNGVSPRWPAWF

SEQ ID NO: 2614 - DNA, 901 bp, Homo sapiens
aataagtacaatgctgactttttttgctttttgatgaatagggaaaaaatatttttttaatgtcataattggtgttgaagacatggtccagtaagaagcaattatgaaaaataataaacaatctagcatggatcaagccttatgaagaatctagaaatttaacaacataaaccagaaacaacgactattagattttacactaaaaattcgaaatcaatgagtaggaattcaaaggctctggaaggaagaagtgagcaacccaaaaggaagatggagcgataagaggaaagagcctttcaggaccctaaatacctgggtggtttttttaaggaactgttcattcttacagttatgctgccaaaccatgatatgcatgaaatgtcattgaaagtcaaggttgaaatgaagtcattttagagtttcaaagacaggtatgacagtcaccaaacagcacacaatatgacctcctggcatcattgaggaatcattacagaggaaaacgacttctgggaagaagaccaatggtaaagatgtatttcaagcaaaaattgcctgtatggcaaaaacgctggagagtctgaaaggaaggagtgagtacaaaagaaaaagcataacttagctacgtatgtaagcttatagtcccctagcagaagggcagtggatctccctactgggaagcatgtttgaacatatctagattgtgattagtaattgaaactcacaaagtgctgggattacaggcgtgagccaccacacctggcctattataatttttttatatggagaaggaccaaaataatccaaagatgtaactctttgcattttgggttttttagttttactttttttcacatacaggtatgggcatgtgcacgcacgcactctgtctctcttcttttct

SEQ ID NO: 2615 - protein, 62 aa, Homo sapiens
LKLTKCWDYRREPPHLAYYNFFIWRRTKIIQRCNSLHFGFFSFTFFHIQVWACARTHSVSLL

SEQ ID NO: 2616 - DNA, 2792 bp, Homo sapiens
gtgttggttggagcgagcatgtgggtctgcagtaccctgtggcgggtgcgaacccccgcccggcagtggcgggggctgctcccagcttctggctgtcacggacctgccgcctcctcctactccgcatccgccgagcctgcccgggtccgggcgcttgtctatgggcaccacggggatccagccaaggtcgtcgaaaccgtaattcctgggcacacatggcagctcagaaatgttgcctgacctactttgaggagatgatttgagcgaaacacccattctagcctggatgacatgaacatctccgtttggctttgtgcttagactcaagaacctggagctagctgctgtgagaggatcagatgtccgtgtgaagatgctggcggcccctatcaatccatctgacataaatatgatccaaggaaactacggattccttcctgaactgcctgctgttggagggaacgaaggtgttgcacaggtggtagcggtgggcagcaatgtgaccgggctgaagccaggagactgggtgattccagcaaatgctggtttaggaacctggcggaccgaggctgtgttcagcgaggaagcactgatccaagttccgagtgacatccctcttcagagcgctgccaccctgggtgtcaatccctgcacagcctacaggatgttgatggacttcgagcaactgcagccaggggattctgtcatccagaatgcatccaacagcggagtggggcaagcagtcatccagatcgccgcagccctgggcctaagaaccatcaatgtggtccgagacagacctgatatccagaagctgagtgacagactgaagagtctgggggctgagcatgtcatcacagaagaggagctaagaaggcccgaaatgaaaaacttctttaaggacatgccccagccacggcttgctctcaactgtgttggtgggaaaagctccacagagctgctgcggcagttagcgcgtggaggaaccatggtaacctatggggggatggccaagcagcccgtcgtagcctctgtgagcctgctcatttttaaggatctcaaacttcgaggcttttggttgtcccagtggaagaaggatcacagtccagaccagttcaaggagctgatcctcacactgtgcgatctcatccgccgaggccagctcacagcccctgcctgctcccaggtcccgctgcaggactaccagtctgccttggaagcctccatgaagcccttcatatcttcaaagcagattctcaccatgtgatcatcccaaaagagctggagtgacatgggaggggaggcggatctgaggggctgggtgcaggcccctcagttggggctcccaccttccccagactactgttctcctcactgcctcttcctattaggaggatggtgaagccagccacggttttccccagggccagccttaaggtatctaataaagtctgaactctcccttccaaaaagtagaagtcatccctgtcgagaaggaccaacactgtgcactggtcagctcacagcaccaagaggcccccttcctgcttttctgtcatgtgttcccccagtaatcattttctgaccaccctgaaagcaaagcctgggtgggtactggcagtgcaaaggccagtaggccaccatccctggccccaagctgcacaagcccacagacgagggtcctgtagaacaaacgctttgatgtgcttctcaggtagcctgcggcccagtccagggcttggggaggatcagctgcatggaagagtgaatgccaggctgaggtcatcagggccctgaggaacttggacgtggggtcttcactctcatggaactgcccttctaactggagacatagacaatataccagtggttctcaaccagaggcaattttacccccaggagacatttgacaatgtctggggatatttctggctatcacagcttatgaaggaggttgctactggcatctagcaggcagagtgagtgctgctgttaaacccaccacaggacacagaacagtctactgcaacaaagaattacccaaggcctggcgcggtggctcacacctgtaatcccagcactttgggaagccaaggcaagcggatcacttgagcccaggagttcaaggtcaacctaggtaacgtggtgaaacaccatctctacaaaaaatacaaacattagccaggtatggtgctgtgcacctgtagtcccagctactcgggaggttgaggtgggaggatcacctgagcctgggaggtctagactgcagtgagccatgatcatgccactgcattccagcctaggcaacagagcaagaccctatatcaaaaaaaaaaaaaaaatctagccccaaatgttcaatgttcatgaggtcgttgataaaccgtgcattaaacaatctcacagtaattaccatagtgactaatgctgtaaagaagatatgtggggtgctgtaagagcagaataaagatcttgccctaggccccagggacaggggtatgcttccttgaggtgaagtttgaaggtgggctctcacaaatgagtgagctttattcaggccgagagaagagcttgacgtgactttttggtatttgcttcacgattcatttgctcaaagcaaagaacagaggcttcagggtgtctcccttatcacctggccctctgtaccctgcactcaggagcctcattcaggacgtatttattgagtgcctagtgtgtgcccaaagctaaggataccaatgaaagaagtgctgctggccctcaggttgcttagcctagtgcaagattgacca

SEQ ID NO: 2617 - protein, 297 aa, Homo sapiens; identical to SEQ ID NO: 59

SEQ ID NO: 2618 - DNA, 2008 bp, Homo sapiens
cgtcaggctctgtgttggttggagcgagcatgtgggtctgcagtaccctgtggcgggtgcgaacccccgcccggcagtggcgggggctgctcccagcttctggctgtcacggacctgccgcctcctcctactccgcatccgccgagcctgcccgggtccgggcgcttgtctatgggcaccacggggatccagccaaggtcgtcgaactcaagaacctggagctagctgctgtgagaggatcagatgtccgtgtgaagatgctggcggcccctatcaatccatctgacataaatatgatccaaggaaactacggattccttcctgaactgcctgctgttggagggaacgaaggtgttgcacaggtggtagcggtgggcagcaatgtgaccgggctgaagccaggagactgggtgattccagcaaatgctggtttaggaacctggcggaccgaggctgtgttcagcgaggaagcactgatccaagttccgagtgacatccctcttcagagcgctgccaccctgggtgtcaatccctgcacagcctacaggatgttgatggacttcgagcaactgcagccaggggattctgtcatccagaatgcatccaacagcggagtggggcaagcagtcatccagatcgccgcagccctgggcctaagaaccatcaatgtggtccgagacagacctgatatccagaagctgagtgacagactgaagagtctgggggctgagcatgtcatcacagaagaggagctaagaaggcccgaaatgaaaaacttctttaaggacatgccccagccacggcttgctctcaactgtgttggtgggaaaagctccacagagctgctgcggcagttagcgcgtggaggaaccatggtaacctatggggggatggccaagcagcccgtcgtagcctctgtgagcctgctcatttttaaggatctcaaacttcgaggcttttggttgtcccagtggaagaaggatcacagtccagaccagttcaaggagctgatcctcacactgtgcgatctcatccgccgaggccagctcacagcccctgcctgctcccaggtcccgctgcaggactaccagtctgccttggaagcctccatgaagcccttcatatcttcaaagcagattctcaccatgtgatcatcccaaaagagctggagtgacatgggaggggaggcggatctgaggggctgggtgcaggcccctcagttggggctcccaccttccccagactactgttctcctcactgcctcttcctattaggaggatggtgaagccagccacggttttccccagggccagccttaaggtatctaataaagtctgaactctcccttccaaaaagtagaagtcatccctgtcgagaaggaccaacactgtgcactggtcagctcacagcaccaagaggcccccttcctgcttttctgtcatgtgttcccccagtaatcattttctgaccaccctgaaagcaaagcctgggtgggtactggcagtgcaaaggccagtaggccaccatccctggccccaagctgcacaagcccacagacgagggtcctgtagaacaaacgctttgatgtgcttctcaggtagcctgcggcccagtccagggcttggggaggatcagctgcatggaagagtgaatgccaggctgaggtcatcagggccctgaggaacttggacgtggggtcttcactctcatggaactgcccttctaactggagacatagacaatataccagtggttctcaaccagaggcaattttacccccaggagacatttgacaatgtctggggatatttctggctatcacagcttatgaaggaggttgctactggcatctagcaggcagagtgagtgctgctgttaaacccaccacaggacacagaacagtctactgcaacaaagaattacccaaggcctggcgcggtggctcacacctgtaatcccagcactttgggaagccaaggcaagcggatcacttgagcccaggagttc

SEQ ID NO: 2619 - protein, 373 aa, Homo sapiens; identical to SEQ ID NO: 61

SEQ ID NO: 2620 - DNA, 711 bp, Homo sapiens
tgcgaacccccgcccggcagtggcgggggctgctcccagcttctggctgtcacggacctgccgcctcctcctactccgcatccgccgagcctgcccgggtccgggcgcttgtctatgggcaccacggggatccagccaaggtcgtcgagtaagagacttccccagactactgttctcctcactgcctcttcctattaggaggatggtgaagccagccacggttttccccagggccagccttaaggtatctaataaagtctgaactctcccttccaaaaagtagaagtcatccctgtcgagaaggaccaacactgtgcactggtcagctcacagcaccaagaggcccccttcctgcttttctgtcatgtgttcccccagtaatcattttctgaccaccctgaaagcaaagcctgggtgggtactggcagtgcaaaggccagtaggccaccatccctggccccaagctgcacaagcccacagacgagggtcctgtagaacaaacgctttgatgtgcttctcaggtagcctgcggcccagtccagggcttggggaggatcagctgcatggaagagtgaatgccaggctgaggtcatcagggccctgaggaacttggacgtggggtcttcactctcatggaactgcccttctaactggagacatagacaatataccagtggttctcaaccagaggcaattttacccccaggagac

SEQ ID NO: 2621 - protein, 79 aa, Homo sapiens
MCSPSNHFLTTLKAKPGWVLAVQRPVGHHPWPQAAQAHRRGSCRTNALMCFSGSLRPSPGLGEDQLHGRVNARLRSSGP

SEQ ID NO: 2622 - DNA, 575 bp, Homo sapiens
ccagctcgccagagctctccaggtctttagctgggaggaccatcaagtgactgagtcccatcgccagttcgagccaagtccaggcgtggaggaaccatggtaacctatggggggatggccaagcagcccgtcgtagcctctgtgagcctgctcatttttaaggatctcaaacttcgaggcttttggttgtcccagtggaagaaggatcacagtccagaccagttcaaggagctgatcctcacactgtgcgatctcatccgccgaggccagctcacagcccctgcctgctcccaggtcccgctgcaggactaccagtctgccttggaagcctccatgaagcccttcatatcttcaaagcagattctcaccatgtgatcatcccaaaagagctggagtgacatgggaggggaggcggatctgaggggctgggtgcaggcccctcagttggggctcccaccttccccagactactgttctcctcactgcctcttcctattaggaggatggtgaagccagccacggttttccccagggccagccttaaggtatctaataaagtctgaactctcccttcc

SEQ ID NO: 2623 - protein, 92 aa, Homo sapiens [sequence omitted]

SEQ ID NO: 2624 - DNA, 1351 bp, Homo sapiens
cgtcaggctctgtgttggttggagcgagcatgtgggtctgcagtaccctgtggcgggtgcgaacccccgcccggcagtggcgggggctgctcccagcttctggctgtcacggacctgccgcctcctcctactccgcatccgccgagcctgcccgggtccgggcgcttgtctatgggcaccacggggatccagccaaggtcgtcgaactcaagaacctggagctagctgctgtgagaggatcagatgtccgtgtgaagatgctggcggcccctatcaatccatctgacataaatatgatccaaggaaactacggattccttcctgaactgcctgctgttggagggaacgaaggtgttgcacaggtggtagcggtgggcagcaatgtgaccgggctgaagccaggagactgggtgattccagcaaatgctggtttaggaacctggcggaccgaggctgtgttcagcgaggaagcactgatccaagttccgagtgacatccctcttcagagcgctgccaccctgggtgtcaatccctgcacagcctacaggatgttgatggacttcgagcaactgcagccaggggattctgtcatccagaatgcatccaacagcggagtggggcaagcagtcatccagatcgccgcagccctgggcctaagaaccatcaatgtggtccgagacagacctgatatccagaagctgagtgacagactgaagagtctgggggctgagcatgtcatcacagaagaggagctaagaaggcccgaaatgaaaaacttctttaaggacatgccccagccacggcttgctctcaactgtgttggtgggaaaagctccacagagctgctgcggcagttagcgcgtggaggaaccatggtaacctatggggggatggccaagcagcccgtcgtagcctctgtgagcctgctcatttttaaggatctcaaacttcgaggcttttggttgtcccagtggaagaaggatcacagtccagaccagttcaaggagctgatcctcacactgtgcgatctcatccgccgaggccagctcacagcccctgcctgctcccaggtcccgctgcaggactaccagtctgccttggaagcctccatgaagcccttcatatcttcaaagcagattctcaccatgtgatcatcccaaaagagctggagtgacatgggaggggaggcggatctgaggggctgggtgcaggcccctcagttggggctcccaccttccccagactactgttctcctcactgcctcttcctattaggaggatggtgaagccagccacggttttccccagggccagccttaaggtatctaataaagtctgaactctcccttcc

SEQ ID NO: 2625 - protein, 373 aa, Homo sapiens; identical to SEQ ID NO: 61

SEQ ID NO: 2626 - DNA, 872 bp, Homo sapiens
caggctctgtgttggttggagcgagcatgtgggtctgcagtaccctgtggcgggtgcgaacccccgcccggcagtggcgggggctgctcccagcttctggctgtcacggacctgccgcctcctcctactccgcatccgccgagcctgcccgggtccgggcgcttgtctatgggcaccacggggatccagccaaggtcgtcgaactcaagaacctggagctagctgctgtgagaggatcagatgtccgtgtgaagatgctggcggcccctatcaatccatctgacataaatatgatccaaggaaactacggattccttcctgaactgcctgctgttggagggaacgaaggtgttgcacaggtggtagcggtgggcagcaatgtgaccgggctgaagccaggagactgggtgattccagcaaatgctggtttaggaacctggcggaccgaggctgtgttcagcgaggaagcactgatccaagttccgagtgacatccctcttcagagcgctgccaccctgggtgtcaatccctgcacagcctacaggatgttgatggacttcgagcaactgcagccagacctgatatccagaagctgagtgacagactgaagagtctgggggctgagcatgtcatcacagaagaggagctaagaaggcccgaaatgaaaaacttctttaaggacatgccccagccacggcttgctctcaactgtgttggtgggaaaagctccacagagctgctgcggcagttagcgcgtggaggaaccatggtaacctatggggggatggccaagcagcccgtcgtagcctctgtggtaagctgggtgcagagggaggcatgcctggagccgggccagacacctcagccaggcc

SEQ ID NO: 2627 - protein, 189 aa, Homo sapiens
MWVCSTLWRVRTPARQWRGLLPASGCHGPAASSYSASAEPARVRALVYGHHGDPAKVVELKNLELAAVRGSDVRVKMLAAPINPSDINMIQGNYGFLPELPAVGGNEGVAQVVAVGSNVTGLKPGDWVIPANAGLGTWRTEAVFSEEALIQVPSDIPLQSAATLGVNPCTAYRMLMDFEQLQPDLISRS

SEQ ID NO: 2628 - DNA, 571 bp, Homo sapiens
ccacaccctccctgcacctcttacggcttccaggactcccaccattcaggactcattttttggctctttagcacaattgttttgaactgaaggaatcagagacttagggcaacttctggaagtttctacccagttggcaaagaaaccttctcaatcccctacttaccctaaactaagaggaccagaaagtctgcaggccccatgatatgctacatctgctgacaccagggaaactccactacaagggagttgcagtctgtcactcaacttgctgaggaccaactcttgggggcacagtccctacctgcaagctgcttggatctctttgacagaattgtcacagccggacaattgttggagcaaagaggattcacgtctcatgataatttccatggctgcagtgttatgctgagaaggatgttgagggcccgtcttgtcttggcaggaagagcgttgtctggggagaatgtgataaagaggagtaactgaagataattggagactaacgtgatttcctcactgccataattagtggcagaggtgggactggaacacaggcaagaaacatccc

SEQ ID NO: 2629 - protein, 32 aa, Homo sapiens
FPWLQCYAEKDVEGPSCLGRKSVVWGECDKEE

SEQ ID NO: 2630 - DNA, 5600 bp, Homo sapiens
ggcgccagtcccgctccgcgccgcgccgctccgctccggctcgggctccggctcgcctcgggctgggctcgggctccgggggcggcgtcccccgcgccgggccccgggacgggcggcgacgctccaaccatggcccgtgcccaggcgctcgtgctggcactcaccttccagctctgcgcgccggagaccgagactccggcagctggctgcaccttcgaggaggcaagtgacccagcagtgccctgcgagtacagccaggcccagtacgatgacttccagtgggagcaagtgcgaatccaccctggcacccgggcacctgcggacctgccccacggctcctacttgatggtcaacacttcccagcatgccccaggccagcgagcccatgtcatcttccagagcctgagcgagaatgatacccactgtgtgcagttcagctacttcctgtacagccgggacgggcacagcccgggcaccctgggcgtctacgtgcgcgttaatgggggccccctgggcagtgctgtgtggaatatgactggatcccacggccgtcagtggcaccaggctgagctggctgtcagcactttctggcccaatgaatatcaggtgctgtttgaggccctcatctccccagaccgcaggggctacatgggcctagatgacatcctgcttctcagctacccctgcgcaaaggccccacacttctcccgcctgggcgacgtggaggtcaacgcgggccagaacgcgtcgttccagtgcatggccgcgggcagagcggccgaggccgaacgcttcctcttgcaacggcagagcggggcgctggtgccggcggcgggcgtgcggcacatcagccaccggcgcttcctggccactttcccgctggctgccgtgagccgcgccgagcaggacctgtaccgctgtgtgtcccaggccccgcgcggcgcgggcgtctctaacttcgcggagctcatcgtcaaggagcccccaactcccatcgcgcccccacagctgctgcgtgctggccccacctacctcatcatccagctcaacaccaactccatcattggcgacgggccgatcgtgcgcaaggagattgagtaccgcatggcgcgcgggccctgggctgaggtgcacgccgtcagcctgcagacctacaagctgtggcacctcgaccccgacacagagtatgagatcagcgtgctgctcacgcgtcccggagacggcggcactggccgccctgggccacccctcatcagccgcaccaaatgcgcagagcccatgagggcccccaaaggcctggcttttgctgagatccaggcccgtcagctgaccctgcagtgggaaccactgggctacaacgtgacgcgttgccacacctatactgtgtcgctgtgctatcactacaccctgggcagcagccacaaccagaccatccgagagtgtgtgaagacagagcaaggtgtcagccgctacaccatcaagaacctgctgccctatcggaacgttcacgtgaggcttgtcctcactaaccctgaggggcgcaaagagggcaaggaggtcactttccagacggatgaggatgtgcccagtgggattgcagccgagtccctgaccttcactccactggaggacatgatcttcctcaagtgggaggagccccaggagcccaatggtctcatcacccagtatgagatcagctaccagagcatcgagtcatcagacccggcagtgaacgtgccaggcccacgacgtaccatctccaagctccgcaatgagacctaccatgtcttctccaacctgcacccaggcaccacctacctgttctccgtgcgggcccgcacaggcaaaggcttcggccaggcggcactcactgagataaccactaacatctctgctcccagctttgattatgccgacatgccgtcacccctgggcgagtctgagaacaccatcaccgtgctgctgaggccggcacagggccgcggtgcgcccatcagtgtgtaccaggtgattgtggaggaggagcgggcgcggaggctgcggcgggagccaggtggacaggactgcttcccagtgccattgaccttcgaggcggcgctggcccgaggcctggtgcactacttcggggccgaactggcggccagcagtctacctgaggccatgccctttaccgtgggtgacaaccagacctaccgaggcttctggaacccaccacttgagcctaggaaggcctatctcatctacttccaggcagcaagccacctgaagggggagacccggctgaattgcatccgcattgccaggaaagctgcctgcaaggaaagcaagcggcccctggaggtgtcccagagatcggaggagatggggcttatcctgggcatctgtgcaggggggcttgctgtcctcatccttctcctgggtgccatcattgtcatcatccgcaaagggaagccggtgaacatgaccaaggccaccgtcaactaccgccaggagaagacacacatgatgagcgccgtggaccgcagcttcacagaccagagcaccctgcaggaggacgagcggctgggcctgtccttcatggacacccatggctacagcacccggggagaccagcgcagcggtggggtcactgaggccagcagcctcctggggggctccccgaggcgtccctgtggccggaagggctccccataccacacggggcagctgcaccctgcggtgcgtgtcgcagaccttctgcagcacatcaaccagatgaagacggccgagggttacggcttcaagcaggagtatgagagcttctttgaaggctgggacgccacaaagaagaaagacaaggtcaagggcagccggcaggagccaatgcctgcctatgatcggcaccgagtgaaactgcacccgatgctgggagaccccaatgccgactacattaatgccaactacatagatattcggataaaccgagaaggttaccacaggtcaaaccacttcatagccactcaagggccgaagcctgagatggtctatgacttctggcgtatggtgtggcaggagcactgttccagcatcgtcatgatcaccaagctggtcgaggtgggcagggtgaaatgctcacggtactggccggaggactcagacacctacggggacatcaagattatgctggtgaagacagagaccctggctgagtatgtcgtgcgcacttttgccctggagcggagaggctactctgcccggcacgaggtccgccagttccacttcacagcgtggccagagcatggcgtcccctaccatgccacggggctgctggctttcatccggcgcgtgaaggcctccaccccacctgatgccgggcccattgtcatccactgcagcgcgggcaccggccgcacaggttgctatatcgtcctggatgtgatgctggacatggcagagtgtgagggcgtcgtggacatttacaactgtgtgaagactctctgctcccggcgtgtcaacatgatccagactgaggagcagtacatcttcattcatgatgcaatcctggaggcctgcctgtgtggggagaccaccatccctgtcagtgagttcaaggccacctacaaggagatgatccgcattgatcctcagagtaattcctcccagctgcgggaagagttccagacgctgaactcggtcaccccgccgctggacgtggaggagtgcagcatcgccctgttgccccggaaccgcgacaagaaccgcagcatggacgtcctgccgcccgaccgctgcctgcccttcctcatctccactgatggggactccaacaactacattaatgcagccctgactgacagctacacacggagtgcggccttcatcgtgaccctgcacccgctgcagagcaccacgcccgacttctggcggctggtctacgattacgggtgcacctccatcgtcatgctcaaccagctgaaccagtccaactccgcctggccctgcctgcagtactggccagagccaggccggcagcaatatggcctcatggaggtggagtttatgtcgggcacagctgatgaagacttagtggctcgagtcttccgggtgcagaacatctctcggttgcaggaggggcacctgctggtgcggcacttccagttcctgcgctggtctgcataccgggacacacctgactccaagaaggccttcttgcacctgctggctgaggtggacaagtggcaggccgagagtggggatgggcgcaccatcgtgcactgcctaaacgggggaggacgcagcggcaccttctgcgcctgcgccacggtcctggagatgatccgctgccacaacttggtggacgttttctttgctgccaaaaccctccggaactacaaacccaacatggtggagaccatggatcagtaccacttttgctacgatgtggccctggagtacttggaggggctggagtcaagatagcggggccctggcctggggcacccactgcacactcagggccagacccaccatcctggactggcgaggaagatcagtgcctcctgctctgcccaaacacactcccatggggcaagcactggagtggatgctgggctatcttgctcccccttccactgtgggcagggcctttcgcttgtcccatgggcgggtggtgggccaaggaggagcttagcaagtctgcagcccagccccacctccatagggtcctgcaggcctgtgctgagaggcctggtgctgcctggcagagtgacaaaggctcaggacggctggctctgggggactcaggccaagccccttggcaccatcctggcttttggcagggatgagtgaggccctgcagagagcatcccaggccaaggttcccactcagcctgccccctctgcatgtgggtagaggatgtactgggacttggcatttaggattccatctggcccagcccctgaaggtcctggggaagcaggtctcaattctgaatagccagtggggcacactgactgtcctccccaggggaactgcagcgccctcctccccactgccccctgcagcccctgagatattttgctcactatccctccccacttgcttccctgatatgtgctctgagcttccctgaaccaggatctgcctattactgctgtgccccatggggggctccttccctgcctgacccactgttgcagaatgaagtcacctcgcccccctcttcctttaatcttcaggcctcactggcctgtcctgctcagcttgggccagtgacaatctgcaaggctgaacaacagcccctggggttgaggcccctgtggctcctggtcaggctgcccgttgtggggaggggcagtgttagagcagggctggtcataccctctggagttcagaggaagaggtaggaccagtgcttttttgtttcttttgttatttttggttgggtgggtgggaaggtctctttaaaatggggcaggccacacccccattccgtgcctcaatttccccatctgtaaactgtagatatgactactgacctacctcgcagggggctgtggggaggcataagctgatgtttgtaaagcgctttgtaaataaacgtgctctctgaatgccacag

SEQ ID NO: 2631 - protein, 1442 aa, Homo sapiens; identical to SEQ ID NO: 65

SEQ ID NO: 2632 - DNA, 5582 bp, Homo sapiens
ggcgccagtcccgctccgcgccgcgccgctccgctccggctcgggctccggctcgcctcgggctgggctcgggctccgggggcggcgtcccccgcgccgggccccgggacgggcggcgacgctccaaccatggcccgtgcccaggcgctcgtgctggcactcaccttccagctctgcgcgccggagaccgagactccggcagctggctgcaccttcgaggaggcaagtgacccagcagtgccctgcgagtacagccaggcccagtacgatgacttccagtgggagcaagtgcgaatccaccctggcacccgggcacctgcggacctgccccacggctcctacttgatggtcaacacttcccagcatgccccaggccagcgagcccatgtcatcttccagagcctgagcgagaatgatacccactgtgtgcagttcagctacttcctgtacagccgggacgggcacagcccgggcaccctgggcgtctacgtgcgcgttaatgggggccccctgggcagtgctgtgtggaatatgactggatcccacggccgtcagtggcaccaggctgagctggctgtcagcactttctggcccaatgaatatcaggtgctgtttgaggccctcatctccccagaccgcaggggctacatgggcctagatgacatcctgcttctcagctacccctgcgcaaaggccccacacttctcccgcctgggcgacgtggaggtcaacgcgggccagaacgcgtcgttccagtgcatggccgcgggcagagcggccgaggccgaacgcttcctcttgcaacggcagagcggggcgctggtgccggcggcgggcgtgcggcacatcagccaccggcgcttcctggccactttcccgctggctgccgtgagccgcgccgagcaggacctgtaccgctgtgtgtcccaggccccgcgcggcgcgggcgtctctaacttcgcggagctcatcgtcaaggagcccccaactcccatcgcgcccccacagctgctgcgtgctggccccacctacctcatcatccagctcaacaccaactccatcattggcgacgggccgatcgtgcgcaaggagattgagtaccgcatggcgcgcgggccctgggctgaggtgcacgccgtcagcctgcagacctacaagctgtggcacctcgaccccgacacagagtatgagatcagcgtgctgctcacgcgtcccggagacggcggcactggccgccctgggccacccctcatcagccgcaccaaatgcgcagagcccatgagggcccccaaaggcctggcttttgctgagatccaggcccgtcagctgaccctgcagtgggaaccactgggctacaacgtgacgcgttgccacacctatactgtgtcgctgtgctatcactacaccctgggcagcagccacaaccagaccatccgagagtgtgtgaagacagagcaaggtgtcagccgctacaccatcaagaacctgctgccctatcggaacgttcacgtgaggcttgtcctcactaaccctgaggggcgcaaagagggcaaggaggtcactttccagacggatgaggatgtgcccagtgggattgcagccgagtccctgaccttcactccactggaggacatgatcttcctcaagtgggaggagccccaggagcccaatggtctcatcacccagtatgagatcagctaccagagcatcgagtcatcagacccggcagtgaacgtgccaggcccacgacgtaccatctccaagctccgcaatgagacctaccatgtcttctccaacctgcacccaggcaccacctacctgttctccgtgcgggcccgcacaggcaaaggcttcggccaggcggcactcactgagataaccactaacatctctgctcccagctttgattatgccgacatgccgtcacccctgggcgagtctgagaacaccatcaccgtgctgctgaggccggcacagggccgcggtgcgcccatcagtgtgtaccaggtgattgtggaggaggagcgggcgcggaggctgcggcgggagccaggtggacaggactgcttcccagtgccattgaccttcgaggcggcgctggcccgaggcctggtgcactacttcggggccgaactggcggccagcagtctacctgaggccatgccctttaccgtgggtgacaaccagacctaccgaggcttctggaacccaccacttgagcctaggaaggcctatctcatctacttccaggcagcaagccacctgaagggggagacccggctgaattgcatccgcattgccaggaaagctgcctgcaaggaaagcaagcggcccctggaggtgtcccagagatcggaggagatggggcttatcctgggcatctgtgcaggggggcttgctgtcctcatccttctcctgggtgccatcattgtcatcatccgcaaagggaagccggtgaacatgaccaaggccaccgtcaactaccgccaggagaagacacacatgatgagcgccgtggaccgcagcttcacagaccagagcaccctgcaggaggacgagcggctgggcctgtccttcatggacacccatggctacagcacccggggagaccagcgcagcggtggggtcactgaggccagcagcctcctggggggctccccgaggcgtccctgtggccggaagggctccccataccacacggggcagctgcaccctgcggtgcgtgtcgcagaccttctgcagcacatcaaccagatgaagacggccgagggttacggcttcaagcaggagtatgagagcttctttgaaggctgggacgccacaaagaagaaagacaaggtcaagggcagccggcaggagccaatgcctgcctatgatcggcaccgagtgaaactgcacccgatgctgggagaccccaatgccgactacattaatgccaactacatagatggttaccacaggtcaaaccacttcatagccactcaagggccgaagcctgagatggtctatgacttctggcgtatggtgtggcaggagcactgttccagcatcgtcatgatcaccaagctggtcgaggtgggcagggtgaaatgctcacggtactggccggaggactcagacacctacggggacatcaagattatgctggtgaagacagagaccctggctgagtatgtcgtgcgcacttttgccctggagcggagaggctactctgcccggcacgaggtccgccagttccacttcacagcgtggccagagcatggcgtcccctaccatgccacggggctgctggctttcatccggcgcgtgaaggcctccaccccacctgatgccgggcccattgtcatccactgcagcgcgggcaccggccgcacaggttgctatatcgtcctggatgtgatgctggacatggcagagtgtgagggcgtcgtggacatttacaactgtgtgaagactctctgctcccggcgtgtcaacatgatccagactgaggagcagtacatcttcattcatgatgcaatcctggaggcctgcctgtgtggggagaccaccatccctgtcagtgagttcaaggccacctacaaggagatgatccgcattgatcctcagagtaattcctcccagctgcgggaagagttccagacgctgaactcggtcaccccgccgctggacgtggaggagtgcagcatcgccctgttgccccggaaccgcgacaagaaccgcagcatggacgtcctgccgcccgaccgctgcctgcccttcctcatctccactgatggggactccaacaactacattaatgcagccctgactgacagctacacacggagtgcggccttcatcgtgaccctgcacccgctgcagagcaccacgcccgacttctggcggctggtctacgattacgggtgcacctccatcgtcatgctcaaccagctgaaccagtccaactccgcctggccctgcctgcagtactggccagagccaggccggcagcaatatggcctcatggaggtggagtttatgtcgggcacagctgatgaagacttagtggctcgagtcttccgggtgcagaacatctctcggttgcaggaggggcacctgctggtgcggcacttccagttcctgcgctggtctgcataccgggacacacctgactccaagaaggccttcttgcacctgctggctgaggtggacaagtggcaggccgagagtggggatgggcgcaccatcgtgcactgcctaaacgggggaggacgcagcggcaccttctgcgcctgcgccacggtcctggagatgatccgctgccacaacttggtggacgttttctttgctgccaaaaccctccggaactacaaacccaacatggtggagaccatggatcagtaccacttttgctacgatgtggccctggagtacttggaggggctggagtcaagatagcggggccctggcctggggcacccactgcacactcagggccagacccaccatcctggactggcgaggaagatcagtgcctcctgctctgcccaaacacactcccatggggcaagcactggagtggatgctgggctatcttgctcccccttccactgtgggcagggcctttcgcttgtcccatgggcgggtggtgggccaaggaggagcttagcaagtctgcagcccagccccacctccatagggtcctgcaggcctgtgctgagaggcctggtgctgcctggcagagtgacaaaggctcaggacggctggctctgggggactcaggccaagccccttggcaccatcctggcttttggcagggatgagtgaggccctgcagagagcatcccaggccaaggttcccactcagcctgccccctctgcatgtgggtagaggatgtactgggacttggcatttaggattccatctggcccagcccctgaaggtcctggggaagcaggtctcaattctgaatagccagtggggcacactgactgtcctccccaggggaactgcagcgccctcctccccactgccccctgcagcccctgagatattttgctcactatccctccccacttgcttccctgatatgtgctctgagcttccctgaaccaggatctgcctattactgctgtgccccatggggggctccttccctgcctgacccactgttgcagaatgaagtcacctcgcccccctcttcctttaatcttcaggcctcactggcctgtcctgctcagcttgggccagtgacaatctgcaaggctgaacaacagcccctggggttgaggcccctgtggctcctggtcaggctgcccgttgtggggaggggcagtgttagagcagggctggtcataccctctggagttcagaggaagaggtaggaccagtgcttttttgtttcttttgttatttttggttgggtgggtgggaaggtctctttaaaatggggcaggccacacccccattccgtgcctcaatttccccatctgtaaactgtagatatgactactgacctacctcgcagggggctgtggggaggcataagctgatgtttgtaaagcgctttgtaaataaacgtgctctctgaatgccacag

SEQ ID NO: 2633 - protein, 1436 aa, Homo sapiens; identical to SEQ ID NO: 67

SEQ ID NO: 2634 - DNA, 5612 bp, Homo sapiens
ggcgccagtcccgctccgcgccgcgccgctccgctccggctcgggctccggctcgcctcgggctgggctcgggctccgggggcggcgtcccccgcgccgggccccgggacgggcggcgacgctccaaccatggcccgtgcccaggcgctcgtgctggcactcaccttccagctctgcgcgccggagaccgagactccggcagctggctgcaccttcgaggaggcaagtgacccagcagtgccctgcgagtacagccaggcccagtacgatgacttccagtgggagcaagtgcgaatccaccctggcacccgggcacctgcggacctgccccacggctcctacttgatggtcaacacttcccagcatgccccaggccagcgagcccatgtcatcttccagagcctgagcgagaatgatacccactgtgtgcagttcagctacttcctgtacagccgggacgggcacagcccgggcaccctgggcgtctacgtgcgcgttaatgggggccccctgggcagtgctgtgtggaatatgactggatcccacggccgtcagtggcaccaggctgagctggctgtcagcactttctggcccaatgaatatcaggtgctgtttgaggccctcatctccccagaccgcaggggctacatgggcctagatgacatcctgcttctcagctacccctgcgcaaaggccccacacttctcccgcctgggcgacgtggaggtcaacgcgggccagaacgcgtcgttccagtgcatggccgcgggcagagcggccgaggccgaacgcttcctcttgcaacggcagagcggggcgctggtgccggcggcgggcgtgcggcacatcagccaccggcgcttcctggccactttcccgctggctgccgtgagccgcgccgagcaggacctgtaccgctgtgtgtcccaggccccgcgcggcgcgggcgtctctaacttcgcggagctcatcgtcaaggagcccccaactcccatcgcgcccccacagctgctgcgtgctggccccacctacctcatcatccagctcaacaccaactccatcattggcgacgggccgatcgtgcgcaaggagattgagtaccgcatggcgcgcgggccctgggctgaggtgcacgccgtcagcctgcagacctacaagctgtggcacctcgaccccgacacagagtatgagatcagcgtgctgctcacgcgtcccggagacggcggcactggccgccctgggccacccctcatcagccgcaccaaatgcgcagagcccatgagggcccccaaaggcctggcttttgctgagatccaggcccgtcagctgaccctgcagtgggaaccactgggctacaacgtgacgcgttgccacacctatactgtgtcgctgtgctatcactacaccctgggcagcagccacaaccagaccatccgagagtgtgtgaagacagagcaaggtgtcagccgctacaccatcaagaacctgctgccctatcggaacgttcacgtgaggcttgtcctcactaaccctgaggggcgcaaagagggcaaggaggtcactttccagacggatgaggatgtgcccagtgggattgcagccgagtccctgaccttcactccactggaggacatgatcttcctcaagtgggaggagccccaggagcccaatggtctcatcacccagtatgagatcagctaccagagcatcgagtcatcagacccggcagtgaacgtgccaggcccacgacgtaccatctccaagctccgcaatgagacctaccatgtcttctccaacctgcacccaggcaccacctacctgttctccgtgcgggcccgcacaggcaaaggcttcggccaggcggcactcactgagataaccactaacatctctgctcccagctttgattatgccgacatgccgtcacccctgggcgagtctgagaacaccatcaccgtgctgctgaggccggcacagggccgcggtgcgcccatcagtgtgtaccaggtgattgtggaggaggagcgggcgcggaggctgcggcgggagccaggtggacaggactgcttcccagtgccattgaccttcgaggcggcgctggcccgaggcctggtgcactacttcggggccgaactggcggccagcagtctacctgaggccatgccctttaccgtgggtgacaaccagacctaccgaggcttctggaacccaccacttgagcctaggaaggcctatctcatctacttccaggcagcaagccacctgaagggggagacccggctgaattgcatccgcattgccaggaaagctgcctgcaaggaaagcaagcggcccctggaggtgtcccagagatcggaggagatggggcttatcctgggcatctgtgcaggggggcttgctgtcctcatccttctcctgggtgccatcattgtcatcatccgcaaagggagagaccactatgcctactcctactacccgaagccggtgaacatgaccaaggccaccgtcaactaccgccaggagaagacacacatgatgagcgccgtggaccgcagcttcacagaccagagcaccctgcaggaggacgagcggctgggcctgtccttcatggacacccatggctacagcacccggggagaccagcgcagcggtggggtcactgaggccagcagcctcctggggggctccccgaggcgtccctgtggccggaagggctccccataccacacggggcagctgcaccctgcggtgcgtgtcgcagaccttctgcagcacatcaaccagatgaagacggccgagggttacggcttcaagcaggagtatgagagcttctttgaaggctgggacgccacaaagaagaaagacaaggtcaagggcagccggcaggagccaatgcctgcctatgatcggcaccgagtgaaactgcacccgatgctgggagaccccaatgccgactacattaatgccaactacatagatggttaccacaggtcaaaccacttcatagccactcaagggccgaagcctgagatggtctatgacttctggcgtatggtgtggcaggagcactgttccagcatcgtcatgatcaccaagctggtcgaggtgggcagggtgaaatgctcacggtactggccggaggactcagacacctacggggacatcaagattatgctggtgaagacagagaccctggctgagtatgtcgtgcgcacttttgccctggagcggagaggctactctgcccggcacgaggtccgccagttccacttcacagcgtggccagagcatggcgtcccctaccatgccacggggctgctggctttcatccggcgcgtgaaggcctccaccccacctgatgccgggcccattgtcatccactgcagcgcgggcaccggccgcacaggttgctatatcgtcctggatgtgatgctggacatggcagagtgtgagggcgtcgtggacatttacaactgtgtgaagactctctgctcccggcgtgtcaacatgatccagactgaggagcagtacatcttcattcatgatgcaatcctggaggcctgcctgtgtggggagaccaccatccctgtcagtgagttcaaggccacctacaaggagatgatccgcattgatcctcagagtaattcctcccagctgcgggaagagttccagacgctgaactcggtcaccccgccgctggacgtggaggagtgcagcatcgccctgttgccccggaaccgcgacaagaaccgcagcatggacgtcctgccgcccgaccgctgcctgcccttcctcatctccactgatggggactccaacaactacattaatgcagccctgactgacagctacacacggagtgcggccttcatcgtgaccctgcacccgctgcagagcaccacgcccgacttctggcggctggtctacgattacgggtgcacctccatcgtcatgctcaaccagctgaaccagtccaactccgcctggccctgcctgcagtactggccagagccaggccggcagcaatatggcctcatggaggtggagtttatgtcgggcacagctgatgaagacttagtggctcgagtcttccgggtgcagaacatctctcggttgcaggaggggcacctgctggtgcggcacttccagttcctgcgctggtctgcataccgggacacacctgactccaagaaggccttcttgcacctgctggctgaggtggacaagtggcaggccgagagtggggatgggcgcaccatcgtgcactgcctaaacgggggaggacgcagcggcaccttctgcgcctgcgccacggtcctggagatgatccgctgccacaacttggtggacgttttctttgctgccaaaaccctccggaactacaaacccaacatggtggagaccatggatcagtaccacttttgctacgatgtggccctggagtacttggaggggctggagtcaagatagcggggccctggcctggggcacccactgcacactcagggccagacccaccatcctggactggcgaggaagatcagtgcctcctgctctgcccaaacacactcccatggggcaagcactggagtggatgctgggctatcttgctcccccttccactgtgggcagggcctttcgcttgtcccatgggcgggtggtgggccaaggaggagcttagcaagtctgcagcccagccccacctccatagggtcctgcaggcctgtgctgagaggcctggtgctgcctggcagagtgacaaaggctcaggacggctggctctgggggactcaggccaagccccttggcaccatcctggcttttggcagggatgagtgaggccctgcagagagcatcccaggccaaggttcccactcagcctgccccctctgcatgtgggtagaggatgtactgggacttggcatttaggattccatctggcccagcccctgaaggtcctggggaagcaggtctcaattctgaatagccagtggggcacactgactgtcctccccaggggaactgcagcgccctcctccccactgccccctgcagcccctgagatattttgctcactatccctccccacttgcttccctgatatgtgctctgagcttccctgaaccaggatctgcctattactgctgtgccccatggggggctccttccctgcctgacccactgttgcagaatgaagtcacctcgcccccctcttcctttaatcttcaggcctcactggcctgtcctgctcagcttgggccagtgacaatctgcaaggctgaacaacagcccctggggttgaggcccctgtggctcctggtcaggctgcccgttgtggggaggggcagtgttagagcagggctggtcataccctctggagttcagaggaagaggtaggaccagtgcttttttgtttcttttgttatttttggttgggtgggtgggaaggtctctttaaaatggggcaggccacacccccattccgtgcctcaatttccccatctgtaaactgtagatatgactactgacctacctcgcagggggctgtggggaggcataagctgatgtttgtaaagcgctttgtaaataaacgtgctctctgaatgccacag

SEQ ID NO: 2635 - protein, 1446 aa, Homo sapiens; identical to SEQ ID NO: 63

SEQ ID NO: 2636 - DNA, 1602 bp, Homo sapiens
cttgtgggtggaaacgcgctggctgactggggtcggcgtttagttcagcgcagcgactcggggacctggagctgacgcctagacacttgtattagctttaatagaagagaaatggaggagccatagaatattaaggatgaattcaggaaggcctgagaccatggaaaacttgcctgctctctacactattttccaaggagaggttgctatggtgacagactatggggcctttatcaaaatcccaggctgtcggaagcaaggtctggtccatcgaactcatatgtcatcctgtcgggtggataagccctctgagatagtagatgttggagataaagtgtgggtgaagcttattggccgagagatgaaaaatgatagaataaaagtatccctctccatgaaggttgtcaatcaagggactgggaaagaccttgatcccaacaatgttatcattgagcaagaagagaggcggaggcgatccttccaggattacactgggcagaagatcacccttgaggctgtcttgaacactacctgcaagaagtgtggctgtaaaggccactttgcaaaagattgtttcatgcaaccaggtgggactaaatactctctgatacctgatgaggaagaggaaaaggaagaggcaaagtcagcagagtttgagaagcctgaccctacaaggaatccttctagaaaaagaaagaaggagaagaagaaaaagaaacatagagataggaagtcatctgactctgacagctcagactctgagagtgatacaggcaagagggcaaggcacacatcaaaagacagcaaggcagcaaagaagaagaaaaagaagaagaagcacaagaagaagcacaaggagtgagagtataaagagtgtagggggtggttgagagtaagaaaccaggagccttgtgccttgagactcctggaaagactcaatagtgagaatatagcctcccaccccattaacttcgctcccatgggagatggcttcccctcatgcaacaggcaggtttgggagttagaggtcaaaagcagctgcctgaatgagttgttgtttccttatcactcctggtccctttgcaagtgaaccctgcagctcacccattcattcacccaacttccttcattcagcaggaggtcctattaccctctccagctgccactgccagagctggattcctgtaaaggagtccaggctagagccacagagactgttgtggaggtgagttcggctgtagttagagtgattggacccttcctattggtctgtcctgggccaactggtgggtgatctctgctgcatccaacatgggagcagagactggcagcaggaggggggaacatggtgagaagtggtgctcacttttcccattcctcctaacatagttctactatgctagaagtggcatccagcggccacagctagaaaacagtctgcagtgtgacttaacttgtgtattgcattccagcagaccactgaaccagacagcgaagccaagatcattgttctactttgtatttactactgtgtgaatcagttgattctacttcaggtccttgcttaaattcctgtcactaaatggaaatgtgtttggtttt

SEQ ID NO: 2637 - protein, 241 aa, Homo sapiens; identical to SEQ ID NO: 69

SEQ ID NO: 2638 - DNA, 1355 bp, Homo sapiens
cttgtgggtggaaacgcgctggctgactggggtcggcgtttagttcagcgcagcgactcggggacctggagctgacgcctagacacttgtattagctttaatagaagagaaatggaggagccatagaatattaaggatgaattcaggaaggcctgagaccatggaaaacttgcctgctctctacactattttccaaggagaggttgctatggtgacagactatggggcctttatcaaaatcccaggctgtcggaagcaaggtctggtccatcgaactcatatgtcatcctgtcgggtggataagccctctgagatagtagatgttggagataaagtgtgggtgaagcttattggccgagagatgaaaaatgatagaataaaagtatccctctccatgaaggttgtcaatcaagggactgggaaagaccttgatcccaacaatgttatcattgagagaagaagaaaaagaaacatagagataggaagtcatctgactctgacagctcagactctgagagtgatacaggcaagagggcaaggcacacatcaaaagacagcaaggcagcaaagaagaagaaaaagaagaagaagcacaagaagaagcacaaggagtgagagtataaagagtgtagggggtggttgagagtaagaaaccaggagccttgtgccttgagactcctggaaagactcaatagtgagaatatagcctcccaccccattaacttcgctcccatgggagatggcttcccctcatgcaacaggcaggtttgggagttagaggtcaaaagcagctgcctgaatgagttgttgtttccttatcactcctggtccctttgcaagtgaaccctgcagctcacccattcattcacccaacttccttcattcagcaggaggtcctattaccctctccagctgccactgccagagctggattcctgtaaaggagtccaggctagagccacagagactgttgtggaggtgagttcggctgtagttagagtgattggacccttcctattggtctgtcctgggccaactggtgggtgatctctgctgcatccaacatgggagcagagactggcagcaggaggggggaacatggtgagaagtggtgctcacttttcccattcctcctaacatagttctactatgctagaagtggcatccagcggccacagctagaaaacagtctgcagtgtgacttaacttgtgtattgcattccagcagaccactgaaccagacagcgaagccaagatcattgttctactttgtatttactactgtgtgaatcagttgattctacttcaggtccttgcttaaattcctgtcactaaatggaaatgtgtttggtttt

SEQ ID NO: 2639 - protein, 168 aa, Homo sapiens
MNSGRPETMENLPALYTIFQGEVAMVTDYGAFIKIPGCRKQGLVHRTHMSSCRVDKPSEIVDVGDKVWVKLIGREMKNDRIKVSLSMKVVNQGTGKDLDPNNVIIERRRKRNIEIGSHLTLTAQTLRVIQARGQGTHQKTARQQRRRKRRRSTRRSTRSESIKSVGGG

SEQ ID NO: 2640 - DNA, 2366 bp, Homo sapiens
cttgtgggtggaaacgcgctggctgactggggtcggcgtttagttcagcgcagcgactcggggacctggagctgacgcctagacacttgtattagctttaatagaagagaaatggaggagccatagaatattaaggatgaattcaggaaggcctgagaccatggaaaacttgcctgctctctacactattttccaaggagaggttgctatggtgacagactatggggcctttatcaaaatcccaggctgtcggaagcaaggtctggtccatcgaactcatatgtcatcctgtcgggtggataagccctctgagatagtagatgttggagataaagtgtgggtgaagcttattggccgagagatgaaaaatgatagaataaaagtatccctctccatgaaggttgtcaatcaagggactgggaaagaccttgatcccaacaatgttatcattgagagaagaagaaaaagaaacatagagataggaagtcatctgactctgacagctcagactctgagagtgatacaggcaagagggcaaggcacacatcaaaagacagcaaggcagcaaagaagaagaaaaagaagaagaagcacaagaagaagcacaaggagtgagagtataaagagtgtagggggtggttgagagtaagaaaccaggagccttgtgccttgagactcctggaaagactcaatagtgagaatatagcctcccaccccattaacttcgctcccatgggagatggcttcccctcatgcaacaggcaggtttgggagttagaggtcaaaagcagctgcctgaatgagttgttgtttccttatcactcctggtccctttgcaagtgaaccctgcagctcacccattcattcacccaacttccttcattcagcaggaggtcctattaccctctccagctgccactgccagagctggattcctgtaaaggagtccaggctagagccacagagactgttgtggaggtgagttcggctgtagttagagtgattggacccttcctattggtctgtcctgggccaactggtgggtgatctctgctgcatccaacatgggagcagagactggcagcaggaggggggaacatggtgagaagtggtgctcacttttcccattcctcctaacatagttctactatgctagaagtggcatccagcggccacagctagaaaacagtctgcagtgtgacttaacttgtgtattgcattccagcagaccactgaaccagacagcgaagccaagatcattgttctactttgtatttactactgtgtgaatcagttgattctacttcaggtccttgcttaaattcctgtcactaaatggaaatgtgtttggttttaaacttactgagttatttttcctataatccttcttcctgggtaacttacagacttaaagtcactgagcctgcattagctgacaaaaacatttaatatgttaccttagaccttggagagatgcccagcagaggtacagagccaaaggcactagcagatcactgccttcttgggagatcacttataagccctcccttttgtaatgatcagatgccctcttccctcagagttgattagagaagcagtaagaatttgtagtcataagtactagcctggtgcacaggtcagcagtcctcttggccagtggtcattttctcccaccaccatggtacaagcctgggttctgtgccctgaacctgaattctggaaagggagagactacagcatttcacagagaacagccagacccaagagctttcagtgtaggatgggcctgaagtgacagttcaatagccaaacctggggaagccccatcactgactgaactaggtcatttgaccatggagggggggcagtgtaaaggcaacgtgtaggtacagctcttttattattaaatgtgtaaggtgatcagctgattaacaggctccgagactgtccatttcagtctcccatccagtgcttcttcctcagtaaccttcaggccgttatttctgcccactctctgacacacaggataaaccaagactcccagagttatgttaccaaaggcaaaaaggcaactgggtggccttggctctgctttattgacctcagagcaccctatgagtgcagttaaaaaaaaaaaaaaaaaaccacatacaccatgggaactggaactggatcccggtcagtggcacctgaccccagaagaattcgtggatttgtacaaaatgcagaggaagaaatgaggcaatgtggtgctgagtcgaggggtagccgattggcagagtagtagtcagcaacagtgcagtcaggtcatgcctctttctcataagtgcgagtgcaaactgcagtgccgtgggtgagtgtctgga

SEQ ID NO: 2641 - protein, 168 aa, Homo sapiens; identical to SEQ ID NO: 2639

SEQ ID NO: 2642 - DNA, 2613 bp, Homo sapiens
cttgtgggtggaaacgcgctggctgactggggtcggcgtttagttcagcgcagcgactcggggacctggagctgacgcctagacacttgtattagctttaatagaagagaaatggaggagccatagaatattaaggatgaattcaggaaggcctgagaccatggaaaacttgcctgctctctacactattttccaaggagaggttgctatggtgacagactatggggcctttatcaaaatcccaggctgtcggaagcaaggtctggtccatcgaactcatatgtcatcctgtcgggtggataagccctctgagatagtagatgttggagataaagtgtgggtgaagcttattggccgagagatgaaaaatgatagaataaaagtatccctctccatgaaggttgtcaatcaagggactgggaaagaccttgatcccaacaatgttatcattgagcaagaagagaggcggaggcgatccttccaggattacactgggcagaagatcacccttgaggctgtcttgaacactacctgcaagaagtgtggctgtaaaggccactttgcaaaagattgtttcatgcaaccaggtgggactaaatactctctgatacctgatgaggaagaggaaaaggaagaggcaaagtcagcagagtttgagaagcctgaccctacaaggaatccttctagaaaaagaaagaaggagaagaagaaaaagaaacatagagataggaagtcatctgactctgacagctcagactctgagagtgatacaggcaagagggcaaggcacacatcaaaagacagcaaggcagcaaagaagaagaaaaagaagaagaagcacaagaagaagcacaaggagtgagagtataaagagtgtagggggtggttgagagtaagaaaccaggagccttgtgccttgagactcctggaaagactcaatagtgagaatatagcctcccaccccattaacttcgctcccatgggagatggcttcccctcatgcaacaggcaggtttgggagttagaggtcaaaagcagctgcctgaatgagttgttgtttccttatcactcctggtccctttgcaagtgaaccctgcagctcacccattcattcacccaacttccttcattcagcaggaggtcctattaccctctccagctgccactgccagagctggattcctgtaaaggagtccaggctagagccacagagactgttgtggaggtgagttcggctgtagttagagtgattggacccttcctattggtctgtcctgggccaactggtgggtgatctctgctgcatccaacatgggagcagagactggcagcaggaggggggaacatggtgagaagtggtgctcacttttcccattcctcctaacatagttctactatgctagaagtggcatccagcggccacagctagaaaacagtctgcagtgtgacttaacttgtgtattgcattccagcagaccactgaaccagacagcgaagccaagatcattgttctactttgtatttactactgtgtgaatcagttgattctacttcaggtccttgcttaaattcctgtcactaaatggaaatgtgtttggttttaaacttactgagttatttttcctataatccttcttcctgggtaacttacagacttaaagtcactgagcctgcattagctgacaaaaacatttaatatgttaccttagaccttggagagatgcccagcagaggtacagagccaaaggcactagcagatcactgccttcttgggagatcacttataagccctcccttttgtaatgatcagatgccctcttccctcagagttgattagagaagcagtaagaatttgtagtcataagtactagcctggtgcacaggtcagcagtcctcttggccagtggtcattttctcccaccaccatggtacaagcctgggttctgtgccctgaacctgaattctggaaagggagagactacagcatttcacagagaacagccagacccaagagctttcagtgtaggatgggcctgaagtgacagttcaatagccaaacctggggaagccccatcactgactgaactaggtcatttgaccatggagggggggcagtgtaaaggcaacgtgtaggtacagctcttttattattaaatgtgtaaggtgatcagctgattaacaggctccgagactgtccatttcagtctcccatccagtgcttcttcctcagtaaccttcaggccgttatttctgcccactctctgacacacaggataaaccaagactcccagagttatgttaccaaaggcaaaaaggcaactgggtggccttggctctgctttattgacctcagagcaccctatgagtgcagttaaaaaaaaaaaaaaaaaaccacatacaccatgggaactggaactggatcccggtcagtggcacctgaccccagaagaattcgtggatttgtacaaaatgcagaggaagaaatgaggcaatgtggtgctgagtcgaggggtagccgattggcagagtagtagtcagcaacagtgcagtcaggtcatgcctctttctcataagtgcgagtgcaaactgcagtgccgtgggtgagtgtctgga

SEQ ID NO: 2643 - protein, 241 aa, Homo sapiens; identical to SEQ ID NO: 69

SEQ ID NO: 2644 - DNA, 1669 bp, Homo sapiens
gtgggtggaaacgcgctggctgactggggtcggcgtttagttcagcgcagcgactcggggacctggagctgacgcctagacacttgtattagctttaatagaagagaaatggaggagccatagaatattaaggatgaattcaggaaggcctgagaccatggaaaacttgcctgctctctacactattttccaaggagagttatggtgaagctgaaacagtgctcaagatgaagcagctaattgaagacactgaaaagaataaagtttatgttgctatggtgacagactatggggcctttatcaaaatcccaggctgtcggaagcaaggtctggtccatcgaactcatatgtcatcctgtcgggtggataagccctctgagatagtagatgttggagataaagtgtgggtgaagcttattggccgagagatgaaaaatgatagaataaaagtatccctctccatgaaggttgtcaatcaagggactgggaaagaccttgatcccaacaatgttatcattgagcaagaagagaggcggaggcgatccttccaggattacactgggcagaagatcacccttgaggctgtcttgaacactacctgcaagaagtgtggctgtaaaggccactttgcaaaagattgtttcatgcaaccaggtgggactaaatactctctgatacctgatgaggaagaggaaaaggaagaggcaaagtcagcagagtttgagaagcctgaccctacaaggaatccttctagaaaaagaaagaaggagaagaagaaaaagaaacatagagataggaagtcatctgactctgacagctcagactctgagagtgatacaggcaagagggcaaggcacacatcaaaagacagcaaggcagcaaagaagaagaaaaagaagaagaagcacaagaagaagcacaaggagtgagagtataaagagtgtagggggtggttgagagtaagaaaccaggagccttgtgccttgagactcctggaaagactcaatagtgagaatatagcctcccaccccattaacttcgctcccatgggagatggcttcccctcatgcaacaggcaggtttgggagttagaggtcaaaagcagctgcctgaatgagttgttgtttccttatcactcctggtccctttgcaagtgaaccctgcagctcacccattcattcacccaacttccttcattcagcaggaggtcctattaccctctccagctgccactgccagagctggattcctgtaaaggagtccaggctagagccacagagactgttgtggaggtgagttcggctgtagttagagtgattggacccttcctattggtctgtcctgggccaactggtgggtgatctctgctgcatccaacatgggagcagagactggcagcaggaggggggaacatggtgagaagtggtgctcacttttcccattcctcctaacatagttctactatgctagaagtggcatccagcggccacagctagaaaacagtctgcagtgtgacttaacttgtgtattgcattccagcagaccactgaaccagacagcgaagccaagatcattgttctactttgtatttactactgtgtgaatcagttgattctacttcaggtccttgcttaaattcctgtcactaaatggaaatgtgtttggtttt

SEQ ID NO: 2645 - protein, 233 aa, Homo sapiens
MKQLIEDTEKNKVYVAMVTDYGAFIKIPGCRKQGLVHRTHMSSCRVDKPSEIVDVGDKVWVKLIGREMKNDRIKVSLSMKVVNQGTGKDLDPNNVIIEQEERRRRSFQDYTGQKITLEAVLNTTCKKCGCKGHFAKDCFMQPGGTKYSLIPDEEEEKEEAKSAEFEKPDPTRNPSRKRKKEKKKKKHRDRKSSDSDSSDSESDTGKRARHTSKDSKAAKKKKKKKKHKKKHKE

SEQ ID NO: 2646 - DNA, 2680 bp, Homo sapiens
gtgggtggaaacgcgctggctgactggggtcggcgtttagttcagcgcagcgactcggggacctggagctgacgcctagacacttgtattagctttaatagaagagaaatggaggagccatagaatattaaggatgaattcaggaaggcctgagaccatggaaaacttgcctgctctctacactattttccaaggagagttatggtgaagctgaaacagtgctcaagatgaagcagctaattgaagacactgaaaagaataaagtttatgttgctatggtgacagactatggggcctttatcaaaatcccaggctgtcggaagcaaggtctggtccatcgaactcatatgtcatcctgtcgggtggataagccctctgagatagtagatgttggagataaagtgtgggtgaagcttattggccgagagatgaaaaatgatagaataaaagtatccctctccatgaaggttgtcaatcaagggactgggaaagaccttgatcccaacaatgttatcattgagcaagaagagaggcggaggcgatccttccaggattacactgggcagaagatcacccttgaggctgtcttgaacactacctgcaagaagtgtggctgtaaaggccactttgcaaaagattgtttcatgcaaccaggtgggactaaatactctctgatacctgatgaggaagaggaaaaggaagaggcaaagtcagcagagtttgagaagcctgaccctacaaggaatccttctagaaaaagaaagaaggagaagaagaaaaagaaacatagagataggaagtcatctgactctgacagctcagactctgagagtgatacaggcaagagggcaaggcacacatcaaaagacagcaaggcagcaaagaagaagaaaaagaagaagaagcacaagaagaagcacaaggagtgagagtataaagagtgtagggggtggttgagagtaagaaaccaggagccttgtgccttgagactcctggaaagactcaatagtgagaatatagcctcccaccccattaacttcgctcccatgggagatggcttcccctcatgcaacaggcaggtttgggagttagaggtcaaaagcagctgcctgaatgagttgttgtttccttatcactcctggtccctttgcaagtgaaccctgcagctcacccattcattcacccaacttccttcattcagcaggaggtcctattaccctctccagctgccactgccagagctggattcctgtaaaggagtccaggctagagccacagagactgttgtggaggtgagttcggctgtagttagagtgattggacccttcctattggtctgtcctgggccaactggtgggtgatctctgctgcatccaacatgggagcagagactggcagcaggaggggggaacatggtgagaagtggtgctcacttttcccattcctcctaacatagttctactatgctagaagtggcatccagcggccacagctagaaaacagtctgcagtgtgacttaacttgtgtattgcattccagcagaccactgaaccagacagcgaagccaagatcattgttctactttgtatttactactgtgtgaatcagttgattctacttcaggtccttgcttaaattcctgtcactaaatggaaatgtgtttggttttaaacttactgagttatttttcctataatccttcttcctgggtaacttacagacttaaagtcactgagcctgcattagctgacaaaaacatttaatatgttaccttagaccttggagagatgcccagcagaggtacagagccaaaggcactagcagatcactgccttcttgggagatcacttataagccctcccttttgtaatgatcagatgccctcttccctcagagttgattagagaagcagtaagaatttgtagtcataagtactagcctggtgcacaggtcagcagtcctcttggccagtggtcattttctcccaccaccatggtacaagcctgggttctgtgccctgaacctgaattctggaaagggagagactacagcatttcacagagaacagccagacccaagagctttcagtgtaggatgggcctgaagtgacagttcaatagccaaacctggggaagccccatcactgactgaactaggtcatttgaccatggagggggggcagtgtaaaggcaacgtgtaggtacagctcttttattattaaatgtgtaaggtgatcagctgattaacaggctccgagactgtccatttcagtctcccatccagtgcttcttcctcagtaaccttcaggccgttatttctgcccactctctgacacacaggataaaccaagactcccagagttatgttaccaaaggcaaaaaggcaactgggtggccttggctctgctttattgacctcagagcaccctatgagtgcagttaaaaaaaaaaaaaaaaaaccacatacaccatgggaactggaactggatcccggtcagtggcacctgaccccagaagaattcgtggatttgtacaaaatgcagaggaagaaatgaggcaatgtggtgctgagtcgaggggtagccgattggcagagtagtagtcagcaacagtgcagtcaggtcatgcctctttctcataagtgcgagtgcaaactgcagtgccgtgggtgagtgtctgga

SEQ ID NO: 2647 - protein, 233 aa, Homo sapiens; identical to SEQ ID NO: 2645

SEQ ID NO: 2648 - DNA, 1727 bp, Homo sapiens
acgcgctggctgactggggtcggcgtttagttcagcgcagcgactcggggacctggagctgacgcctagtacgtatgaggaagaacggggtgggtggctgcctgagtctggaggcgacgcctcggttgtgcagtctgaacctgcccttctcagctgagggtgctgacagcaaggggtgggaggcgggccccgagtccccagctgtggacacttgtattagctttaatagaagagaaatggaggagccatagaatattaaggatgaattcaggaaggcctgagaccatggaaaacttgcctgctctctacactattttccaaggagaggttgctatggtgacagactatggggcctttatcaaaatcccaggctgtcggaagcaaggtctggtccatcgaactcatatgtcatcctgtcgggtggataagccctctgagatagtagatgttggagataaagtgtgggtgaagcttattggccgagagatgaaaaatgatagaataaaagtatccctctccatgaaggttgtcaatcaagggactgggaaagaccttgatcccaacaatgttatcattgagcaagaagagaggcggaggcgatccttccaggattacactgggcagaagatcacccttgaggctgtcttgaacactacctgcaagaagtgtggctgtaaaggccactttgcaaaagattgtttcatgcaaccaggtgggactaaatactctctgatacctgatgaggaagaggaaaaggaagaggcaaagtcagcagagtttgagaagcctgaccctacaaggaatccttctagaaaaagaaagaaggagaagaagaaaaagaaacatagagataggaagtcatctgactctgacagctcagactctgagagtgatacaggcaagagggcaaggcacacatcaaaagacagcaaggcagcaaagaagaagaaaaagaagaagaagcacaagaagaagcacaaggagtgagagtataaagagtgtagggggtggttgagagtaagaaaccaggagccttgtgccttgagactcctggaaagactcaatagtgagaatatagcctcccaccccattaacttcgctcccatgggagatggcttcccctcatgcaacaggcaggtttgggagttagaggtcaaaagcagctgcctgaatgagttgttgtttccttatcactcctggtccctttgcaagtgaaccctgcagctcacccattcattcacccaacttccttcattcagcaggaggtcctattaccctctccagctgccactgccagagctggattcctgtaaaggagtccaggctagagccacagagactgttgtggaggtgagttcggctgtagttagagtgattggacccttcctattggtctgtcctgggccaactggtgggtgatctctgctgcatccaacatgggagcagagactggcagcaggaggggggaacatggtgagaagtggtgctcacttttcccattcctcctaacatagttctactatgctagaagtggcatccagcggccacagctagaaaacagtctgcagtgtgacttaacttgtgtattgcattccagcagaccactgaaccagacagcgaagccaagatcattgttctactttgtatttactactgtgtgaatcagttgattctacttcaggtccttgcttaaattcctgtcactaaatggaaatgtgtttggtttt

SEQ ID NO: 2649 - protein, 241 aa, Homo sapiens; identical to SEQ ID NO: 69

SEQ ID NO: 2650 - DNA, 2738 bp, Homo sapiens
acgcgctggctgactggggtcggcgtttagttcagcgcagcgactcggggacctggagctgacgcctagtacgtatgaggaagaacggggtgggtggctgcctgagtctggaggcgacgcctcggttgtgcagtctgaacctgcccttctcagctgagggtgctgacagcaaggggtgggaggcgggccccgagtccccagctgtggacacttgtattagctttaatagaagagaaatggaggagccatagaatattaaggatgaattcaggaaggcctgagaccatggaaaacttgcctgctctctacactattttccaaggagaggttgctatggtgacagactatggggcctttatcaaaatcccaggctgtcggaagcaaggtctggtccatcgaactcatatgtcatcctgtcgggtggataagccctctgagatagtagatgttggagataaagtgtgggtgaagcttattggccgagagatgaaaaatgatagaataaaagtatccctctccatgaaggttgtcaatcaagggactgggaaagaccttgatcccaacaatgttatcattgagcaagaagagaggcggaggcgatccttccaggattacactgggcagaagatcacccttgaggctgtcttgaacactacctgcaagaagtgtggctgtaaaggccactttgcaaaagattgtttcatgcaaccaggtgggactaaatactctctgatacctgatgaggaagaggaaaaggaagaggcaaagtcagcagagtttgagaagcctgaccctacaaggaatccttctagaaaaagaaagaaggagaagaagaaaaagaaacatagagataggaagtcatctgactctgacagctcagactctgagagtgatacaggcaagagggcaaggcacacatcaaaagacagcaaggcagcaaagaagaagaaaaagaagaagaagcacaagaagaagcacaaggagtgagagtataaagagtgtagggggtggttgagagtaagaaaccaggagccttgtgccttgagactcctggaaagactcaatagtgagaatatagcctcccaccccattaacttcgctcccatgggagatggcttcccctcatgcaacaggcaggtttgggagttagaggtcaaaagcagctgcctgaatgagttgttgtttccttatcactcctggtccctttgcaagtgaaccctgcagctcacccattcattcacccaacttccttcattcagcaggaggtcctattaccctctccagctgccactgccagagctggattcctgtaaaggagtccaggctagagccacagagactgttgtggaggtgagttcggctgtagttagagtgattggacccttcctattggtctgtcctgggccaactggtgggtgatctctgctgcatccaacatgggagcagagactggcagcaggaggggggaacatggtgagaagtggtgctcacttttcccattcctcctaacatagttctactatgctagaagtggcatccagcggccacagctagaaaacagtctgcagtgtgacttaacttgtgtattgcattccagcagaccactgaaccagacagcgaagccaagatcattgttctactttgtatttactactgtgtgaatcagttgattctacttcaggtccttgcttaaattcctgtcactaaatggaaatgtgtttggttttaaacttactgagttatttttcctataatccttcttcctgggtaacttacagacttaaagtcactgagcctgcattagctgacaaaaacatttaatatgttaccttagaccttggagagatgcccagcagaggtacagagccaaaggcactagcagatcactgccttcttgggagatcacttataagccctcccttttgtaatgatcagatgccctcttccctcagagttgattagagaagcagtaagaatttgtagtcataagtactagcctggtgcacaggtcagcagtcctcttggccagtggtcattttctcccaccaccatggtacaagcctgggttctgtgccctgaacctgaattctggaaagggagagactacagcatttcacagagaacagccagacccaagagctttcagtgtaggatgggcctgaagtgacagttcaatagccaaacctggggaagccccatcactgactgaactaggtcatttgaccatggagggggggcagtgtaaaggcaacgtgtaggtacagctcttttattattaaatgtgtaaggtgatcagctgattaacaggctccgagactgtccatttcagtctcccatccagtgcttcttcctcagtaaccttcaggccgttatttctgcccactctctgacacacaggataaaccaagactcccagagttatgttaccaaaggcaaaaaggcaactgggtggccttggctctgctttattgacctcagagcaccctatgagtgcagttaaaaaaaaaaaaaaaaaaccacatacaccatgggaactggaactggatcccggtcagtggcacctgaccccagaagaattcgtggatttgtacaaaatgcagaggaagaaatgaggcaatgtggtgctgagtcgaggggtagccgattggcagagtagtagtcagcaacagtgcagtcaggtcatgcctctttctcataagtgcgagtgcaaactgcagtgccgtgggtgagtgtctgga

SEQ ID NO: 2651 - protein, 241 aa, Homo sapiens; identical to SEQ ID NO: 69

SEQ ID NO: 2652 - DNA, 532 bp, Homo sapiens
agcgcagcgactcggggacctggagctgacgcctaacggactctcgctctgtcgcccaggctggagtacaatggtacgatcttggttcactgcaagctccacctcccaggttcatgccattctcctgcctcagcctgccgagtagctgggattacaggacacttgtattagctttaatagaagagaaatggaggagccatagaatattaaggatgaattcaggaaggcctgagaccatggaaaacttgcctgctctctacactattttccaaggagaggttgctatggtgacagactatggggcctttatcaaaatcccaggctgtcggaagcaaggtctggtccatcgaactcatatgtcatcctgtcgggtggataagccctctgagatagtagatgttggagataaagtgtgggtgaagcttattggccgagagatgaaaaatgatagaataaaagtatccctctccatgaaggttgtcaatcaagggactgggaaagaccttgatcccaacaatgttatcattgagta

SEQ ID NO: 2653 - protein, 138 aa, Homo sapiens
MPFSCLSLPSSWDYRTLVLALIEEKWRSHRILRMNSGRPETMENLPALYTIFQGEVAMVTDYGAFIKIPGCRKQGLVHRTHMSSCRVDKPSEIVDVGDKVWVKLIGREMKNDRIKVSLSMKVVNQGTGKDLDPNNVII

SEQ ID NO: 2654 - DNA, 1488 bp, Homo sapiens
gcctcggttgtgcagtctgaacctgcccttctcagctgagggtgctgacagcaaggggtgggaggcgggccccgagtccccagctgtggttgctatggtgacagactatggggcctttatcaaaatcccaggctgtcggaagcaaggtctggtccatcgaactcatatgtcatcctgtcgggtggataagccctctgagatagtagatgttggagataaagtgtgggtgaagcttattggccgagagatgaaaaatgatagaataaaagtatccctctccatgaaggttgtcaatcaagggactgggaaagaccttgatcccaacaatgttatcattgagcaagaagagaggcggaggcgatccttccaggattacactgggcagaagatcacccttgaggctgtcttgaacactacctgcaagaagtgtggctgtaaaggccactttgcaaaagattgtttcatgcaaccaggtgggactaaatactctctgatacctgatgaggaagaggaaaaggaagaggcaaagtcagcagagtttgagaagcctgaccctacaaggaatccttctagaaaaagaaagaaggagaagaagaaaaagaaacatagagataggaagtcatctgactctgacagctcagactctgagagtgatacaggcaagagggcaaggcacacatcaaaagacagcaaggcagcaaagaagaagaaaaagaagaagaagcacaagaagaagcacaaggagtgagagtataaagagtgtagggggtggttgagagtaagaaaccaggagccttgtgccttgagactcctggaaagactcaatagtgagaatatagcctcccaccccattaacttcgctcccatgggagatggcttcccctcatgcaacaggcaggtttgggagttagaggtcaaaagcagctgcctgaatgagttgttgtttccttatcactcctggtccctttgcaagtgaaccctgcagctcacccattcattcacccaacttccttcattcagcaggaggtcctattaccctctccagctgccactgccagagctggattcctgtaaaggagtccaggctagagccacagagactgttgtggaggtgagttcggctgtagttagagtgattggacccttcctattggtctgtcctgggccaactggtgggtgatctctgctgcatccaacatgggagcagagactggcagcaggaggggggaacatggtgagaagtggtgctcacttttcccattcctcctaacatagttctactatgctagaagtggcatccagcggccacagctagaaaacagtctgcagtgtgacttaacttgtgtattgcattccagcagaccactgaaccagacagcgaagccaagatcattgttctactttgtatttactactgtgtgaatcagttgattctacttcaggtccttgcttaaattcctgtcactaaatggaaatgtgtttggtttt

SEQ ID NO: 2655 - protein, 217 aa, Homo sapiens
MVTDYGAFIKIPGCRKQGLVHRTHMSSCRVDKPSEIVDVGDKVWVKLIGREMKNDRIKVSLSMKVVNQGTGKDLDPNNVIIEQEERRRRSFQDYTGQKITLEAVLNTTCKKCGCKGHFAKDCFMQPGGTKYSLIPDEEEEKEEAKSAEFEKPDPTRNPSRKRKKEKKKKKHRDRKSSDSDSSDSESDTGKRARHTSKDSKAAKKKKKKKKHKKKHKE

SEQ ID NO: 2656 - DNA, 2499 bp, Homo sapiens
gcctcggttgtgcagtctgaacctgcccttctcagctgagggtgctgacagcaaggggtgggaggcgggccccgagtccccagctgtggttgctatggtgacagactatggggcctttatcaaaatcccaggctgtcggaagcaaggtctggtccatcgaactcatatgtcatcctgtcgggtggataagccctctgagatagtagatgttggagataaagtgtgggtgaagcttattggccgagagatgaaaaatgatagaataaaagtatccctctccatgaaggttgtcaatcaagggactgggaaagaccttgatcccaacaatgttatcattgagcaagaagagaggcggaggcgatccttccaggattacactgggcagaagatcacccttgaggctgtcttgaacactacctgcaagaagtgtggctgtaaaggccactttgcaaaagattgtttcatgcaaccaggtgggactaaatactctctgatacctgatgaggaagaggaaaaggaagaggcaaagtcagcagagtttgagaagcctgaccctacaaggaatccttctagaaaaagaaagaaggagaagaagaaaaagaaacatagagataggaagtcatctgactctgacagctcagactctgagagtgatacaggcaagagggcaaggcacacatcaaaagacagcaaggcagcaaagaagaagaaaaagaagaagaagcacaagaagaagcacaaggagtgagagtataaagagtgtagggggtggttgagagtaagaaaccaggagccttgtgccttgagactcctggaaagactcaatagtgagaatatagcctcccaccccattaacttcgctcccatgggagatggcttcccctcatgcaacaggcaggtttgggagttagaggtcaaaagcagctgcctgaatgagttgttgtttccttatcactcctggtccctttgcaagtgaaccctgcagctcacccattcattcacccaacttccttcattcagcaggaggtcctattaccctctccagctgccactgccagagctggattcctgtaaaggagtccaggctagagccacagagactgttgtggaggtgagttcggctgtagttagagtgattggacccttcctattggtctgtcctgggccaactggtgggtgatctctgctgcatccaacatgggagcagagactggcagcaggaggggggaacatggtgagaagtggtgctcacttttcccattcctcctaacatagttctactatgctagaagtggcatccagcggccacagctagaaaacagtctgcagtgtgacttaacttgtgtattgcattccagcagaccactgaaccagacagcgaagccaagatcattgttctactttgtatttactactgtgtgaatcagttgattctacttcaggtccttgcttaaattcctgtcactaaatggaaatgtgtttggttttaaacttactgagttatttttcctataatccttcttcctgggtaacttacagacttaaagtcactgagcctgcattagctgacaaaaacatttaatatgttaccttagaccttggagagatgcccagcagaggtacagagccaaaggcactagcagatcactgccttcttgggagatcacttataagccctcccttttgtaatgatcagatgccctcttccctcagagttgattagagaagcagtaagaatttgtagtcataagtactagcctggtgcacaggtcagcagtcctcttggccagtggtcattttctcccaccaccatggtacaagcctgggttctgtgccctgaacctgaattctggaaagggagagactacagcatttcacagagaacagccagacccaagagctttcagtgtaggatgggcctgaagtgacagttcaatagccaaacctggggaagccccatcactgactgaactaggtcatttgaccatggagggggggcagtgtaaaggcaacgtgtaggtacagctcttttattattaaatgtgtaaggtgatcagctgattaacaggctccgagactgtccatttcagtctcccatccagtgcttcttcctcagtaaccttcaggccgttatttctgcccactctctgacacacaggataaaccaagactcccagagttatgttaccaaaggcaaaaaggcaactgggtggccttggctctgctttattgacctcagagcaccctatgagtgcagttaaaaaaaaaaaaaaaaaaccacatacaccatgggaactggaactggatcccggtcagtggcacctgaccccagaagaattcgtggatttgtacaaaatgcagaggaagaaatgaggcaatgtggtgctgagtcgaggggtagccgattggcagagtagtagtcagcaacagtgcagtcaggtcatgcctctttctcataagtgcgagtgcaaactgcagtgccgtgggtgagtgtctgga

SEQ ID NO: 2657 - protein, 217 aa, Homo sapiens; identical to SEQ ID NO: 2655

SEQ ID NO: 2658 - DNA, 1399 bp, Homo sapiens
agaagagaaatggaggagccatagaatattaaggatgaattcaggaaggcctgagaccatggaaaacttgcctgctctctacactattttccaaggagaggttgctatggtgacagactatggggcctttatcaaaatcccaggctgtcggaagcaagatgaaaaatgatagaataaaagtatccctctccatgaaggttgtcaatcaagggactgggaaagaccttgatcccaacaatgttatcattgagcaagaagagaggcggaggcgatccttccaggattacactgggcagaagatcacccttgaggctgtcttgaacactacctgcaagaagtgtggctgtaaaggccactttgcaaaagattgtttcatgcaaccaggtgggactaaatactctctgatacctgatgaggaagaggaaaaggaagaggcaaagtcagcagagtttgagaagcctgaccctacaaggaatccttctagaaaaagaaagaaggagaagaagaaaaagaaacatagagataggaagtcatctgactctgacagctcagactctgagagtgatacaggcaagagggcaaggcacacatcaaaagacagcaaggcagcaaagaagaagaaaaagaagaagaagcacaagaagaagcacaaggagtgagagtataaagagtgtagggggtggttgagagtaagaaaccaggagccttgtgccttgagactcctggaaagactcaatagtgagaatatagcctcccaccccattaacttcgctcccatgggagatggcttcccctcatgcaacaggcaggtttgggagttagaggtcaaaagcagctgcctgaatgagttgttgtttccttatcactcctggtccctttgcaagtgaaccctgcagctcacccattcattcacccaacttccttcattcagcaggaggtcctattaccctctccagctgccactgccagagctggattcctgtaaaggagtccaggctagagccacagagactgttgtggaggtgagttcggctgtagttagagtgattggacccttcctattggtctgtcctgggccaactggtgggtgatctctgctgcatccaacatgggagcagagactggcagcaggaggggggaacatggtgagaagtggtgctcacttttcccattcctcctaacatagttctactatgctagaagtggcatccagcggccacagctagaaaacagtctgcagtgtgacttaacttgtgtattgcattccagcagaccactgaaccagacagcgaagccaagatcattgttctactttgtatttactactgtgtgaatcagttgattctacttcaggtccttgcttaaattcctgtcactaaatggaaatgtgtttggtttt

SEQ ID NO: 2659 - protein, 179 aa, Homo sapiens
MGPLSKSQAVGSKMKNDRIKVSLSMKVVNQGTGKDLDPNNVIIEQEERRRRSFQDYTGQKITLEAVLNTTCKKCGCKGHFAKDCFMQPGGTKYSLIPDEEEEKEEAKSAEFEKPDPTRNPSRKRKKEKKKKKHRDRKSSDSDSSDSESDTGKRARHTSKDSKAAKKKKKKKKHKKKHKE

SEQ ID NO: 2660 - DNA, 2410 bp, Homo sapiens
agaagagaaatggaggagccatagaatattaaggatgaattcaggaaggcctgagaccatggaaaacttgcctgctctctacactattttccaaggagaggttgctatggtgacagactatggggcctttatcaaaatcccaggctgtcggaagcaagatgaaaaatgatagaataaaagtatccctctccatgaaggttgtcaatcaagggactgggaaagaccttgatcccaacaatgttatcattgagcaagaagagaggcggaggcgatccttccaggattacactgggcagaagatcacccttgaggctgtcttgaacactacctgcaagaagtgtggctgtaaaggccactttgcaaaagattgtttcatgcaaccaggtgggactaaatactctctgatacctgatgaggaagaggaaaaggaagaggcaaagtcagcagagtttgagaagcctgaccctacaaggaatccttctagaaaaagaaagaaggagaagaagaaaaagaaacatagagataggaagtcatctgactctgacagctcagactctgagagtgatacaggcaagagggcaaggcacacatcaaaagacagcaaggcagcaaagaagaagaaaaagaagaagaagcacaagaagaagcacaaggagtgagagtataaagagtgtagggggtggttgagagtaagaaaccaggagccttgtgccttgagactcctggaaagactcaatagtgagaatatagcctcccaccccattaacttcgctcccatgggagatggcttcccctcatgcaacaggcaggtttgggagttagaggtcaaaagcagctgcctgaatgagttgttgtttccttatcactcctggtccctttgcaagtgaaccctgcagctcacccattcattcacccaacttccttcattcagcaggaggtcctattaccctctccagctgccactgccagagctggattcctgtaaaggagtccaggctagagccacagagactgttgtggaggtgagttcggctgtagttagagtgattggacccttcctattggtctgtcctgggccaactggtgggtgatctctgctgcatccaacatgggagcagagactggcagcaggaggggggaacatggtgagaagtggtgctcacttttcccattcctcctaacatagttctactatgctagaagtggcatccagcggccacagctagaaaacagtctgcagtgtgacttaacttgtgtattgcattccagcagaccactgaaccagacagcgaagccaagatcattgttctactttgtatttactactgtgtgaatcagttgattctacttcaggtccttgcttaaattcctgtcactaaatggaaatgtgtttggttttaaacttactgagttatttttcctataatccttcttcctgggtaacttacagacttaaagtcactgagcctgcattagctgacaaaaacatttaatatgttaccttagaccttggagagatgcccagcagaggtacagagccaaaggcactagcagatcactgccttcttgggagatcacttataagccctcccttttgtaatgatcagatgccctcttccctcagagttgattagagaagcagtaagaatttgtagtcataagtactagcctggtgcacaggtcagcagtcctcttggccagtggtcattttctcccaccaccatggtacaagcctgggttctgtgccctgaacctgaattctggaaagggagagactacagcatttcacagagaacagccagacccaagagctttcagtgtaggatgggcctgaagtgacagttcaatagccaaacctggggaagccccatcactgactgaactaggtcatttgaccatggagggggggcagtgtaaaggcaacgtgtaggtacagctcttttattattaaatgtgtaaggtgatcagctgattaacaggctccgagactgtccatttcagtctcccatccagtgcttcttcctcagtaaccttcaggccgttatttctgcccactctctgacacacaggataaaccaagactcccagagttatgttaccaaaggcaaaaaggcaactgggtggccttggctctgctttattgacctcagagcaccctatgagtgcagttaaaaaaaaaaaaaaaaaaccacatacaccatgggaactggaactggatcccggtcagtggcacctgaccccagaagaattcgtggatttgtacaaaatgcagaggaagaaatgaggcaatgtggtgctgagtcgaggggtagccgattggcagagtagtagtcagcaacagtgcagtcaggtcatgcctctttctcataagtgcgagtgcaaactgcagtgccgtgggtgagtgtctgga

SEQ ID NO: 2661 - protein, 179 aa, Homo sapiens; identical to SEQ ID NO: 2659

SEQ ID NO: 2662 - DNA, 439 bp, Homo sapiens
ccagaaaagggtccatccacaaggagagaaacgtggaaagggcagaggcttcaccctacctttacagccacacttcttgcaggtagtgttcaagacagcctcaagggtgatcttctgcccagtgtaatcctggaaggatcgcctccgcctctcttcttgcctataatgaaaaagataccgactgccggcccccttaagagatatggccagagatactacaaggatgacatatgagttcgatggaccagacctgggcacaagaagaagaaataacgtaaagcagagggcatatctggtatttatactctaaactggataagaaggtagctctctcctggataaacatgaccagtctagaagcgttagcagtgaaaaactggaaacaacttaaaatgattatgtggtacatctgaatgacagaataaagccattaaatgtt

SEQ ID NO: 2663 - protein, 35 aa, Homo sapiens
MARDTTRMTYEFDGPDLGTRRRNNVKQRAYLVFIL

SEQ ID NO: 2664 - DNA, 2653 bp, Homo sapiens
ccttgcacgcctgctctcttgtagcttctctcagcctagcccagcatcactatggtggacgctttcctgggcacctggaagctagtggacagcaagaatttcgatgactacatgaagtcactcgctcatatactcataaccttccccctaccctcaggtgtgggttttgctaccaggcaggtggccagcatgaccaagcctaccacaatcatcgaaaagaatggggacattctcaccctaaaaacacacagcaccttcaagaacacagagatcagctttaagttgggggtggagttcgatgagacaacagcagatgacaggaaggtcaagtccattgtgacactggatggagggaaacttgttcacctgcagaaatgggacgggcaagagaccacacttgtgcgggagctaattgatggaaaactcatcctgacactcacccacggcactgcagtttgcactcgcacttatgagaaagaggcatgacctgactgcactgttgctgactactactctgccaatcggctacccctcgactcagcaccacattgcctcatttcttcctctgcattttgtacaaatccacgaattcttctggggtcaggtgccactgaccgggatccagttccagttcccatggtgtatgtggttttttttttttttttttaactgcactcatagggtgctctgaggtcaataaagcagagccaaggccacccagttgcctttttgcctttggtaacataactctgggagtcttggtttatcctgtgtgtcagagagtgggcagaaataacggcctgaaggttactgaggaagaagcactggatgggagactgaaatggacagtctcggagcctgttaatcagctgatcaccttacacatttaataataaaagagctgtacctacacgttgcctttacactgccccccctccatggtcaaatgacctagttcagtcagtgatggggcttccccaggtttggctattgaactgtcacttcaggcccatcctacactgaaagctcttgggtctggctgttctctgtgaaatgctgtagtctctccctttccagaattcaggttcagggcacagaacccaggcttgtaccatggtggtgggagaaaatgaccactggccaagaggactgctgacctgtgcaccaggctagtacttatgactacaaattcttactgcttctctaatcaactctgagggaagagggcatctgatcattacaaaagggagggcttataagtgatctcccaagaaggcagtgatctgctagtgcctttggctctgtacctctgctgggcatctctccaaggtctaaggtaacatattaaatgtttttgtcagctaatgcaggctcagtgactttaagtctgtaagttacccaggaagaaggattataggaaaaataactcagtaagtttaaaaccaaacacatttccatttagtgacaggaatttaagcaaggacctgaagtagaatcaactgattcacacagtagtaaatacaaagtagaacaatgatcttggcttcgctgtctggttcagtggtctgctggaatgcaatacacaagttaagtcacactgcagactgttttctagctgtggccgctggatgccacttctagcatagtagaactatgttaggaggaatgggaaaagtgagcaccacttctcaccatgttcccccctcctgctgccagtctctgctcccatgttggatgcagcagagatcacccaccagttggcccaggacagaccaataggaagggtccaatcactctaactacagccgaactcacctccacaacagtctctgtggctctagcctggactcctttacaggaatccagctctggcagtggcagctggagagggtaataggacctcctgctgaatgaaggaagttgggtgaatgaatgggtgagctgcagggttcacttgcaaagggaccaggagtgataaggaaacaacaactcattcaggcagctgcttttgacctctaactcccaaacctgcctgttgcatgaggggaagccatctcccatgggagcgaagttaatggggtgggaggctatattctcactattgagtctttccaggagtctcaaggcacaaggctcctggtttcttactctcaaccaccccctacactctttatactctcactccttgtgcttcttcttgtgcttcttcttctttttcttcttctttgctgccttgctgtcttttgatgtgtgccttgccctcttgcctgtatcactctcagagtctgagctgtcagagtcagatgacttcctatctctatgtttctttttcttcttctcctgaaaagaaaattttaaaaatcaacactgtatgtgtatatttgcttttaacaatcatagcacataattggccaggtgcagtggctcacacctgtaatcctagtactttgggaagccgaggtgggaggaatgcttgaggccaggagttcaagatcaacctggctaacatagcaagatctcatctctaaaaagagaaaaaaagaaaaattatagcacacaatcaataggggaccacttaattttcttttagacagtctcgctctgttgcccaggctagagtgcagtgcagtggcacgatcacagctcactgcaa

SEQ ID NO: 2665 - protein, 144 aa, Homo sapiens
MVDAFLGTWKLVDSKNFDDYMKSLAHILITFPLPSGVGFATRQVASMTKPTTIIEKNGDILTLKTHSTFKNTEISFKLGVEFDETTADDRKVKSIVTLDGGKLVHLQKWDGQETTLVRELIDGKLILTLTHGTAVCTRTYEKEA

SEQ ID NO: 2666 - DNA, 2631 bp, Homo sapiens
gccgtcggagcccttgcacgcctgctctcttgtagcttctctcagcctagcccagcatcactatggtggacgctttcctgggcacctggaagctagtggacagcaagaatttcgatgactacatgaagtcactcggtgtgggttttgctaccaggcaggtggccagcatgaccaagcctaccacaatcatcgaaaagaatggggacattctcaccctaaaaacacacagcaccttcaagaacacagagatcagctttaagttgggggtggagttcgatgagacaacagcagatgacaggaaggtcaagtccattgtgacactggatggagggaaacttgttcacctgcagaaatgggacgggcaagagaccacacttgtgcgggagctaattgatggaaaactcatcctgacactcacccacggcactgcagtttgcactcgcacttatgagaaagaggcatgacctgactgcactgttgctgactactactctgccaatcggctacccctcgactcagcaccacattgcctcatttcttcctctgcattttgtacaaatccacgaattcttctggggtcaggtgccactgaccgggatccagttccagttcccatggtgtatgtggttttttttttttttttttaactgcactcatagggtgctctgaggtcaataaagcagagccaaggccacccagttgcctttttgcctttggtaacataactctgggagtcttggtttatcctgtgtgtcagagagtgggcagaaataacggcctgaaggttactgaggaagaagcactggatgggagactgaaatggacagtctcggagcctgttaatcagctgatcaccttacacatttaataataaaagagctgtacctacacgttgcctttacactgccccccctccatggtcaaatgacctagttcagtcagtgatggggcttccccaggtttggctattgaactgtcacttcaggcccatcctacactgaaagctcttgggtctggctgttctctgtgaaatgctgtagtctctccctttccagaattcaggttcagggcacagaacccaggcttgtaccatggtggtgggagaaaatgaccactggccaagaggactgctgacctgtgcaccaggctagtacttatgactacaaattcttactgcttctctaatcaactctgagggaagagggcatctgatcattacaaaagggagggcttataagtgatctcccaagaaggcagtgatctgctagtgcctttggctctgtacctctgctgggcatctctccaaggtctaaggtaacatattaaatgtttttgtcagctaatgcaggctcagtgactttaagtctgtaagttacccaggaagaaggattataggaaaaataactcagtaagtttaaaaccaaacacatttccatttagtgacaggaatttaagcaaggacctgaagtagaatcaactgattcacacagtagtaaatacaaagtagaacaatgatcttggcttcgctgtctggttcagtggtctgctggaatgcaatacacaagttaagtcacactgcagactgttttctagctgtggccgctggatgccacttctagcatagtagaactatgttaggaggaatgggaaaagtgagcaccacttctcaccatgttcccccctcctgctgccagtctctgctcccatgttggatgcagcagagatcacccaccagttggcccaggacagaccaataggaagggtccaatcactctaactacagccgaactcacctccacaacagtctctgtggctctagcctggactcctttacaggaatccagctctggcagtggcagctggagagggtaataggacctcctgctgaatgaaggaagttgggtgaatgaatgggtgagctgcagggttcacttgcaaagggaccaggagtgataaggaaacaacaactcattcaggcagctgcttttgacctctaactcccaaacctgcctgttgcatgaggggaagccatctcccatgggagcgaagttaatggggtgggaggctatattctcactattgagtctttccaggagtctcaaggcacaaggctcctggtttcttactctcaaccaccccctacactctttatactctcactccttgtgcttcttcttgtgcttcttcttctttttcttcttctttgctgccttgctgtcttttgatgtgtgccttgccctcttgcctgtatcactctcagagtctgagctgtcagagtcagatgacttcctatctctatgtttctttttcttcttctcctgaaaagaaaattttaaaaatcaacactgtatgtgtatatttgcttttaacaatcatagcacataattggccaggtgcagtggctcacacctgtaatcctagtactttgggaagccgaggtgggaggaatgcttgaggccaggagttcaagatcaacctggctaacatagcaagatctcatctctaaaaagagaaaaaaagaaaaattatagcacacaatcaataggggaccacttaattttcttttagacagtctcgctctgttgcccaggctagagtgcagtgcagtggcacgatcacagctcactgcaa

SEQ ID NO: 2667 - protein, 133 aa, Homo sapiens [sequence omitted]

SEQ ID NO: 2668 - DNA, 2698 bp, Homo sapiens
gccgtcggagcccttgcacgcctgctctcttgtagcttctctcagcctagcccagcatcactatggtggacgctttcctgggcacctggaagctagtggacagcaagaatttcgatgactacatgaagtcactcggtgtgggttttgctaccaggcaggtggccagcatgaccaagcctaccacaatcatcgaaaagaatggggacattctcaccctaaaaacacacagcaccttcaagaacacagagatcagctttaagttgggggtggagttcgatgagacaacagcagatgacaggaaggtcaagcacagagccaggatgttcttctgacctcagtatctactccagctccagctgggtgaccctgtgcaagtccattgtgacactggatggagggaaacttgttcacctgcagaaatgggacgggcaagagaccacacttgtgcgggagctaattgatggaaaactcatcctgacactcacccacggcactgcagtttgcactcgcacttatgagaaagaggcatgacctgactgcactgttgctgactactactctgccaatcggctacccctcgactcagcaccacattgcctcatttcttcctctgcattttgtacaaatccacgaattcttctggggtcaggtgccactgaccgggatccagttccagttcccatggtgtatgtggttttttttttttttttttaactgcactcatagggtgctctgaggtcaataaagcagagccaaggccacccagttgcctttttgcctttggtaacataactctgggagtcttggtttatcctgtgtgtcagagagtgggcagaaataacggcctgaaggttactgaggaagaagcactggatgggagactgaaatggacagtctcggagcctgttaatcagctgatcaccttacacatttaataataaaagagctgtacctacacgttgcctttacactgccccccctccatggtcaaatgacctagttcagtcagtgatggggcttccccaggtttggctattgaactgtcacttcaggcccatcctacactgaaagctcttgggtctggctgttctctgtgaaatgctgtagtctctccctttccagaattcaggttcagggcacagaacccaggcttgtaccatggtggtgggagaaaatgaccactggccaagaggactgctgacctgtgcaccaggctagtacttatgactacaaattcttactgcttctctaatcaactctgagggaagagggcatctgatcattacaaaagggagggcttataagtgatctcccaagaaggcagtgatctgctagtgcctttggctctgtacctctgctgggcatctctccaaggtctaaggtaacatattaaatgtttttgtcagctaatgcaggctcagtgactttaagtctgtaagttacccaggaagaaggattataggaaaaataactcagtaagtttaaaaccaaacacatttccatttagtgacaggaatttaagcaaggacctgaagtagaatcaactgattcacacagtagtaaatacaaagtagaacaatgatcttggcttcgctgtctggttcagtggtctgctggaatgcaatacacaagttaagtcacactgcagactgttttctagctgtggccgctggatgccacttctagcatagtagaactatgttaggaggaatgggaaaagtgagcaccacttctcaccatgttcccccctcctgctgccagtctctgctcccatgttggatgcagcagagatcacccaccagttggcccaggacagaccaataggaagggtccaatcactctaactacagccgaactcacctccacaacagtctctgtggctctagcctggactcctttacaggaatccagctctggcagtggcagctggagagggtaataggacctcctgctgaatgaaggaagttgggtgaatgaatgggtgagctgcagggttcacttgcaaagggaccaggagtgataaggaaacaacaactcattcaggcagctgcttttgacctctaactcccaaacctgcctgttgcatgaggggaagccatctcccatgggagcgaagttaatggggtgggaggctatattctcactattgagtctttccaggagtctcaaggcacaaggctcctggtttcttactctcaaccaccccctacactctttatactctcactccttgtgcttcttcttgtgcttcttcttctttttcttcttctttgctgccttgctgtcttttgatgtgtgccttgccctcttgcctgtatcactctcagagtctgagctgtcagagtcagatgacttcctatctctatgtttctttttcttcttctcctgaaaagaaaattttaaaaatcaacactgtatgtgtatatttgcttttaacaatcatagcacataattggccaggtgcagtggctcacacctgtaatcctagtactttgggaagccgaggtgggaggaatgcttgaggccaggagttcaagatcaacctggctaacatagcaagatctcatctctaaaaagagaaaaaaagaaaaattatagcacacaatcaataggggaccacttaattttcttttagacagtctcgctctgttgcccaggctagagtgcagtgcagtggcacgatcacagctcactgcaa

SEQ ID NO: 2669 - protein, 89 aa, Homo sapiens
MVDAFLGTWKLVDSKNFDDYMKSLGVGFATRQVASMTKPTTIIEKNGDILTLKTHSTFKNTEISFKLGVEFDETTADDRKVKHRARMFF

SEQ ID NO: 2670 - DNA, 745 bp, Homo sapiens
ccttgcacgcctgctctcttgtagcttctctcagcctagcccagcatcactatggtggacgctttcctgggcacctggaagctagtggacagcaagaatttcgatgactacatgaagtcactcgctcatatactcataaccttccccctaccctcaggtgtgggttttgctaccaggcaggtggccagcatgaccaagcctaccacaatcatcgaaaagaatggggacattctcaccctaaaaacacacagcaccttcaagaacacagagatcagctttaagttgggggtggagttcgatgagacaacagcagatgacaggaaggtcaagtccattgtgacactggatggagggaaacttgttcacctgcagaaatgggacgggcaagagaccacacttgtgcgggagctaattgatggaaaactcatcctgacactcacccacggcactgcagtttgcactcgcacttatgagaaagaggcatgacctgactgcactgttgctgactactactctgccaatcggctacccctcgactcagcaccacattgcctcatttcttcctctgcattttgtacaaatccacgaattcttctggggtcaggtgccactgaccgggatccagttccagttcccatggtgtatgtggttttttttttttttttttaactgcactcatagggtgctctgaggtcaataaagcagagccaaggccacccagttgcctttttgcctttggtaacat

SEQ ID NO: 2671 - protein, 144 aa, Homo sapiens; identical to SEQ ID NO: 2665

SEQ ID NO: 2672 - DNA, 723 bp, Homo sapiens
gccgtcggagcccttgcacgcctgctctcttgtagcttctctcagcctagcccagcatcactatggtggacgctttcctgggcacctggaagctagtggacagcaagaatttcgatgactacatgaagtcactcggtgtgggttttgctaccaggcaggtggccagcatgaccaagcctaccacaatcatcgaaaagaatggggacattctcaccctaaaaacacacagcaccttcaagaacacagagatcagctttaagttgggggtggagttcgatgagacaacagcagatgacaggaaggtcaagtccattgtgacactggatggagggaaacttgttcacctgcagaaatgggacgggcaagagaccacacttgtgcgggagctaattgatggaaaactcatcctgacactcacccacggcactgcagtttgcactcgcacttatgagaaagaggcatgacctgactgcactgttgctgactactactctgccaatcggctacccctcgactcagcaccacattgcctcatttcttcctctgcattttgtacaaatccacgaattcttctggggtcaggtgccactgaccgggatccagttccagttcccatggtgtatgtggttttttttttttttttttaactgcactcatagggtgctctgaggtcaataaagcagagccaaggccacccagttgcctttttgcctttggtaacat

SEQ ID NO: 2673 - protein, 133 aa, Homo sapiens [sequence omitted]

SEQ ID NO: 2674 - DNA, 790 bp, Homo sapiens
gccgtcggagcccttgcacgcctgctctcttgtagcttctctcagcctagcccagcatcactatggtggacgctttcctgggcacctggaagctagtggacagcaagaatttcgatgactacatgaagtcactcggtgtgggttttgctaccaggcaggtggccagcatgaccaagcctaccacaatcatcgaaaagaatggggacattctcaccctaaaaacacacagcaccttcaagaacacagagatcagctttaagttgggggtggagttcgatgagacaacagcagatgacaggaaggtcaagcacagagccaggatgttcttctgacctcagtatctactccagctccagctgggtgaccctgtgcaagtccattgtgacactggatggagggaaacttgttcacctgcagaaatgggacgggcaagagaccacacttgtgcgggagctaattgatggaaaactcatcctgacactcacccacggcactgcagtttgcactcgcacttatgagaaagaggcatgacctgactgcactgttgctgactactactctgccaatcggctacccctcgactcagcaccacattgcctcatttcttcctctgcattttgtacaaatccacgaattcttctggggtcaggtgccactgaccgggatccagttccagttcccatggtgtatgtggttttttttttttttttttaactgcactcatagggtgctctgaggtcaataaagcagagccaaggccacccagttgcctttttgcctttggtaacat

SEQ ID NO: 2675 - protein, 89 aa, Homo sapiens; identical to SEQ ID NO: 2669

SEQ ID NO: 2676 - DNA, 2149 bp, Homo sapiens
tactttagcctttgctctgaaatcccatgcacgctttgtgaggaaggacagccttggttggggggtgtttatggggagagcagagtggatggtgcgtatgtgaatacctctccccagatgctcccccaatcccaagctctcattatcttatatgcatattcataagggatggccctgctctgtaaatgggtcagaagcaggaaatagaggccagtacagacagcgaagcccaagggataggagggctcaaagccggcacacatctgagtcctcatggacgggaggatgatgagaagcatgaggctgagagaggaggagtcacccggacccagccacacagcgtcctgcctctgcggctctgccccctgcatcctgtgcagctgctgccccgccagccgcaactccaccgtgagccgcctcatcttcacgttcttcctcttcctgggggtgctggtgtccatcattatgctgagcccgggcgtggagagtcagctctacaagctgccctgggtgtgtgaggagggggccgggatccccaccgtcctgcagggccacatcgactgtggctccctgcttggctaccgcgctgtctaccgcatgtgcttcgccacggcggccttcttcttctttttcaccctgctcatgctctgcgtgagcagcagccgggacccccgggctgccatccagaatgggttttggttctttaagttcctgatcctggtgggcctcaccgtgggtgccttctacattcctgacggctccttcaccaacatctggttctacttcggcgtcgtgggctccttcctcttcatcctcatccagctggtgctgctcatcgactttgcgcactcctggaaccagcggtggctgggcaaggccgaggagtgcgattcccgtgcctggtacgcaggcctcttcttcttcactctcctcttctacttgctgtcgatcgcggccgtggcgctgatgttcatgtactacactgagcccagcggctgccacgagggcaaggtcttcatcagcctcaacctcaccttctgtgtctgcgtgtccatcgctgctgtcctgcccaaggtccaggacgcccagcccaactcgggtctgctgcaggcctcggtcatcaccctctacaccatgtttgtcacctggtcagccctatccagtatccctgaacagaaatgcaacccccatttgccaacccagctgggcaacgagacagttgtggcaggccccgagggctatgagacccagtggtgggatgccccgagcattgtgggcctcatcatcttcctcctgtgcaccctcttcatcagtctgcgctcctcagaccaccggcaggtgaacagcctgatgcagaccgaggagtgcccacctatgctagacgccacacagcagcagcagcaggtggcagcctgtgagggccgggcctttgacaacgagcaggacggcgtcacctacagctactccttcttccacttctgcctggtgctggcctcactgcacgtcatgatgacgctcaccaactggtacaagcccggtgagacccggaagatgatcagcacgtggaccgccgtgtgggtgaagatctgtgccagctgggcagggctgctcctctacctgtggaccctggtagccccactcctcctgcgcaaccgcgacttcagctgaggcagcctcacagcctgccatctggtgcctcctgccacctggtgcctctcggctcagtgacagccaacctgccccctccccacaccaatcagccaggctgagcccccacccctgccccagctccaggacctgcccctgagccgggccttctagtcgtagtgccttcagggtccgaggagcatcaggctcctgcagagccccatccccccgccacacccacacggtggagctgcctcttccttcccctcctccctgttgcccatactcagcatctcggatgaaagggctcccttgtcctcaggctccacgggagcggggctgctggagagagcggggaactcccaccacagtggggcatccggcactgaagccctggtgttcctggtcacgtcccccaggggaccctgcccacttcctggacttcgtgccttactgagtctctaagactttttctaataaacaagccagtgcgtgtaccatg

SEQ ID NO: 2677 - protein, 464 aa, Homo sapiens
MDGRMMRSMRLREEESPGPSHTASCLCGSAPCILCSCCPASRNSTVSRLIFTFFLFLGVLVSIIMLSPGVESQLYKLPWVCEEGAGIPTVLQGHIDCGSLLGYRAVYRMCFATAAFFFFFTLLMLCVSSSRDPRAAIQNGFWFFKFLILVGLTVGAFYIPDGSFTNIWFYFGVVGSFLFILIQLVLLIDFAHSWNQRWLGKAEECDSRAWYAGLFFFTLLFYLLSIAAVALMFMYYTEPSGCHEGKVFISLNLTFCVCVSIAAVLPKVQDAQPNSGLLQASVITLYTMFVTWSALSSIPEQKCNPHLPTQLGNETVVAGPEGYETQWWDAPSIVGLIIFLLCTLFISLRSSDHRQVNSLMQTEECPPMLDATQQQQQVAACEGRAFDNEQDGVTYSYSFFHFCLVLASLHVMMTLTNWYKPGETRKMISTWTAVWVKICASWAGLLLYLWTLVAPLLLRNRDFS

SEQ ID NO: 2678 - DNA, 1999 bp, Homo sapiens
cgagcgccgccggaaagcgtcgagcggcttcggtaggtggggcggggccggggcggggccggggccggggaggggccaggcccggcacccggatcccgaggtccgcgccccgcgcccggcgccgggcgcccgaagccgggagccgccgccatgggggcctgcctgggagcctgctccctgctcagctgcgcgtcctgcctctgcggctctgccccctgcatcctgtgcagctgctgccccgccagccgcaactccaccgtgagccgcctcatcttcacgttcttcctcttcctgggggtgctggtgtccatcattatgctgagcccgggcgtggagagtcagctctacaagctgccctgggtgtgtgaggagggggccgggatccccaccgtcctgcagggccacatcgactgtggctccctgcttggctaccgcgctgtctaccgcatgtgcttcgccacggcggccttcttcttctttttcaccctgctcatgctctgcgtgagcagcagccgggacccccgggctgccatccagaatgggttttggttctttaagttcctgatcctggtgggcctcaccgtgggtgccttctacattcctgacggctccttcaccaacatctggttctacttcggcgtcgtgggctccttcctcttcatcctcatccagctggtgctgctcatcgactttgcgcactcctggaaccagcggtggctgggcaaggccgaggagtgcgattcccgtgcctggtacgcaggcctcttcttcttcactctcctcttctacttgctgtcgatcgcggccgtggcgctgatgttcatgtactacactgagcccagcggctgccacgagggcaaggtcttcatcagcctcaacctcaccttctgtgtctgcgtgtccatcgctgctgtcctgcccaaggtccaggacgcccagcccaactcgggtctgctgcaggcctcggtcatcaccctctacaccatgtttgtcacctggtcagccctatccagtatccctgaacagaaatgcaacccccatttgccaacccagctgggcaacgagacagttgtggcaggccccgagggctatgagacccagtggtgggatgccccgagcattgtgggcctcatcatcttcctcctgtgcaccctcttcatcagtctgcgctcctcagaccaccggcaggtgaacagcctgatgcagaccgaggagtgcccacctatgctagacgccacacagcagcagcagcaggtggcagcctgtgagggccgggcctttgacaacgagcaggacggcgtcacctacagctactccttcttccacttctgcctggtgctggcctcactgcacgtcatgatgacgctcaccaactggtacaagcccggtgagacccggaagatgatcagcacgtggaccgccgtgtgggtgaagatctgtgccagctgggcagggctgctcctctacctgtggaccctggtagccccactcctcctgcgcaaccgcgacttcagctgaggcagcctcacagcctgccatctggtgcctcctgccacctggtgcctctcggctcagtgacagccaacctgccccctccccacaccaatcagccaggctgagcccccacccctgccccagctccaggacctgcccctgagccgggccttctagtcgtagtgccttcagggtccgaggagcatcaggctcctgcagagccccatccccccgccacacccacacggtggagctgcctcttccttcccctcctccctgttgcccatactcagcatctcggatgaaagggctcccttgtcctcaggctccacgggagcggggctgctggagagagcggggaactcccaccacagtggggcatccggcactgaagccctggtgttcctggtcacgtcccccaggggaccctgcccacttcctggacttcgtgccttactgagtctctaagactttttctaataaacaagccagtgcgtgtaccatg

SEQ ID NO: 2679 - protein, 455 aa, Homo sapiens; identical to SEQ ID NO: 73

SEQ ID NO: 2680 - DNA, 1623 bp, Homo sapiens
acccggatcccgaggtccgcgccccgcgcccggcgccgggcgcccgaagccgggagccgccgccatgggggcctgcctgggagcctgctccctgctcagctgcgcgtcctgcctctgcggctctgccccctgcatcctgtgcagctgctgccccgccagccgcaactccaccgtgagccgcctcatcttcacgttcttcctcttcctgggggtgctggtgtccatcattatgctgagcccgggcgtggagagtcagctctacaagctgccctgggtgtgtgaggagggggccgggatccccaccgtcctgcagggccacatcgactgtggctccctgcttggctaccgcgctgtctaccgcatgtgcttcgccacggcggccttcttcttctttttcaccctgctcatgctctgcgtgagcagcagccgggacccccgggctgccatccagaatgggttttggttctttaagttcctgatcctggtgggcctcaccgtgggtgccttctacattcctgacggctccttcaccaacatctggttctacttcggcgtcgtgggctccttcctcttcatcctcatccagctggtgctgctcatcgactttgcgcactcctggaaccagcggtggctgggcaaggccgaggagtgcgattcccgtgcctggtacgcaggcctcttcttcttcactctcctcttctacttgctgtcgatcgcggccgtggcgctgatgttcatgtactacactgagcccagcggctgccacgagggcaaggtcttcatcagcctcaacctcaccttctgtgtctgcgtgtccatcgctgctgtcctgcccaaggtccaggacgcccagcccaactcgggtctgctgcaggcctcggtcatcaccctctacaccatgtttgtcacctggtcagccctatccagtatccctgaacagaaatgcaacccccatttgccaacccagctgggcaacgagacagttgtggcaggccccgagggctatgagacccagtggtgggatgccccgagcattgtgggcctcatcatcttcctcctgtgcaccctcttcatcagggctgctcctctacctgtggaccctggtagccccactcctcctgcgcaaccgcgacttcagctgaggcagcctcacagcctgccatctggtgcctcctgccacctggtgcctctcggctcagtgacagccaacctgccccctccccacaccaatcagccaggctgagcccccacccctgccccagctccaggacctgcccctgagccgggccttctagtcgtagtgccttcagggtccgaggagcatcaggctcctgcagagccccatccccccgccacacccacacggtggagctgcctcttccttcccctcctccctgttgcccatactcagcatctcggatgaaagggctcccttgtcctcaggctccacgggagcggggctgctggagagagcggggaactcccaccacagtggggcatccggcactgaagccctggtgttcctggtcacgtcccccaggggaccctgcccacttcctggacttcgtgccttactgagtctctaagactttttctaataaacaagccagtgcgtgtaccatg

SEQ ID NO: 2681 - protein, 392 aa, Homo sapiens
MGACLGACSLLSCASCLCGSAPCILCSCCPASRNSTVSRLIFTFFLFLGVLVSIIMLSPGVESQLYKLPWVCEEGAGIPTVLQGHIDCGSLLGYRAVYRMCFATAAFFFFFTLLMLCVSSSRDPRAAIQNGFWFFKFLILVGLTVGAFYIPDGSFTNIWFYFGVVGSFLFILIQLVLLIDFAHSWNQRWLGKAEECDSRAWYAGLFFFTLLFYLLSIAAVALMFMYYTEPSGCHEGKVFISLNLTFCVCVSIAAVLPKVQDAQPNSGLLQASVITLYTMFVTWSALSSIPEQKCNPHLPTQLGNETVVAGPEGYETQWWDAPSIVGLIIFLLCTLFIRAAPLPVDPGSPTPPAQPRLQLRQPHSLPSGASCHLVPLGSVTANLPPPHTNQPG

SEQ ID NO: 2682 - DNA, 2810 bp, Homo sapiens
gtatttgtctggttcctgtctgtgtccgtcgttcgtccgactgtctttgtccgtctgctgtcttctgtccgtctgcccgtccgcccgtccgtccctcagtctctctgcggtccctttaccgtcctcagtctggctcgcgctgcctctcaggcacttccccagctcgccccggatcatctgggccccagcgcggagactgggatgggagcggagggagccccggactttcttagctgccctcgagtgaggcgggtgcgggtcgtcacggaccaccgggcggaactctgggttgggagagcaggaatcgagggaggttcgggtgtgcgcggggagtgcccggtcgcgggttcgggacctgtggggaggccaacctctgttctgtagctgcagccgcagaggggaggggctccagcaagaccccggctgggaggcccgttctcccttccctttccccagcccccctctcctttcctcttcccctcattaaatctgaggttcattcaggcagccccctccccctctggccccacacaaagaggccctgagagggagaaggggctgcagcggctgctgaatctcgggactcgctttcctttgtccctgacgggttgtgtgtgtgtgtgtgtgtgtgtgtgtgtgtgtgagagagagagagagagagaggagggggtgtaggggagagctgagggtctagagatttactttacagcctttttctgagaatgagatcagcatagacagcacagagaggcaagagagcctctcgcctcattaggcctccatttttcgtgtgtgtgtgtgcgtgtgcatgtgcgtgtgcaggaggaggaatcaagctggtgcctgaaatccctcccagcccaaagaattcaaggtttgggccaggtctctgccaacaagggtttgcttcctggtgagggaggcagagcttccacagtggacctgatttccatcggttgcacctgcattggaactgggctgaaggtgaactgggctgaaggcgtcctgcctctgcggctctgccccctgcatcctgtgcagctgctgccccgccagccgcaactccaccgtgagccgcctcatcttcacgttcttcctcttcctgggggtgctggtgtccatcattatgctgagcccgggcgtggagagtcagctctacaagctgccctgggtgtgtgaggagggggccgggatccccaccgtcctgcagggccacatcgactgtggctccctgcttggctaccgcgctgtctaccgcatgtgcttcgccacggcggccttcttcttctttttcaccctgctcatgctctgcgtgagcagcagccgggacccccgggctgccatccagaatgggttttggttctttaagttcctgatcctggtgggcctcaccgtgggtgccttctacattcctgacggctccttcaccaacatctggttctacttcggcgtcgtgggctccttcctcttcatcctcatccagctggtgctgctcatcgactttgcgcactcctggaaccagcggtggctgggcaaggccgaggagtgcgattcccgtgcctggtacgcaggcctcttcttcttcactctcctcttctacttgctgtcgatcgcggccgtggcgctgatgttcatgtactacactgagcccagcggctgccacgagggcaaggtcttcatcagcctcaacctcaccttctgtgtctgcgtgtccatcgctgctgtcctgcccaaggtccaggacgcccagcccaactcgggtctgctgcaggcctcggtcatcaccctctacaccatgtttgtcacctggtcagccctatccagtatccctgaacagaaatgcaacccccatttgccaacccagctgggcaacgagacagttgtggcaggccccgagggctatgagacccagtggtgggatgccccgagcattgtgggcctcatcatcttcctcctgtgcaccctcttcatcagtctgcgctcctcagaccaccggcaggtgaacagcctgatgcagaccgaggagtgcccacctatgctagacgccacacagcagcagcagcaggtggcagcctgtgagggccgggcctttgacaacgagcaggacggcgtcacctacagctactccttcttccacttctgcctggtgctggcctcactgcacgtcatgatgacgctcaccaactggtacaagcccggtgagacccggaagatgatcagcacgtggaccgccgtgtgggtgaagatctgtgccagctgggcagggctgctcctctacctgtggaccctggtagccccactcctcctgcgcaaccgcgacttcagctgaggcagcctcacagcctgccatctggtgcctcctgccacctggtgcctctcggctcagtgacagccaacctgccccctccccacaccaatcagccaggctgagcccccacccctgccccagctccaggacctgcccctgagccgggccttctagtcgtagtgccttcagggtccgaggagcatcaggctcctgcagagccccatccccccgccacacccacacggtggagctgcctcttccttcccctcctccctgttgcccatactcagcatctcggatgaaagggctcccttgtcctcaggctccacgggagcggggctgctggagagagcggggaactcccaccacagtggggcatccggcactgaagccctggtgttcctggtcacgtcccccaggggaccctgcccacttcctggacttcgtgccttactgagtctctaagactttttctaataaacaagccagtgcgtgtaccatg

SEQ ID NO: 2683 - protein, 400 aa, Homo sapiens
MLSPGVESQLYKLPWVCEEGAGIPTVLQGHIDCGSLLGYRAVYRMCFATAAFFFFFTLLMLCVSSSRDPRAAIQNGFWFFKFLILVGLTVGAFYIPDGSFTNIWFYFGVVGSFLFILIQLVLLIDFAHSWNQRWLGKAEECDSRAWYAGLFFFTLLFYLLSIAAVALMFMYYTEPSGCHEGKVFISLNLTFCVCVSIAAVLPKVQDAQPNSGLLQASVITLYTMFVTWSALSSIPEQKCNPHLPTQLGNETVVAGPEGYETQWWDAPSIVGLIIFLLCTLFISLRSSDHRQVNSLMQTEECPPMLDATQQQQQVAACEGRAFDNEQDGVTYSYSFFHFCLVLASLHVMMTLTNWYKPGETRKMISTWTAVWVKICASWAGLLLYLWTLVAPLLLRNRDFS

SEQ ID NO: 2684 - DNA, 1028 bp, Homo sapiens
ccttgttgcggtggcctcaagagtcaggaatcgagactcacctggtgtgacaaataaacctggactcagcaatgtcgaaagaaaccagccggcgacccaggggaaaggatcctcacacaccacagtgaccaggcaactctgtgcacagaccgaggaaggaaacgcctgggagccagcaaagtatttccttggtggttgggacagaccaagccatatccccaacatctagaagagggcctggtacacaggaagtgctcaagaggtatttgctggataaatactgattgctgtgtgacctgggacacagacatcgccttctctgggcttcagcttttcttactgggatatgaggctctgaccagaagggaggttcccagcctttctgctaaagacccctgaagactacctaagccccctgaagctgccggtgtgctgagatctcaaaccacaaagcaccactgtactcacaaggggctccagcggtactttctgaagaacacgcagttcctctgggagctcctgcccattattccagatggtcttggattggaaatgtgaaattgcaccttcctacactacttccagaggtgtctaggaatcaccactcagggactgcccctaatgttctactgatttgcataaaaacaaaaatgacaacaataataactacaataatagctaatgtctgagagatatctacaggccaggcatggagtgtttacaaataggatctcaatcctgagaataactccaatagtaggtcttattatctccatttaatatttgagaggcagagagaggttagggcacctcctaaagacacccagcatgaagccgtgagagcctgactataacctggggaggctgacctgggagcccacacactcaggccgtgcctctgtgatgacagccctagccccaggacccaggttcctacaagaagtcccacccactaaggggccgggcttcaggccagggggggtcaggcaggctcacctggaccttgggcaggacagcagcgatggaca

SEQ ID NO: 2685 - protein, 40 aa, Homo sapiens
MTALAPGPRFLQEVPPTKGPGFRPGGVRQAHLDLGQDSSD

SEQ ID NO: 2686 - DNA, 929 bp, Homo sapiens
attgtggtcatttagtgtcacaaatttggtcatttggttaaagttaaaattgagagtaggaggtcataaagccaggattgaagtggcaaggtcaaggagctaaatgacagtaataaggtcaggggccacccctaagttacaggatcaaaggtcagaatcaagggtagcggtcaggactaaggtcaggagctccagggtcccaagttcagaggctaggattgaggtcccagaattaggatcacaaggttggagaccaggagtcaggtcatgatctcatggactaacactgggctcaagatgggaatcgaggtcaggagctatgtccacggtcacaaggccgggtgttaaaaatgtcagagatggactggagttacagggtaagagccagagttgaagtcaggggtcataactgggacataaggccaggggccaagatggaagtcaccagactgggcaccaggctcatggggaagatggtgtgttccaggcccggtgagacccggaagatgatcagcacgtggaccgccgtgtgggtgaagatctgtgccagctgggcagggctgctcctctacctgtggaccctggtagccccactcctcctgcgcaaccgcgacttcagctgaggcagcctcacagcctgccatctggtgcctccccgccacacccacacggtggagctgcctcttccttcccctcctccctgttgcccatactcagcatctcggatgaaagggctcccttgtcctcaggctccacgggagcggggctgctggagagagcggggaactcccaccacagtggggcatccggcactgaagccctggtgttcctggtcacgtcccccaggggaccctgcccacttcctggacttcgtgccttactgagtctctaagactttttctaataaacaagccagtgcgtgtaccatg

SEQ ID NO: 2687 - protein, 90 aa, Homo sapiens [sequence omitted]

SEQ ID NO: 2688 - DNA, 799 bp, Homo sapiens
attgtggtcatttagtgtcacaaatttggtcatttggttaaagttaaaattgagagtaggaggtcataaagccaggattgaagtggcaaggtcaaggagctaaatgacagtaataaggtcaggggccacccctaagttacaggatcaaaggtcagaatcaagggtagcggtcaggactaaggtcaggagctccagggtcccaagttcagaggctaggattgaggtcccagaattaggatcacaaggttggagaccaggagtcaggtcatgatctcatggactaacactgggctcaagatgggaatcgaggtcaggagctatgtccacggtcacaaggccgggtgttaaaaatgtcagagatggactggagttacagggtaagagccagagttgaagtcaggggtcataactgggacataaggccaggggccaagatggaagtcaccagactgggcaccaggctcatggggaagatggtgtgttccaggcccggtgagacccggaagatgatcagcacgtggaccgccgtgtgggtgaagatctgtgccagctgggcagggctgctcctctacctgtggaccctggtagccccactcctcctgcgcaaccgcgacttcagctgaggcagcctcacagctgctggagagagcggggaactcccaccacagtggggcatccggcactgaagccctggtgttcctggtcacgtcccccaggggaccctgcccacttcctggacttcgtgccttactgagtctctaagactttttctaataaacaagccagtgcgtgtaccatg

SEQ ID NO: 2689 - protein, 90 aa, Homo sapiens [sequence omitted]

SEQ ID NO: 2690 - DNA, 443 bp, Homo sapiens
gaagatgatcagcacgtggaccgccgtgtgggtgaagatctgtgccagctgggcagggctgctcctctacctgtggaccctggtagccccactcctcctgcgcaaccgcgacttcagctgaggcagcctcacagcctgccatctggtgcctcctgccacctggtgcctctcggctcagtgacagccaacctctgcctcttccttcccctcctccctgttgcccatactcagcatctcggatgaaagggctcccttgtcctcaggctccacgggagcggggctgctggagagagcggggaactcccaccacagtggggcatccggcactgaagccctggtgttcctggtcacgtcccccaggggaccctgcccacttcctggacttcgtgccttactgagtctctaagactttttctaataaacaagccagtgcgtgtaccatg

SEQ ID NO: 2691 - protein, 52 aa, Homo sapiens
MKGLPCPQAPRERGCWRERGTPTTVGHPALKPWCSWSRPPGDPAHFLDFVPY

SEQ ID NO: 2692 - DNA, 508 bp, Homo sapiens
tgcacaagtttggggaggaatcataactgatgcattctgtcaccttccactccctggggactggcagagagcagacatctgtaaatgtttgctgttgttgaagtacattggaacatgcccccgaaccaccaggatccaggatctgctgagcagccagagggcgtttaagtcagtgccactgacttgcagtgtggccctgggcaaggggtagaactcttctggcctggcttttctcattagtaaaataaggggtagttttaggcaatttgacagctaacgtctgtttcctgtcttggcccaatggcccttaggagctctggtccaggtcctcacagaagaagagtctgtggtggtctctttgagaatgcctctttccctctggtctcaatggcctactactggcccaagtgccctcccaccacacacacacacacacacacacacagattcacacacacatgcatgcatgcacatatgcacacacgtgcacatagcatgtgtacacaca

SEQ ID NO: 2693 - protein, 68 aa, Homo sapiens
MALRSSGPGPHRRRVCGGLFENASFPLVSMAYYWPKCPPTTHTHTHTHRFTHTCMHAHMHTRAHSMCT

SEQ ID NO: 2694 - DNA, 17825 bp, Homo sapiens
cacgctcccctcgactgcgctccagcctggggcgcgcccggccgccgccgccttcgctgccgccacgggcccgtcttcttcctccttcggctcccaggatgaagaaactgagtctcagagaggtgaagtgacttgcccaagatcacagcaattatcacttctccctgggctcccaggccctcctgcagcagcccccgcctgggccatgtcttcctcagatgaagagacgctcagtgagcggtcatgtcggagtgagcggtcttgtcggagtgagcgatcttacaggagcgagcggtcggggagcctgtctccctgtcccccaggggacaccttgccctggaacctgccactgcatgagcagaaaaagcggaaaagccaggattcggtgctggaccctgcagagcgtgctgtggtcagagtcgctgatgaacgggaccgggttcagaagaaaacgttcaccaagtgggtcaacaagcacttaatgaaggtccgcaagcacatcaatgatctttatgaagatctgcgggatggccataacctgatctctctgttggaggtcctctcaggcatcaaactgccccgggagaagggcaggatgcgttttcataggctgcagaatgtgcagattgccctggacttcctaaagcagcgacaggtgaaactagtgaatattcgcaatgatgacatcacagatggcaaccccaagttgaccctgggtctgatctggaccattattttgcatttccagatctctgacatctacattagtggagaatcaggggatatgtcagccaaggagaaactactcctgtggacccagaaggtgacagctggttacacaggaatcaaatgcaccaacttttcctcctgctggagtgatgggaagatgttcaatgcactcattcaccgataccgacccgatctagtagacatggagagggtgcaaatccaaagtaaccgagagaatctggaacaggcttttgaagtggcagaaagactgggggtcactcgcctgctggatgcagaagatgtggatgtgccatctccagatgaaaagtctgtaatcacttatgtgtcttcgatttatgatgccttccctaaagttcctgagggtggagaagggatcagtgctacggaagtggactccaggtggcaagaataccaaagccgagtggactccctcattccctggatcaaacagcatacaatactgatgtcagataaaacttttccccaaaaccctgttgaactaaaggcactttataaccaatatatacacttcaaagaaacagaaattctggccaaggagagagaaaaaggaagaattgaggaattatataaattactagaggtgtggattgaatttggccgaattaaactgcctcaaggttatcaccctaatgatgtggaagaagagtggggaaagctcatcatagagatgctggaacgagagaaatcacttcggccggctgtggagaggctggaattgctgctacagattgcaaacaaaatccagaatggtgctttgaactgtgaagaaaaactgacactagctaagaatacactgcaggctgatgctgctcacctggaatcaggacaaccggtacaatgtgagtcagatgtcattatgtacattcaggagtgtgaaggtctcatcaggcagctgcaggtggatctccagatcctgcgggatgagaattactaccagctagaagagctggcttttagggtcatgcgtcttcaggatgagctggtcaccttgcgtctagagtgtacaaacctgtaccggaagggtcatttcacttcacttgaattggttccaccctctactttaaccaccactcatctgaaagcagaacccttaaccaaggcaacccattcttcttctacctcctggttccgaaagcctatgactcgggctgaacttgtggccatcagctcctctgaagatgaaggcaatctccgatttgtgtatgaactactgtcttgggtagaagagatgcagatgaaactggagcgagcagagtggggcaatgacctgcctagtgtggagttgcagctagaaacacagcagcacatccatacgagtgtagaagagctgggctcaagtgtcaaggaggccaggttgtatgagggaaagatgtcccagaatttccataccagctatgctgaaactcttggaaagctggagacacagtattgtaaattgaaggaaacttctagcttccggatgaggcaccttcagagcctgcataaatttgtttccagagctacagctgagttgatctggttgaatgagaaggaggaggaggaactagcatatgactggagtgacaacaattccaatatctcagccaagagaaattacttctctgagttgacaatggaactggaggagaaacaggatgtgtttcgttctctacaagatacagcagaactactttcacttgagaaccacccagccaagcagacagtggaggcttacagtgctgctgtccagtcccagttgcagtggatgaagcagctgtgcctgtgtgttgagcagcatgtgaaagagaatactgcttattttcagttcttcagtgatgcacgagagctggagtcattcttgaggaacctccaagattccattaaacgaaaatattcctgtgaccacaacaccagcttatcccgccttgaagacctgctccaggactccatggatgaaaaggagcagcttatacagtccaagagttccgttgccagtctcgttgggagatcaaaaaccatcgttcagctaaaaccacgcagtccagaccatgtgttaaagaacaccatttctgtcaaggctgtctgtgactacaggcagatcgagattactatttgcaaaaatgatgaatgtgtgctagaagataattctcagcggaccaaatggaaagtgatcagccccacagggaacgaggcaatggtgccgtcagtctgcttcctcatccccccacccaataaggatgccattgagatggccagcagggtcgaacaatcttatcagaaggttatggccctttggcatcagctgcatgttaacaccaaaagccttatctcttggaactatctgcgtaaagaccttgaccttgtacagacctggaacctagaaaagcttcgatcctcagcaccaggggagtgccatcagattatgaagaaccttcaggcccactatgaagactttctgcaggatagtcgtgactctgtgctgttctcagtggctgatcgcttgcgcttggaagaggaggtggaagcttgtaaagcccgcttccagcacctgatgaagtccatggagaatgaggacaaagaggagactgtggccaagatgtacatttcagagttgaagaacatccggctacgcctggaggagtatgaacagagggtggtcaaacgaattcagtctctagccagctctaggactgacagagatgcctggcaggacaatgcattaaggattgcagagcaagagcacacccaggaggatttacagcaattgaggtcagacttggatgcagtttctatgaaatgtgacagctttctccatcagtctccatctagttcaagtgtcccaactctgcgctcagaactgaatctgctggtggagaagatggaccatgtctatggtctctctactgtatatctgaataagttaaagacagttgatgttatagtacgtagcatacaggatgctgaactcttggtcaaaggttatgagattaagctgagtcaagaagaagtagtactggcagatctctcagctctggaggcccattggtcgacattacggcactggcttagtgatgtgaaggacaagaattcagtgttttcagtcctggatgaggaaattgccaaggccaaggtagtggcagagcagatgagtcgtctgacaccagagcgaaatctggatttggagcgctatcaggaaaaaggctcccagctgcaggagcgttggcaccgagtcattgcccagctcgagattcgccaatctgagctagaaagtatccaggaagttctgggagattaccgagcctgccatggaactctcatcaagtggattgaggaaaccactgcccagcaggaaatgatgaagccaggccaggcagaggatagcagagtgctttcggagcagctcagccagcagacggccctatttgcagaaattgagagaaatcagacaaaactggatcaatgtcaaaaattttcccagcagtactctactattgtaaaggactatgaattgcaactgatgacatacaaggcctttgtggaatcgcagcagaaatcccctggcaagcgccgtcgcatgctttcctcttcagatgccatcactcaagagttcatggacttaaggactcgctacacggcattggtgactttaacaactcagcacgtgaaatacatcagtgatgcactccggcgtctggaggaggaggagaaagtggtagaagaggagaaacaagaacatgtggagaaggttaaagaacttttgggctgggtgtctaccctagcgaggaatacacaaggaaaagctacctcatccgagaccaaagaatcaacagacattgaaaaagctattttggaacagcaggttctgtcagaagagctgacaacaaagaaagaacaagtctctgaagctattaaaacatcacagatcttcttggccaagcatggtcataagctctcagaaaaagagaagaaacaaatatctgagcaattgaatgccctaaacaaggcttaccatgacctttgtgatggttctgcaaatcagcttcagcagcttcagagccagttggctcaccagacagaacaaaagaccctgcagaaacaacaaaatacctgtcaccagcaactggaggatctttgcagttgggtaggacaggcagaaagagcactggcaggccaccaaggcagaaccacccagcaggatctctctgctttgcagaagaaccaaagtgacttgaaggatttacaggatgacattcagaatcgtgccacctcatttgccactgttgtcaaggacattgaggggttcatggaagagaatcagaccaagctgagcccacgtgagttgacagctcttcgggaaaagcttcatcaggctaaggagcaatatgaggcgctccaggaagagacacgtgtggcccagaaggaactggaggaagcagtgacctccgccttacagcaggagactgaaaagagtaaagcagcaaaggaactggcagagaacaagaagaagatcgatgctctcctggattgggtaacttcagtaggatcatctggtggacagctgctgaccaaccttccaggaatggagcagctctcgggagctagcttggagaaaggagccttggacaccactgatggttacatgggggtgaatcaagccccagagaaactggacaagcaatgtgagatgatgaaggcccgtcaccaagaattgctgtcccagcagcaaaatttcattctggccacccagtcagctcaggccttcttggatcagcatggccacaatctcacacctgaggagcaacagatgctgcaacagaagctgggagagctaaaggaacaatactctacttccctggcccaatcagaggcagaactgaagcaggtgcagacacttcaggatgagttgcagaaatttctgcaggatcataaagagtttgaaagctggttggaacgatccgagaaagagctggagaacatgcataagggaggcagcagccccgagacccttccctccctgctaaagcggcaaggaagcttctcagaggatgtcatttcccacaaaggagacttgagatttgtgactatctcaggacagaaagtcttggacatggaaaacagttttaaggaaggcaaagaaccatcagaaattggaaacttagtaaaggacaagttgaaggatgcaacagaaagatacactgctctccactcaaagtgtacacgattaggatctcacctgaatatgctgttaggccagtatcatcaattccaaaacagtgctgacagcctgcaggcctggatgcaggcttgtgaggccaacgtggagaagctcctctcagatactgttgcctctgaccctggagttctccaggagcagcttgcaacaacaaagcagttgcaggaggaattggctgagcaccaagtacctgtggaaaaactccaaaaagtagctcgtgacataatggaaattgaaggggagccagccccagaccacaggcatgttcaagaaactacagattccatactcagccacttccaaagcctctcctatagcctggctgagcgatcttctctgctgcagaaagcaattgcccaatctcagagtgtccaggaaagcctggagagcctgttgcagtctattggggaagttgaacaaaacctggaagggaagcaggtgtcatcactctcatcaggagtcatccaggaagccttagccacaaatatgaaattgaagcaggacattgctcggcaaaagagcagcttggaggccacccgtgagatggtgacccgattcatggagacagcagacagtactacagcagcagtgctgcagggcaaactggcagaggtgagccagcggttcgaacagctctgtctacagcagcaagaaaaggagagctccctaaagaagcttctaccccaggcagagatgtttgaacacctctctggtaagctgcagcagttcatggaaaacaaaagtcggatgctggcctctggaaatcagccagatcaagatattacacatttcttccaacagatccaggagctcaatttggaaatggaagaccaacaggagaacctagatactcttgagcacctggtcactgaactgagctcttgtggctttgcgctggacttgtgccagcatcaggacagggtacagaatctaagaaaagacttcacagagctacagaagacagttaaagagagagagaaagatgcatcatcttgccaggaacagttggatgaattccggaagctggtcaggaccttccagaaatggttgaaagaaactgaagggagtattccacctacggaaacttctatgagtgctaaagagttagaaaagcagattgaacacctgaagagtctactagatgactgggcaagtaagggaactctggtggaagaaatcaattgcaaaggtacttctttagaaaatctcatcatggaaatcacagcacctgattcccaaggcaagacaggttccatactgccctctgtaggaagctctgtaggcagtgtaaacggataccacacctgcaaagatctgacggagatccagtgtgacatgtcagatgtaaacttgaagtatgagaaactagggggagtacttcatgaacgccaggaaagccttcaggctatcctcaacagaatggaggaggttcacaaggaggcaaactctgtgctgcagtggctggaatcaaaagaggaagtcctgaaatccatggatgccatgtcatctccaaccaagacagaaacagtgaaagcccaagctgaatctaacaaggccttcctggctgagttggaacagaattctccaaaaattcaaaaagtaaaggaagccctggctggattactggtgacatatcccaactcacaggaagcagaaaattggaagaaaattcaggaagaactcaattcccgatgggaaagggccactgaggttactgtggctcggcaaaggcagctagaggaatctgcaagtcatctggcctgcttccaggctgcagaatcccagctccggccgtggctgatggagaaagaactgatgatgggagtgctggggcccctgtctattgaccccaacatgttgaatgcacaaaagcaacaggtccagtttatgctaaaggaatttgaagcacgcaggcaacagcatgagcaactgaatgaggcagctcagggcatcctaacaggccctggagatgtctctctgtccaccagccaagtacagaaagaactccagagcatcaatcagaaatgggttgagctgactgacaaactcaactcccgttccagccaaattgaccaagctattgttaagagcacccagtaccaggaactgctccaggacttatcagagaaggtgagggcagttggacaacggctgagtgtccagtcagctatcagcacccaaccagaggctgtaaagcagcaattggaagagaccagtgaaattcgatctgacttggagcagttagaccacgaggttaaggaggctcagacactgtgcgatgaactctcagtgctcattggtgagcagtacctcaaggatgaactgaagaagcgtttggagacagttgccctgcctctccaaggtttagaagaccttgcagccgatcgcattaacagactccaggcagctcttgccagcacccagcagttccagcaaatgtttgatgagttgaggacctggttggatgataaacaaagccagcaagcaaaaaactgcccaatttctgcaaaattggagcggctacagtctcagctacaggagaatgaagagtttcagaaaagtcttaatcaacacagtggctcctatgaggtgattgtggctgaaggggaatctctacttctttctgtacctcctggagaagagaaaaggactctacaaaaccagttggttgagctcaaaaaccattgggaagagcttagtaaaaaaactgcagacagacaatccaggctcaaggattgtatgcagaaagctcagaaatatcagtggcatgtggaagaccttgtgccatggatagaagattgtaaagctaagatgtctgagttgcgagtcactctggatccagtgcagctagagtccagtctcctaagatcaaaggctatgctgaatgaggtggagaagcgccgctccctgctggaaatattgaatagtgctgctgacattctgatcaattcttcagaagcagatgaggatggaatccgggatgagaaggctgggatcaaccagaacatggatgctgttacagaagagctgcaggccaaaacagggtcactcgaagaaatgactcagaggctcagggagttccaggaaagctttaagaatattgaaaagaaggttgaaggagccaaacaccaacttgagatctttgatgctctgggttctcaagcctgtagcaacaagaacctggagaagctaagagctcaacaggaagtgctgcaggccctagagcctcaggtagactatctgaggaactttactcagggtctggtagaagatgccccagatggatctgatgcttctcaacttctccaccaagctgaggtcgcccagcaagagttcctcgaagttaagcaaagagtgaacagtggttgtgtgatgatggaaaacaagctggaggggattggccagtttcactgccgggtccgagagatgttctctcaattggcagacctggatgatgagctagatggcatgggtgctattggcagagacactgatagcctccagtcccaaatcgaggatgtccggctattccttaacaaaattcacgtcctcaaattagacatagaggcctctgaagcagagtgtcgacatatgctagaagaagaggggactctggatttgttaggtctcaaaagggagctagaagccctgaacaaacagtgtggcaaactgacagagagggggaaagctcgtcaggaacagctggaactgacactaggccgtgtagaggacttctacaggaaattgaaaggactcaatgacgcgaccacagcagcagaggaggcagaggccctccagtgggtagtggggaccgaagtggaaatcatcaaccaacaattagcagattttaaaatgtttcagaaagaacaagtggatcctcttcagatgaaattgcagcaggtgaatggacttggccagggattaattcagagtgcaggaaaagactgtgatgtacagggtttagaacatgacatggaagagatcaatgctcgatggaatacattgaataaaaaggtcgcacaaagaattgcacagctacaggaagctttgttgcattgtgggaagtttcaagatgccttggagccattgctcagctggttggcagataccgaggagctcatagccaatcagaaacctccatctgctgagtataaagtggtgaaagcacagatccaagaacagaagttgctccagcggctcctagatgatcgaaaggccacagtagacatgcttcaagcagaaggaggcagaatagcccagtcagcagagctggctgatagagagaaaatcactggacagctggagagtcttgaaagtagatggactgaactactcagtaaggcagcagccaggcaaaaacagctggaagacatcctggttctggccaaacagttccatgagacagctgagcctatttctgacttcttatctgtcacagagaaaaagcttgctaactcagaacctgttggcactcagactgccaaaatacagcagcagatcattcggcacaaggctctggaagaagacatagaaaaccatgcaacagatgtgcaccaggcagtcaaaattgggcagtccctctcctccctgacatctcctgcagaacagggtgtgctgtcagaaaagatagactcattgcaggcccgatacagtgaaattcaagaccgctgttgtcggaaggcagccctacttgaccaagctctgtctaatgctaggctgtttggggaggatgaggtggaggtgctcaactggctggctgaggttgaggacaagctcagttcagtgttcgtaaaggatttcaaacaggatgtcctgcacaggcagcatgctgaccacctggctttaaatgaagaaattgttaatagaaagaagaatgtagatcaagctattaaaaatggtcaggctcttctaaaacaaaccacaggtgaggaggtgttacttatccaggaaaaactagatggtataaagactcgttacgcagacatcacagttactagctccaaggccctcagaactttagagcaagcccggcagctggccaccaagttccagtctacttatgaggaactgaccgggtggctgagggaggtggaggaggagctggcaaccagtggaggacagtctcccacaggggaacagataccccagtttcagcagagacagaaggaattaaagaaggaggtcatggagcacaggctggtgttggacacagtgaatgaggtgagccgtgctctcttagagctggtgccctggagagccagagaagggctggataaacttgtgtccgatgctaacgagcagtacaaactagtcagtgacactattggacaaagggtggatgaaattgatgctgctattcagagatcacaacagtatgagcaagctgccgatgcagaactagcttgggttgctgaaacaaaacggaaactgatggctctgggtccaattcgcctggaacaggaccagaccacagctcagcttcaggtacagaaggctttctccattgacattattcgacacaaagattcaatggatgaactcttcagtcaccgtagtgaaatctttggcacatgtggggaggagcaaaaaactgtattacaggaaaagacagagtctctaatacagcaatatgaagccattagcctactcaattcagagcgttatgcccgcctagagcgggcccaggtcttagtaaaccagttttgggaaacttatgaagagctcagcccctggattgaggaaactcgggcactaatagcacagttaccctctccagccattgatcatgagcagctcaggcagcaacaagaggaaatgaggcaattaagggaatctattgctgaacacaaacctcatattgacaaactactaaagataggcccacaactaaaggaattaaaccctgaggaaggggaaatggtggaagaaaaataccagaaagcagaaaacatgtatgcccaaataaaggaggaggtgcgccagcgagccctggctctggatgaagccgtgtcccagtccacacaggtatgtgttttcatgataaaattgagcctatgttggagacactggagaatctttcctctcgcctgcgtatgccaccactgatccctgctgaagtagacaagatcagagagtgcatcagtgacaataagagtgccaccgtggagctagaaaaactgcagccatcctttgaggccttgaagcgccgtggagaggagcttattggacgatctcagggagcagacaaggatctggctgcaaaagaaatccaggataaattggatcaaatggtattcttctgggaggacatcaaagctcgggctgaagaacgagaaatcaaatttcttgatgtccttgaattagcagagaagttctggtatgacatggcagctctcctgaccaccatcaaagacacccaggatattgtccatgacttggaaagcccaggcattgatccttccatcatcaaacaacaggttgaagctgctgagactattaaggaagagacagatggtctgcatgaagagctggagtttattcggatccttggagcagatttgatttttgcctgtggagaaactgagaagcctgaagtgaggaagagcattgatgagatgaataatgcttgggagaacttaaacaaaacatggaaagagaggctagaaaaacttgaggatgctatgcaagctgctgtgcagtatcaggacactcttcaggctatgtttgactggctagataacactgtgattaaactctgcaccatgccccctgttggcactgacctcaatactgttaaagatcagttaaatgaaatgaaggagttcaaagtagaagtttaccaacagcaaattgagatggagaagcttaatcaccagggtgaactgatgttaaagaaagctactgatgagacggacagagacattatacgagaaccactgacagaactcaaacacctctgggagaacctgggtgagaaaattgcccaccgacagcacaaactagaaggggctctgttggcccttggtcagttccagcatgccttagaggaactaatgagttggctgactcataccgaagagttgttagatgctcagagaccaataagtggagacccaaaagtcattgaagttgagctcgcaaagcaccatgtcctaaaaaatgatgttttggctcatcaagccacagtggaaacagtcaacaaagctggcaatgagcttcttgaatccagtgctggagatgatgccagcagcttaaggagccgtttggaagccatgaaccaatgctgggagtcagtgttacagaaaacagaggagagggagcagcagcttcagtcaactctgcagcaggcccagggcttccacagtgaaattgaagatttcctcttggaacttactagaatggagagccagctttctgcatctaagcccacaggaggacttcctgaaactgctagggaacagcttgatacacatatggaactctattcccagctgaaagccaaggaagagacttataatcaactacttgacaagggcagactcatgcttctaagccgtgacgactctgggtctggctccaagacagaacagagtgtagcacttttggagcagaagtggcatgtggtcagcagtaagatggaagaaagaaagtcaaagctggaagaggccctcaacttggcaacagaattccagaattccctacaagaatttatcaactggctcactctagcagagcagagtttaaacatcgcttctccaccaagcctgattctaaatactgtcctttcccagatagaagagcacaaggtttttgctaatgaagtaaatgctcatcgagaccagatcattgagctggatcaaactgggaatcaattaaagttccttagccaaaagcaggatgttgttctgatcaagaatttgttggtgagcgtgcagtctcgatgggagaaggttgtccagcgatctattgaaagagggcgatcactagatgatgccaggaagcgggcaaaacaattccatgaagcttggaaaaaactgattgactggctagaagatgcagagagtcacctggactcagaactagagatatccaatgacccagacaaaattaaacttcagctttctaagcataaggagtttcagaagactcttggtggcaagcagcctgtgtatgataccacaattagaactggcagagcactgaaagaaaagactttgcttcccgaagatagtcagaaacttgacaatttcctaggagaagtcagagacaaatgggatactgtttgtggcaagtctgtggagcggcagcacaagttggaggaagccctgctcttttcgggtcagttcatggatgctttgcaggcattggttgactggttatacaaggtggagccacagctggctgaggaccagcccgtgcacggggaccttgacctcgtcatgaacctcatggatgcacacaaggttttccagaaggaactgggaaagcgaacaggaaccgttcaggtcctgaagcggtcaggccgagagctgattgagaatagtcgagatgacaccacttgggtaaaaggacagctccaggaactgagcactcgctgggacactgtctgtaaactctctgtttccaaacaaagccggcttgagcaggccttaaaacaagcggaagtgtttcgagacacagtccacatgctgttggagtggctttctgaagcagagcaaacgcttcgctttcggggagcacttcctgatgacacagaggccctgcagtctctcattgacacccataaggaattcatgaagaaagtagaagaaaagcgagtggacgttaactcagcagtagccatgggagaagtcatcctggctgtctgccaccccgattgcatcacaaccatcaaacactggatcaccatcatccgagctcgcttcgaggaggtcctgacatgggctaagcagcaccagcagcgtcttgaaacggccttgtcagaactggtggctaatgctgagctcctggaagaacttctggcatggatccagtgggctgagaccaccctcattcagcgggatcaggagccaatcccgcagaacattgaccgagttaaagcccttatcgctgagcatcagacatttatggaggagatgactcgcaaacagcctgacgtggaccgggtcaccaagacatacaaaaggaaaaacatagagcctactcacgcgcctttcatagagaaatcccgcagcggaggcaggaaatccctaagtcagccaacccctcctcccatgccaatcctttcacagtctgaagcaaaaaacccacggatcaaccagctttctgcccgctggcagcaggtgtggctgttagcactggagcggcaaaggaaactgaatgatgccttggatcggctggaggagttgaaagaatttgccaactttgactttgatgtctggaggaaaaagtatatgcgttggatgaatcacaaaaagtctcgagtgatggatttcttccggcgcattgataaggaccaggatgggaagataacacgtcaggagtttatcgatggcattttagcatccaagttccccaccaccaagttagagatgactgctgtggctgacattttcgaccgagatggggatggttacattgattattatgaatttgtggctgctcttcatcccaacaaggatgcgtatcgaccaacaaccgatgcagataaaatcgaagatgaggttacaagacaagtggctcagtgcaaatgtgcaaaaaggtttcaggtggagcagatcggagagaataaataccggtttggggattctcagcagttgcggctggtccgtattctgcgcagcaccgtgatggttcgcgttggtggaggatggatggccttggatgaatttttagtgaaaaatgatccctgccgagcacgaggtagaactaacattgaacttagagagaaattcatcctaccagagggagcatcccagggaatgacccccttccgctcacggggtcgaaggtccaaaccatcttcccgggcagcttcccctactcgttccagctccagtgctagtcagagtaaccacagctgtacatccatgccatcttctccagccaccccagccagtggaaccaaggttatcccatcatcaggtagcaagttgaaacgaccaacaccaacttttcattctagtcggacatcccttgctggtgataccagcaatagttcttccccggcctccacaggtgccaaaactaatcgggcagaccctaaaaagtctgccagtcgccctgggagtcgggctgggagtcgagccgggagtcgagccagcagccggcgaggaagtgacgcttctgactttgacctcttagagacgcagtctgcttgttccgacacttcagaaagcagcgctgcagggggccaaggcaactccaggagagggctaaacaaaccttccaaaatcccaaccatgtctaagaagaccaccactgcctcccccaggactccaggtcccaagcgataacactgtctaagcacccccaagccactatccactttgaatcctgctccatacattgggtgtatatttattctgaacgggagaagttatattgttaaaagtgtaaaagaataattgtgttatgaagctgccttattttttttctttttgtaagttactattttcatgtgaatatttatgtagataaaatttgcctcctggtaaccctgtaatggatggggcccagaaatgaaatatttgagaaaaacaagtgaaaaggtcaagatacaaatgtgtattaaaaaaaaaaaagcctattaatagggtttctgcgcggtgcagggttgtaaacctgctttatcttttaggattattcctaaatgcatcttctttataaacttgacttgctatctcagcaagataaattatattaaaaaaataagaatcctgcagtgtttaaggaactctttttttgtaaatcacggacacctcaattagcaagaactgaggggagggctttttccattgtttaatgttttgtgatttttagctaaagagagggaacctcatctaagtaacatttgcacatgatacagcaaaaggagttcattgcaatactgtctttggatattgtttcagtactgggtgtttaaaggacaaatagctgctagaattcaggggtaaatgtaagtgttcagaaaacgtcagaacatttggggttttaaactgatttgttgctccctatccagcctagacaccagtaactcttgtgttcaccaggacccagacccttggcaagggataggctcgttggtgacattgtgaatttcagatttgttttatccactttttttgctatttatttaaatggtcgatcaacttcccacaaactgaggaatgaattccacgagcctgttctgaaaatgtggacgtaagacaaacacgtgctcgtcctttaatggagttcaccagcacacttgttaaccagtcctgtttgctttcgtctttttttgtgcgtaataaagtcaactgaccaagtgaccatgaaaaggggctgtctggggctcctgttttttagctgctgttcttcagctccgaccatgttgctgtgtgattatctcaattggttttaattgaggcagaaactgaagctctaccaatgaactgtttagaaacaagacacacttttgtattaaaattgcttgcagtaacaaatattttgtatttcctgattttcttttcaactattaccttatctataaatgttaccctggggtataatcatgttgtaggtacttaaatgcattccgcaaatcaaaatatcttgatggataaattatagagcttaatag

SEQ ID NO: 2695 - protein, 3960 aa, Homo sapiens [sequence omitted]

SEQ ID NO: 2696 - DNA, 734 bp, Homo sapiens
cgggccgggtgcgagcggactgaggagcggagcgcgactgccgggccgggcgaggcgggcggacggcggagagcgagggcgccgtcgccgtctctgagacgcacaaagggtcgaggctggggccgccgccgcctcagcgcgcgggcctggaaccggcagcccccggggctcggcgagaaggcggtgcgggcggccatggccggctacgtgccgggtcagcagccggccaaccgcagccaggagaaggagttcgtgcaggcgtacgaggatgtgctggagcggtacaaagatgaacgggaccgggttcagaagaaaacgttcaccaagtgggtcaacaagcacttaatgaaggtccgcaagcacatcaatgatctttatgaagatctgcgggatggccataacctgatctctctgttggaggtcctctcaggcatcaaactgccccgggagaagggcaggatgcgttttcataggctgcagaatgtgcagattgccctggacttcctaaagcagcgacaggtaagaccatcacatgccttccccattcttccaggctgtgttggcattggggccctattcagagatgtttttagtgcccctagtaagctctcagtaaatgctaaatctgattgacccagttctgagtcttaacttgctagtgagcaattgtattctggttagagaaatcattcagtactcacacagaacttgtgacctccttgagaggaagaatg

SEQ ID NO: 2697 - protein, 145 aa, Homo sapiens
MAGYVPGQQPANRSQEKEFVQAYEDVLERYKDERDRVQKKTFTKWVNKHLMKVRKHINDLYEDLRDGHNLISLLEVLSGIKLPREKGRMRFHRLQNVQIALDFLKQRQVRPSHAFPILPGCVGIGALFRDVFSAPSKLSVNAKSD

SEQ ID NO: 2698 - DNA, 17115 bp, Homo sapiens
ggcgcgatgtcggctcactacaacctctgcctcctggattcaagcaattctgtacctcagcctcccgagtagctgtgattacagatgaacgggaccgggttcagaagaaaacgttcaccaagtgggtcaacaagcacttaatgaaggtccgcaagcacatcaatgatctttatgaagatctgcgggatggccataacctgatctctctgttggaggtcctctcaggcatcaaactgccccgggagaagggcaggatgcgttttcataggctgcagaatgtgcagattgccctggacttcctaaagcagcgacaggtgaaactagtgaatattcgcaatgatgacatcacagatggcaaccccaagttgaccctgggtctgatctggaccattattttgcatttccagatctctgacatctacattagtggagaatcaggggatatgtcagccaaggagaaactactcctgtggacccagaaggtgacagctggttacacaggaatcaaatgcaccaacttttcctcctgctggagtgatgggaagatgttcaatgcactcattcaccgataccgacccgatctagtagacatggagagggtgcaaatccaaagtaaccgagagaatctggaacaggcttttgaagtggcagaaagactgggggtcactcgcctgctggatgcagaagatgtggatgtgccatctccagatgaaaagtctgtaatcacttatgtgtcttcgatttatgatgccttccctaaagttcctgagggtggagaagggatcagtgctacggaagtggactccaggtggcaagaataccaaagccgagtggactccctcattccctggatcaaacagcatacaatactgatgtcagataaaacttttccccaaaaccctgttgaactaaaggcactttataaccaatatatacacttcaaagaaacagaaattctggccaaggagagagaaaaaggaagaattgaggaattatataaattactagaggtgtggattgaatttggccgaattaaactgcctcaaggttatcaccctaatgatgtggaagaagagtggggaaagctcatcatagagatgctggaacgagagaaatcacttcggccggctgtggagaggctggaattgctgctacagattgcaaacaaaatccagaatggtgctttgaactgtgaagaaaaactgacactagctaagaatacactgcaggctgatgctgctcacctggaatcaggacaaccggtacaatgtgagtcagatgtcattatgtacattcaggagtgtgaaggtctcatcaggcagctgcaggtggatctccagatcctgcgggatgagaattactaccagctagaagagctggcttttagggtcatgcgtcttcaggatgagctggtcaccttgcgtctagagtgtacaaacctgtaccggaagggtcatttcacttcacttgaattggttccaccctctactttaaccaccactcatctgaaagcagaacccttaaccaaggcaacccattcttcttctacctcctggttccgaaagcctatgactcgggctgaacttgtggccatcagctcctctgaagatgaaggcaatctccgatttgtgtatgaactactgtcttgggtagaagagatgcagatgaaactggagcgagcagagtggggcaatgacctgcctagtgtggagttgcagctagaaacacagcagcacatccatacgagtgtagaagagctgggctcaagtgtcaaggaggccaggttgtatgagggaaagatgtcccagaatttccataccagctatgctgaaactcttggaaagctggagacacagtattgtaaattgaaggaaacttctagcttccggatgaggcaccttcagagcctgcataaatttgtttccagagctacagctgagttgatctggttgaatgagaaggaggaggaggaactagcatatgactggagtgacaacaattccaatatctcagccaagagaaattacttctctgagttgacaatggaactggaggagaaacaggatgtgtttcgttctctacaagatacagcagaactactttcacttgagaaccacccagccaagcagacagtggaggcttacagtgctgctgtccagtcccagttgcagtggatgaagcagctgtgcctgtgtgttgagcagcatgtgaaagagaatactgcttattttcagttcttcagtgatgcacgagagctggagtcattcttgaggaacctccaagattccattaaacgaaaatattcctgtgaccacaacaccagcttatcccgccttgaagacctgctccaggactccatggatgaaaaggagcagcttatacagtccaagagttccgttgccagtctcgttgggagatcaaaaaccatcgttcagctaaaaccacgcagtccagaccatgtgttaaagaacaccatttctgtcaaggctgtctgtgactacaggcagatcgagattactatttgcaaaaatgatgaatgtgtgctagaagataattctcagcggaccaaatggaaagtgatcagccccacagggaacgaggcaatggtgccgtcagtctgcttcctcatccccccacccaataaggatgccattgagatggccagcagggtcgaacaatcttatcagaaggttatggccctttggcatcagctgcatgttaacaccaaaagccttatctcttggaactatctgcgtaaagaccttgaccttgtacagacctggaacctagaaaagcttcgatcctcagcaccaggggagtgccatcagattatgaagaaccttcaggcccactatgaagactttctgcaggatagtcgtgactctgtgctgttctcagtggctgatcgcttgcgcttggaagaggaggtggaagcttgtaaagcccgcttccagcacctgatgaagtccatggagaatgaggacaaagaggagactgtggccaagatgtacatttcagagttgaagaacatccggctacgcctggaggagtatgaacagagggtggtcaaacgaattcagtctctagccagctctaggactgacagagatgcctggcaggacaatgcattaaggattgcagagcaagagcacacccaggaggatttacagcaattgaggtcagacttggatgcagtttctatgaaatgtgacagctttctccatcagtctccatctagttcaagtgtcccaactctgcgctcagaactgaatctgctggtggagaagatggaccatgtctatggtctctctactgtatatctgaataagttaaagacagttgatgttatagtacgtagcatacaggatgctgaactcttggtcaaaggttatgagattaagctgagtcaagaagaagtagtactggcagatctctcagctctggaggcccattggtcgacattacggcactggcttagtgatgtgaaggacaagaattcagtgttttcagtcctggatgaggaaattgccaaggccaaggtagtggcagagcagatgagtcgtctgacaccagagcgaaatctggatttggagcgctatcaggaaaaaggctcccagctgcaggagcgttggcaccgagtcattgcccagctcgagattcgccaatctgagctagaaagtatccaggaagttctgggagattaccgagcctgccatggaactctcatcaagtggattgaggaaaccactgcccagcaggaaatgatgaagccaggccaggcagaggatagcagagtgctttcggagcagctcagccagcagacggccctatttgcagaaattgagagaaatcagacaaaactggatcaatgtcaaaaattttcccagcagtactctactattgtaaaggactatgaattgcaactgatgacatacaaggcctttgtggaatcgcagcagaaatcccctggcaagcgccgtcgcatgctttcctcttcagatgccatcactcaagagttcatggacttaaggactcgctacacggcattggtgactttaacaactcagcacgtgaaatacatcagtgatgcactccggcgtctggaggaggaggagaaagtggtagaagaggagaaacaagaacatgtggagaaggttaaagaacttttgggctgggtgtctaccctagcgaggaatacacaaggaaaagctacctcatccgagaccaaagaatcaacagacattgaaaaagctattttggaacagcaggttctgtcagaagagctgacaacaaagaaagaacaagtctctgaagctattaaaacatcacagatcttcttggccaagcatggtcataagctctcagaaaaagagaagaaacaaatatctgagcaattgaatgccctaaacaaggcttaccatgacctttgtgatggttctgcaaatcagcttcagcagcttcagagccagttggctcaccagacagaacaaaagaccctgcagaaacaacaaaatacctgtcaccagcaactggaggatctttgcagttgggtaggacaggcagaaagagcactggcaggccaccaaggcagaaccacccagcaggatctctctgctttgcagaagaaccaaagtgacttgaaggatttacaggatgacattcagaatcgtgccacctcatttgccactgttgtcaaggacattgaggggttcatggaagagaatcagaccaagctgagcccacgtgagttgacagctcttcgggaaaagcttcatcaggctaaggagcaatatgaggcgctccaggaagagacacgtgtggcccagaaggaactggaggaagcagtgacctccgccttacagcaggagactgaaaagagtaaagcagcaaaggaactggcagagaacaagaagaagatcgatgctctcctggattgggtaacttcagtaggatcatctggtggacagctgctgaccaaccttccaggaatggagcagctctcgggagctagcttggagaaaggagccttggacaccactgatggttacatgggggtgaatcaagccccagagaaactggacaagcaatgtgagatgatgaaggcccgtcaccaagaattgctgtcccagcagcaaaatttcattctggccacccagtcagctcaggccttcttggatcagcatggccacaatctcacacctgaggagcaacagatgctgcaacagaagctgggagagctaaaggaacaatactctacttccctggcccaatcagaggcagaactgaagcaggtgcagacacttcaggatgagttgcagaaatttctgcaggatcataaagagtttgaaagctggttggaacgatccgagaaagagctggagaacatgcataagggaggcagcagccccgagacccttccctccctgctaaagcggcaaggaagcttctcagaggatgtcatttcccacaaaggagacttgagatttgtgactatctcaggacagaaagtcttggacatggaaaacagttttaaggaaggcaaagaaccatcagaaattggaaacttagtaaaggacaagttgaaggatgcaacagaaagatacactgctctccactcaaagtgtacacgattaggatctcacctgaatatgctgttaggccagtatcatcaattccaaaacagtgctgacagcctgcaggcctggatgcaggcttgtgaggccaacgtggagaagctcctctcagatactgttgcctctgaccctggagttctccaggagcagcttgcaacaacaaagcagttgcaggaggaattggctgagcaccaagtacctgtggaaaaactccaaaaagtagctcgtgacataatggaaattgaaggggagccagccccagaccacaggcatgttcaagaaactacagattccatactcagccacttccaaagcctctcctatagcctggctgagcgatcttctctgctgcagaaagcaattgcccaatctcagagtgtccaggaaagcctggagagcctgttgcagtctattggggaagttgaacaaaacctggaagggaagcaggtgtcatcactctcatcaggagtcatccaggaagccttagccacaaatatgaaattgaagcaggacattgctcggcaaaagagcagcttggaggccacccgtgagatggtgacccgattcatggagacagcagacagtactacagcagcagtgctgcagggcaaactggcagaggtgagccagcggttcgaacagctctgtctacagcagcaagaaaaggagagctccctaaagaagcttctaccccaggcagagatgtttgaacacctctctggtaagctgcagcagttcatggaaaacaaaagtcggatgctggcctctggaaatcagccagatcaagatattacacatttcttccaacagatccaggagctcaatttggaaatggaagaccaacaggagaacctagatactcttgagcacctggtcactgaactgagctcttgtggctttgcgctggacttgtgccagcatcaggacagggtacagaatctaagaaaagacttcacagagctacagaagacagttaaagagagagagaaagatgcatcatcttgccaggaacagttggatgaattccggaagctggtcaggaccttccagaaatggttgaaagaaactgaagggagtattccacctacggaaacttctatgagtgctaaagagttagaaaagcagattgaacacctgaagagtctactagatgactgggcaagtaagggaactctggtggaagaaatcaattgcaaaggtacttctttagaaaatctcatcatggaaatcacagcacctgattcccaaggcaagacagatctgacggagatccagtgtgacatgtcagatgtaaacttgaagtatgagaaactagggggagtacttcatgaacgccaggaaagccttcaggctatcctcaacagaatggaggaggttcacaaggaggcaaactctgtgctgcagtggctggaatcaaaagaggaagtcctgaaatccatggatgccatgtcatctccaaccaagacagaaacagtgaaagcccaagctgaatctaacaaggccttcctggctgagttggaacagaattctccaaaaattcaaaaagtaaaggaagccctggctggattactggtgacatatcccaactcacaggaagcagaaaattggaagaaaattcaggaagaactcaattcccgatgggaaagggccactgaggttactgtggctcggcaaaggcagctagaggaatctgcaagtcatctggcctgcttccaggctgcagaatcccagctccggccgtggctgatggagaaagaactgatgatgggagtgctggggcccctgtctattgaccccaacatgttgaatgcacaaaagcaacaggtccagtttatgctaaaggaatttgaagcacgcaggcaacagcatgagcaactgaatgaggcagctcagggcatcctaacaggccctggagatgtctctctgtccaccagccaagtacagaaagaactccagagcatcaatcagaaatgggttgagctgactgacaaactcaactcccgttccagccaaattgaccaagctattgttaagagcacccagtaccaggaactgctccaggacttatcagagaaggtgagggcagttggacaacggctgagtgtccagtcagctatcagcacccaaccagaggctgtaaagcagcaattggaagagaccagtgaaattcgatctgacttggagcagttagaccacgaggttaaggaggctcagacactgtgcgatgaactctcagtgctcattggtgagcagtacctcaaggatgaactgaagaagcgtttggagacagttgccctgcctctccaaggtttagaagaccttgcagccgatcgcattaacagactccaggcagctcttgccagcacccagcagttccagcaaatgtttgatgagttgaggacctggttggatgataaacaaagccagcaagcaaaaaactgcccaatttctgcaaaattggagcggctacagtctcagctacaggagaatgaagagtttcagaaaagtcttaatcaacacagtggctcctatgaggtgattgtggctgaaggggaatctctacttctttctgtacctcctggagaagagaaaaggactctacaaaaccagttggttgagctcaaaaaccattgggaagagcttagtaaaaaaactgcagacagacaatccaggctcaaggattgtatgcagaaagctcagaaatatcagtggcatgtggaagaccttgtgccatggatagaagattgtaaagctaagatgtctgagttgcgagtcactctggatccagtgcagctagagtccagtctcctaagatcaaaggctatgctgaatgaggtggagaagcgccgctccctgctggaaatattgaatagtgctgctgacattctgatcaattcttcagaagcagatgaggatggaatccgggatgagaaggctgggatcaaccagaacatggatgctgttacagaagagctgcaggccaaaacagggtcactcgaagaaatgactcagaggctcagggagttccaggaaagctttaagaatattgaaaagaaggttgaaggagccaaacaccaacttgagatctttgatgctctgggttctcaagcctgtagcaacaagaacctggagaagctaagagctcaacaggaagtgctgcaggccctagagcctcaggtagactatctgaggaactttactcagggtctggtagaagatgccccagatggatctgatgcttctcaacttctccaccaagctgaggtcgcccagcaagagttcctcgaagttaagcaaagagtgaacagtggttgtgtgatgatggaaaacaagctggaggggattggccagtttcactgccgggtccgagagatgttctctcaattggcagacctggatgatgagctagatggcatgggtgctattggcagagacactgatagcctccagtcccaaatcgaggatgtccggctattccttaacaaaattcacgtcctcaaattagacatagaggcctctgaagcagagtgtcgacatatgctagaagaagaggggactctggatttgttaggtctcaaaagggagctagaagccctgaacaaacagtgtggcaaactgacagagagggggaaagctcgtcaggaacagctggaactgacactaggccgtgtagaggacttctacaggaaattgaaaggactcaatgacgcgaccacagcagcagaggaggcagaggccctccagtgggtagtggggaccgaagtggaaatcatcaaccaacaattagcagattttaaaatgtttcagaaagaacaagtggatcctcttcagatgaaattgcagcaggtgaatggacttggccagggattaattcagagtgcaggaaaagactgtgatgtacagggtttagaacatgacatggaagagatcaatgctcgatggaatacattgaataaaaaggtcgcacaaagaattgcacagctacaggaagctttgttgcattgtgggaagtttcaagatgccttggagccattgctcagctggttggcagataccgaggagctcatagccaatcagaaacctccatctgctgagtataaagtggtgaaagcacagatccaagaacagaagttgctccagcggctcctagatgatcgaaaggccacagtagacatgcttcaagcagaaggaggcagaatagcccagtcagcagagctggctgatagagagaaaatcactggacagctggagagtcttgaaagtagatggactgaactactcagtaaggcagcagccaggcaaaaacagctggaagacatcctggttctggccaaacagttccatgagacagctgagcctatttctgacttcttatctgtcacagagaaaaagcttgctaactcagaacctgttggcactcagactgccaaaatacagcagcagatcattcggcacaaggctctggaagaagacatagaaaaccatgcaacagatgtgcaccaggcagtcaaaattgggcagtccctctcctccctgacatctcctgcagaacagggtgtgctgtcagaaaagatagactcattgcaggcccgatacagtgaaattcaagaccgctgttgtcggaaggcagccctacttgaccaagctctgtctaatgctaggctgtttggggaggatgaggtggaggtgctcaactggctggctgaggttgaggacaagctcagttcagtgttcgtaaaggatttcaaacaggatgtcctgcacaggcagcatgctgaccacctggctttaaatgaagaaattgttaatagaaagaagaatgtagatcaagctattaaaaatggtcaggctcttctaaaacaaaccacaggtgaggaggtgttacttatccaggaaaaactagatggtataaagactcgttacgcagacatcacagttactagctccaaggccctcagaactttagagcaagcccggcagctggccaccaagttccagtctacttatgaggaactgaccgggtggctgagggaggtggaggaggagctggcaaccagtggaggacagtctcccacaggggaacagataccccagtttcagcagagacagaaggaattaaagaaggaggtcatggagcacaggctggtgttggacacagtgaatgaggtgagccgtgctctcttagagctggtgccctggagagccagagaagggctggataaacttgtgtccgatgctaacgagcagtacaaactagtcagtgacactattggacaaagggtggatgaaattgatgctgctattcagagatcacaacagtatgagcaagctgccgatgcagaactagcttgggttgctgaaacaaaacggaaactgatggctctgggtccaattcgcctggaacaggaccagaccacagctcagcttcaggtacagaaggctttctccattgacattattcgacacaaagattcaatggatgaactcttcagtcaccgtagtgaaatctttggcacatgtggggaggagcaaaaaactgtattacaggaaaagacagagtctctaatacagcaatatgaagccattagcctactcaattcagagcgttatgcccgcctagagcgggcccaggtcttagtaaaccagttttgggaaacttatgaagagctcagcccctggattgaggaaactcgggcactaatagcacagttaccctctccagccattgatcatgagcagctcaggcagcaacaagaggaaatgaggcaattaagggaatctattgctgaacacaaacctcatattgacaaactactaaagataggcccacaactaaaggaattaaaccctgaggaaggggaaatggtggaagaaaaataccagaaagcagaaaacatgtatgcccaaataaaggaggaggtgcgccagcgagccctggctctggatgaagccgtgtcccagtccacacaggtatgtgttttcatgataaaattgagcctatgttggagacactggagaatctttcctctcgcctgcgtatgccaccactgatccctgctgaagtagacaagatcagagagtgcatcagtgacaataagagtgccaccgtggagctagaaaaactgcagccatcctttgaggccttgaagcgccgtggagaggagcttattggacgatctcagggagcagacaaggatctggctgcaaaagaaatccaggataaattggatcaaatggtattcttctgggaggacatcaaagctcgggctgaagaacgagaaatcaaatttcttgatgtccttgaattagcagagaagttctggtatgacatggcagctctcctgaccaccatcaaagacacccaggatattgtccatgacttggaaagcccaggcattgatccttccatcatcaaacaacaggttgaagctgctgagactattaaggaagagacagatggtctgcatgaagagctggagtttattcggatccttggagcagatttgatttttgcctgtggagaaactgagaagcctgaagtgaggaagagcattgatgagatgaataatgcttgggagaacttaaacaaaacatggaaagagaggctagaaaaacttgaggatgctatgcaagctgctgtgcagtatcaggacactcttcaggctatgtttgactggctagataacactgtgattaaactctgcaccatgccccctgttggcactgacctcaatactgttaaagatcagttaaatgaaatgaaggagttcaaagtagaagtttaccaacagcaaattgagatggagaagcttaatcaccagggtgaactgatgttaaagaaagctactgatgagacggacagagacattatacgagaaccactgacagaactcaaacacctctgggagaacctgggtgagaaaattgcccaccgacagcacaaactagaaggggctctgttggcccttggtcagttccagcatgccttagaggaactaatgagttggctgactcataccgaagagttgttagatgctcagagaccaataagtggagacccaaaagtcattgaagttgagctcgcaaagcaccatgtcctaaaaaatgatgttttggctcatcaagccacagtggaaacagtcaacaaagctggcaatgagcttcttgaatccagtgctggagatgatgccagcagcttaaggagccgtttggaagccatgaaccaatgctgggagtcagtgttacagaaaacagaggagagggagcagcagcttcagtcaactctgcagcaggcccagggcttccacagtgaaattgaagatttcctcttggaacttactagaatggagagccagctttctgcatctaagcccacaggaggacttcctgaaactgctagggaacagcttgatacacatatggaactctattcccagctgaaagccaaggaagagacttataatcaactacttgacaagggcagactcatgcttctaagccgtgacgactctgggtctggctccaagacagaacagagtgtagcacttttggagcagaagtggcatgtggtcagcagtaagatggaagaaagaaagtcaaagctggaagaggccctcaacttggcaacagaattccagaattccctacaagaatttatcaactggctcactctagcagagcagagtttaaacatcgcttctccaccaagcctgattctaaatactgtcctttcccagatagaagagcacaaggtttttgctaatgaagtaaatgctcatcgagaccagatcattgagctggatcaaactgggaatcaattaaagttccttagccaaaagcaggatgttgttctgatcaagaatttgttggtgagcgtgcagtctcgatgggagaaggttgtccagcgatctattgaaagagggcgatcactagatgatgccaggaagcgggcaaaacaattccatgaagcttggaaaaaactgattgactggctagaagatgcagagagtcacctggactcagaactagagatatccaatgacccagacaaaattaaacttcagctttctaagcataaggagtttcagaagactcttggtggcaagcagcctgtgtatgataccacaattagaactggcagagcactgaaagaaaagactttgcttcccgaagatagtcagaaacttgacaatttcctaggagaagtcagagacaaatgggatactgtttgtggcaagtctgtggagcggcagcacaagttggaggaagccctgctcttttcgggtcagttcatggatgctttgcaggcattggttgactggttatacaaggtggagccacagctggctgaggaccagcccgtgcacggggaccttgacctcgtcatgaacctcatggatgcacacaaggttttccagaaggaactgggaaagcgaacaggaaccgttcaggtcctgaagcggtcaggccgagagctgattgagaatagtcgagatgacaccacttgggtaaaaggacagctccaggaactgagcactcgctgggacactgtctgtaaactctctgtttccaaacaaagccggcttgagcaggccttaaaacaagcggaagtgtttcgagacacagtccacatgctgttggagtggctttctgaagcagagcaaacgcttcgctttcggggagcacttcctgatgacacagaggccctgcagtctctcattgacacccataaggaattcatgaagaaagtagaagaaaagcgagtggacgttaactcagcagtagccatgggagaagtcatcctggctgtctgccaccccgattgcatcacaaccatcaaacactggatcaccatcatccgagctcgcttcgaggaggtcctgacatgggctaagcagcaccagcagcgtcttgaaacggccttgtcagaactggtggctaatgctgagctcctggaagaacttctggcatggatccagtgggctgagaccaccctcattcagcgggatcaggagccaatcccgcagaacattgaccgagttaaagcccttatcgctgagcatcagacatttatggaggagatgactcgcaaacagcctgacgtggaccgggtcaccaagacatacaaaaggaaaaacatagagcctactcacgcgcctttcatagagaaatcccgcagcggaggcaggaaatccctaagtcagccaacccctcctcccatgccaatcctttcacagtctgaagcaaaaaacccacggatcaaccagctttctgcccgctggcagcaggtgtggctgttagcactggagcggcaaaggaaactgaatgatgccttggatcggctggaggagttgaaagaatttgccaactttgactttgatgtctggaggaaaaagtatatgcgttggatgaatcacaaaaagtctcgagtgatggatttcttccggcgcattgataaggaccaggatgggaagataacacgtcaggagtttatcgatggcattttagcatccaagttccccaccaccaagttagagatgactgctgtggctgacattttcgaccgagatggggatggttacattgattattatgaatttgtggctgctcttcatcccaacaaggatgcgtatcgaccaacaaccgatgcagataaaatcgaagatgaggttacaagacaagtggctcagtgcaaatgtgcaaaaaggtttcaggtggagcagatcggagagaataaataccggtttggggattctcagcagttgcggctggtccgtattctgcgcagcaccgtgatggttcgcgttggtggaggatggatggccttggatgaatttttagtgaaaaatgatccctgccgagcacgaggtagaactaacattgaacttagagagaaattcatcctaccagagggagcatcccagggaatgacccccttccgctcacggggtcgaaggtccaaaccatcttcccgggcagcttcccctactcgttccagctccagtgctagtcagagtaaccacagctgtacatccatgccatcttctccagccaccccagccagtggaaccaaggttatcccatcatcaggtagcaagttgaaacgaccaacaccaacttttcattctagtcggacatcccttgctggtgataccagcaatagttcttccccggcctccacaggtgccaaaactaatcgggcagaccctaaaaagtctgccagtcgccctgggagtcgggctgggagtcgagccgggagtcgagccagcagccggcgaggaagtgacgcttctgactttgacctcttagagacgcagtctgcttgttccgacacttcagaaagcagcgctgcagggggccaaggcaactccaggagagggctaaacaaaccttccaaaatcccaaccatgtctaagaagaccaccactgcctcccccaggactccaggtcccaagcgataacactgtctaagcacccccaagccactatccactttgaatcctgctccatacattgggtgtatatttattctgaacgggagaagttatattgttaaaagtgtaaaagaataattgtgttatgaagctgccttattttttttctttttgtaagttactattttcatgtgaatatttatgtagataaaatttgcctcctggtaaccctgtaatggatggggcccagaaatgaaatatttgagaaaaacaagtgaaaaggtcaagatacaaatgtgtattaaaaaaaaaaaagcctattaatagggtttctgcgcggtgcagggttgtaaacctgctttatcttttaggattattcctaaatgcatcttctttataaacttgacttgctatctcagcaagataaattatattaaaaaaataagaatcctgcagtgtttaaggaactctttttttgtaaatcacggacacctcaattagcaagaactgaggggagggctttttccattgtttaatgttttgtgatttttagctaaagagagggaacctcatctaagtaacatttgcacatgatacagcaaaaggagttcattgcaatactgtctttggatattgtttcagtactgggtgtttaaaggacaaatagctgctagaattcaggggtaaatgtaagtgttcagaaaacgtcagaacatttggggttttaaactgatttgttgctccctatccagcctagacaccagtaactcttgtgttcaccaggacccagacccttggcaagggataggctcgttggtgacattgtgaatttcagatttgttttatccactttttttgctatttatttaaatggtcgatcaacttcccacaaactgaggaatgaattccacgagcctgttctgaaaatgtggacgtaagacaaacacgtgctcgtcctttaatggagttcaccagcacacttgttaaccagtcctgtttgctttcgtctttttttgtgcgtaataaagtcaactgaccaagtgaccatg

SEQ ID NO: 2699 - protein, 3847 aa, Homo sapiens
MKVRKHINDLYEDLRDGHNLISLLEVLSGIKLPREKGRMRFHRLQNVQIALDFLKQRQVKLVNIRNDDITDGNPKLTLGLIWTIILHFQISDIYISGESGDMSAKEKLLLWTQKVTAGYTGIKCTNFSSCWSDGKMFNALIHRYRPDLVDMERVQIQSNRENLEQAFEVAERLGVTRLLDAEDVDVPSPDEKSVITYVSSIYDAFPKVPEGGEGISATEVDSRWQEYQSRVDSLIPWIKQHTILMSDKTFPQNPVELKALYNQYIHFKETEILAKEREKGRIEELYKLLEVWIEFGRIKLPQGYHPNDVEEEWGKLIIEMLEREKSLRPAVERLELLLQIANKIQNGALNCEEKLTLAKNTLQADAAHLESGQPVQCESDVIMYIQECEGLIRQLQVDLQILRDENYYQLEELAFRVMRLQDELVTLRLECTNLYRKGHFTSLELVPPSTLTTTHLKAEPLTKATHSSSTSWFRKPMTRAELVAISSSEDEGNLRFVYELLSWVEEMQMKLERAEWGNDLPSVELQLETQQHIHTSVEELGSSVKEARLYEGKMSQNFHTSYAETLGKLETQYCKLKETSSFRMRHLQSLHKFVSRATAELIWLNEKEEEELAYDWSDNNSNISAKRNYFSELTMELEEKQDVFRSLQDTAELLSLENHPAKQTVEAYSAAVQSQLQWMKQLCLCVEQHVKENTAYFQFFSDARELESFLRNLQDSIKRKYSCDHNTSLSRLEDLLQDSMDEKEQLIQSKSSVASLVGRSKTIVQLKPRSPDHVLKNTISVKAVCDYRQIEITICKNDECVLEDNSQRTKWKVISPTGNEAMVPSVCFLIPPPNKDAIEMASRVEQSYQKVMALWHQLHVNTKSLISWNYLRKDLDLVQTWNLEKLRSSAPGECHQIMKNLQAHYEDFLQDSRDSVLFSVADRLRLEEEVEACKARFQHLMKSMENEDKEETVAKMYISELKNIRLRLEEYEQRVVKRIQSLASSRTDRDAWQDNALRIAEQEHTQEDLQQLRSDLDAVSMKCDSFLHQSPSSSSVPTLRSELNLLVEKMDHVYGLSTVYLNKLKTVDVIVRSIQDAELLVKGYEIKLSQEEVVLADLSALEAHWSTLRHWLSDVKDKNSVFSVLDEEIAKAKVVAEQMSRLTPERNLDLERYQEKGSQLQERWHRVIAQLEIRQSELESIQEVLGDYRACHGTLIKWIEETTAQQEMMKPGQAEDSRVLSEQLSQQTALFAEIERNQTKLDQCQKFSQQYSTIVKDYELQLMTYKAFVESQQKSPGKRRRMLSSSDAITQEFMDLRTRYTALVTLTTQHVKYISDALRRLEEEEKVVEEEKQEHVEKVKELLGWVSTLARNTQGKATSSETKESTDIEKAILEQQVLSEELTTKKEQVSEAIKTSQIFLAKHGHKLSEKEKKQISEQLNALNKAYHDLCDGSANQLQQLQSQLAHQTEQKTLQKQQNTCHQQLEDLCSWVGQAERALAGHQGRTTQQDLSALQKNQSDLKDLQDDIQNRATSFATVVKDIEGFMEENQTKLSPRELTALREKLHQAKEQYEALQEETRVAQKELEEAVTSALQQETEKSKAAKELAENKKKIDALLDWVTSVGSSGGQLLTNLPGMEQLSGASLEKGALDTTDGYMGVNQAPEKLDKQCEMMKARHQELLSQQQNFILATQSAQAFLDQHGHNLTPEEQQMLQQKLGELKEQYSTSLAQSEAELKQVQTLQDELQKFLQDHKEFESWLERSEKELENMHKGGSSPETLPSLLKRQGSFSEDVISHKGDLRFVTISGQKVLDMENSFKEGKEPSEIGNLVKDKLKDATERYTALHSKCTRLGSHLNMLLGQYHQFQNSADSLQAWMQACEANVEKLLSDTVASDPGVLQEQLATTKQLQEELAEHQVPVEKLQKVARDIMEIEGEPAPDHRHVQETTDSILSHFQSLSYSLAERSSLLQKAIAQSQSVQESLESLLQSIGEVEQNLEGKQVSSLSSGVIQEALATNMKLKQDIARQKSSLEATREMVTRFMETADSTTAAVLQGKLAEVSQRFEQLCLQQQEKESSLKKLLPQAEMFEHLSGKLQQFMENKSRMLASGNQPDQDITHFFQQIQELNLEMEDQQENLDTLEHLVTELSSCGFALDLCQHQDRVQNLRKDFTELQKTVKEREKDASSCQEQLDEFRKLVRTFQKWLKETEGSIPPTETSMSAKELEKQIEHLKSLLDDWASKGTLVEEINCKGTSLENLIMEITAPDSQGKTDLTEIQCDMSDVNLKYEKLGGVLHERQESLQAILNRMEEVHKEANSVLQWLESKEEVLKSMDAMSSPTKTETVKAQAESNKAFLAELEQNSPKIQKVKEALAGLLVTYPNSQEAENWKKIQEELNSRWERATEVTVARQRQLEESASHLACFQAAESQLRPWLMEKELMMGVLGPLSIDPNMLNAQKQQVQFMLKEFEARRQQHEQLNEAAQGILTGPGDVSLSTSQVQKELQSINQKWVELTDKLNSRSSQIDQAIVKSTQYQELLQDLSEKVRAVGQRLSVQSAISTQPEAVKQQLEETSEIRSDLEQLDHEVKEAQTLCDELSVLIGEQYLKDELKKRLETVALPLQGLEDLAADRINRLQAALASTQQFQQMFDELRTWLDDKQSQQAKNCPISAKLERLQSQLQENEEFQKSLNQHSGSYEVIVAEGESLLLSVPPGEEKRTLQNQLVELKNHWEELSKKTADRQSRLKDCMQKAQKYQWHVEDLVPWIEDCKAKMSELRVTLDPVQLESSLLRSKAMLNEVEKRRSLLEILNSAADILINSSEADEDGIRDEKAGINQNMDAVTEELQAKTGSLEEMTQRLREFQESFKNIEKKVEGAKHQLEIFDALGSQACSNKNLEKLRAQQEVLQALEPQVDYLRNFTQGLVEDAPDGSDASQLLHQAEVAQQEFLEVKQRVNSGCVMMENKLEGIGQFHCRVREMFSQLADLDDELDGMGAIGRDTDSLQSQIEDVRLFLNKIHVLKLDIEASEAECRHMLEEEGTLDLLGLKRELEALNKQCGKLTERGKARQEQLELTLGRVEDFYRKLKGLNDATTAAEEAEALQWVVGTEVEIINQQLADFKMFQKEQVDPLQMKLQQVNGLGQGLIQSAGKDCDVQGLEHDMEEINARWNTLNKKVAQRIAQLQEALLHCGKFQDALEPLLSWLADTEELIANQKPPSAEYKVVKAQIQEQKLLQRLLDDRKATVDMLQAEGGRIAQSAELADREKITGQLESLESRWTELLSKAAARQKQLEDILVLAKQFHETAEPISDFLSVTEKKLANSEPVGTQTAKIQQQIIRHKALEEDIENHATDVHQAVKIGQSLSSLTSPAEQGVLSEKIDSLQARYSEIQDRCCRKAALLDQALSNARLFGEDEVEVLNWLAEVEDKLSSVFVKDFKQDVLHRQHADHLALNEEIVNRKKNVDQAIKNGQALLKQTTGEEVLLIQEKLDGIKTRYADITVTSSKALRTLEQARQLATKFQSTYEELTGWLREVEEELATSGGQSPTGEQIPQFQQRQKELKKEVMEHRLVLDTVNEVSRALLELVPWRAREGLDKLVSDANEQYKLVSDTIGQRVDEIDAAIQRSQQYEQAADAELAWVAETKRKLMALGPIRLEQDQTTAQLQVQKAFSIDIIRHKDSMDELFSHRSEIFGTCGEEQKTVLQEKTESLIQQYEAISLLNSERYARLERAQVLVNQFWETYEELSPWIEETRALIAQLPSPAIDHEQLRQQQEEMRQLRESIAEHKPHIDKLLKIGPQLKELNPEEGEMVEEKYQKAENMYAQIKEEVRQRALALDEAVSQSTQVCVFMIKLSLCWRHWRIFPLACVCHH

SEQ ID NO: 2700 - DNA, 17285 bp, Homo sapiens
ggcgcgatgtcggctcactacaacctctgcctcctggattcaagcaattctgtacctcagcctcccgagtagctgtgattacagatgaacgggaccgggttcagaagaaaacgttcaccaagtgggtcaacaagcacttaatgaaggtccgcaagcacatcaatgatctttatgaagatctgcgggatggccataacctgatctctctgttggaggtcctctcaggcatcaaactgccccgggagaagggcaggatgcgttttcataggctgcagaatgtgcagattgccctggacttcctaaagcagcgacaggtgaaactagtgaatattcgcaatgatgacatcacagatggcaaccccaagttgaccctgggtctgatctggaccattattttgcatttccagatctctgacatctacattagtggagaatcaggggatatgtcagccaaggagaaactactcctgtggacccagaaggtgacagctggttacacaggaatcaaatgcaccaacttttcctcctgctggagtgatgggaagatgttcaatgcactcattcaccgataccgacccgatctagtagacatggagagggtgcaaatccaaagtaaccgagagaatctggaacaggcttttgaagtggcagaaagactgggggtcactcgcctgctggatgcagaagatgtggatgtgccatctccagatgaaaagtctgtaatcacttatgtgtcttcgatttatgatgccttccctaaagttcctgagggtggagaagggatcagtgctacggaagtggactccaggtggcaagaataccaaagccgagtggactccctcattccctggatcaaacagcatacaatactgatgtcagataaaacttttccccaaaaccctgttgaactaaaggcactttataaccaatatatacacttcaaagaaacagaaattctggccaaggagagagaaaaaggaagaattgaggaattatataaattactagaggtgtggattgaatttggccgaattaaactgcctcaaggttatcaccctaatgatgtggaagaagagtggggaaagctcatcatagagatgctggaacgagagaaatcacttcggccggctgtggagaggctggaattgctgctacagattgcaaacaaaatccagaatggtgctttgaactgtgaagaaaaactgacactagctaagaatacactgcaggctgatgctgctcacctggaatcaggacaaccggtacaatgtgagtcagatgtcattatgtacattcaggagtgtgaaggtctcatcaggcagctgcaggtggatctccagatcctgcgggatgagaattactaccagctagaagagctggcttttagggtcatgcgtcttcaggatgagctggtcaccttgcgtctagagtgtacaaacctgtaccggaagggtcatttcacttcacttgaattggttccaccctctactttaaccaccactcatctgaaagcagaacccttaaccaaggcaacccattcttcttctacctcctggttccgaaagcctatgactcgggctgaacttgtggccatcagctcctctgaagatgaaggcaatctccgatttgtgtatgaactactgtcttgggtagaagagatgcagatgaaactggagcgagcagagtggggcaatgacctgcctagtgtggagttgcagctagaaacacagcagcacatccatacgagtgtagaagagctgggctcaagtgtcaaggaggccaggttgtatgagggaaagatgtcccagaatttccataccagctatgctgaaactcttggaaagctggagacacagtattgtaaattgaaggaaacttctagcttccggatgaggcaccttcagagcctgcataaatttgtttccagagctacagctgagttgatctggttgaatgagaaggaggaggaggaactagcatatgactggagtgacaacaattccaatatctcagccaagagaaattacttctctgagttgacaatggaactggaggagaaacaggatgtgtttcgttctctacaagatacagcagaactactttcacttgagaaccacccagccaagcagacagtggaggcttacagtgctgctgtccagtcccagttgcagtggatgaagcagctgtgcctgtgtgttgagcagcatgtgaaagagaatactgcttattttcagttcttcagtgatgcacgagagctggagtcattcttgaggaacctccaagattccattaaacgaaaatattcctgtgaccacaacaccagcttatcccgccttgaagacctgctccaggactccatggatgaaaaggagcagcttatacagtccaagagttccgttgccagtctcgttgggagatcaaaaaccatcgttcagctaaaaccacgcagtccagaccatgtgttaaagaacaccatttctgtcaaggctgtctgtgactacaggcagatcgagattactatttgcaaaaatgatgaatgtgtgctagaagataattctcagcggaccaaatggaaagtgatcagccccacagggaacgaggcaatggtgccgtcagtctgcttcctcatccccccacccaataaggatgccattgagatggccagcagggtcgaacaatcttatcagaaggttatggccctttggcatcagctgcatgttaacaccaaaagccttatctcttggaactatctgcgtaaagaccttgaccttgtacagacctggaacctagaaaagcttcgatcctcagcaccaggggagtgccatcagattatgaagaaccttcaggcccactatgaagactttctgcaggatagtcgtgactctgtgctgttctcagtggctgatcgcttgcgcttggaagaggaggtggaagcttgtaaagcccgcttccagcacctgatgaagtccatggagaatgaggacaaagaggagactgtggccaagatgtacatttcagagttgaagaacatccggctacgcctggaggagtatgaacagagggtggtcaaacgaattcagtctctagccagctctaggactgacagagatgcctggcaggacaatgcattaaggattgcagagcaagagcacacccaggaggatttacagcaattgaggtcagacttggatgcagtttctatgaaatgtgacagctttctccatcagtctccatctagttcaagtgtcccaactctgcgctcagaactgaatctgctggtggagaagatggaccatgtctatggtctctctactgtatatctgaataagttaaagacagttgatgttatagtacgtagcatacaggatgctgaactcttggtcaaaggttatgagattaagctgagtcaagaagaagtagtactggcagatctctcagctctggaggcccattggtcgacattacggcactggcttagtgatgtgaaggacaagaattcagtgttttcagtcctggatgaggaaattgccaaggccaaggtagtggcagagcagatgagtcgtctgacaccagagcgaaatctggatttggagcgctatcaggaaaaaggctcccagctgcaggagcgttggcaccgagtcattgcccagctcgagattcgccaatctgagctagaaagtatccaggaagttctgggagattaccgagcctgccatggaactctcatcaagtggattgaggaaaccactgcccagcaggaaatgatgaagccaggccaggcagaggatagcagagtgctttcggagcagctcagccagcagacggccctatttgcagaaattgagagaaatcagacaaaactggatcaatgtcaaaaattttcccagcagtactctactattgtaaaggactatgaattgcaactgatgacatacaaggcctttgtggaatcgcagcagaaatcccctggcaagcgccgtcgcatgctttcctcttcagatgccatcactcaagagttcatggacttaaggactcgctacacggcattggtgactttaacaactcagcacgtgaaatacatcagtgatgcactccggcgtctggaggaggaggagaaagtggtagaagaggagaaacaagaacatgtggagaaggttaaagaacttttgggctgggtgtctaccctagcgaggaatacacaaggaaaagctacctcatccgagaccaaagaatcaacagacattgaaaaagctattttggaacagcaggttctgtcagaagagctgacaacaaagaaagaacaagtctctgaagctattaaaacatcacagatcttcttggccaagcatggtcataagctctcagaaaaagagaagaaacaaatatctgagcaattgaatgccctaaacaaggcttaccatgacctttgtgatggttctgcaaatcagcttcagcagcttcagagccagttggctcaccagacagaacaaaagaccctgcagaaacaacaaaatacctgtcaccagcaactggaggatctttgcagttgggtaggacaggcagaaagagcactggcaggccaccaaggcagaaccacccagcaggatctctctgctttgcagaagaaccaaagtgacttgaaggatttacaggatgacattcagaatcgtgccacctcatttgccactgttgtcaaggacattgaggggttcatggaagagaatcagaccaagctgagcccacgtgagttgacagctcttcgggaaaagcttcatcaggctaaggagcaatatgaggcgctccaggaagagacacgtgtggcccagaaggaactggaggaagcagtgacctccgccttacagcaggagactgaaaagagtaaagcagcaaaggaactggcagagaacaagaagaagatcgatgctctcctggattgggtaacttcagtaggatcatctggtggacagctgctgaccaaccttccaggaatggagcagctctcgggagctagcttggagaaaggagccttggacaccactgatggttacatgggggtgaatcaagccccagagaaactggacaagcaatgtgagatgatgaaggcccgtcaccaagaattgctgtcccagcagcaaaatttcattctggccacccagtcagctcaggccttcttggatcagcatggccacaatctcacacctgaggagcaacagatgctgcaacagaagctgggagagctaaaggaacaatactctacttccctggcccaatcagaggcagaactgaagcaggtgcagacacttcaggatgagttgcagaaatttctgcaggatcataaagagtttgaaagctggttggaacgatccgagaaagagctggagaacatgcataagggaggcagcagccccgagacccttccctccctgctaaagcggcaaggaagcttctcagaggatgtcatttcccacaaaggagacttgagatttgtgactatctcaggacagaaagtcttggacatggaaaacagttttaaggaaggcaaagaaccatcagaaattggaaacttagtaaaggacaagttgaaggatgcaacagaaagatacactgctctccactcaaagtgtacacgattaggatctcacctgaatatgctgttaggccagtatcatcaattccaaaacagtgctgacagcctgcaggcctggatgcaggcttgtgaggccaacgtggagaagctcctctcagatactgttgcctctgaccctggagttctccaggagcagcttgcaacaacaaagcagttgcaggaggaattggctgagcaccaagtacctgtggaaaaactccaaaaagtagctcgtgacataatggaaattgaaggggagccagccccagaccacaggcatgttcaagaaactacagattccatactcagccacttccaaagcctctcctatagcctggctgagcgatcttctctgctgcagaaagcaattgcccaatctcagagtgtccaggaaagcctggagagcctgttgcagtctattggggaagttgaacaaaacctggaagggaagcaggtgtcatcactctcatcaggagtcatccaggaagccttagccacaaatatgaaattgaagcaggacattgctcggcaaaagagcagcttggaggccacccgtgagatggtgacccgattcatggagacagcagacagtactacagcagcagtgctgcagggcaaactggcagaggtgagccagcggttcgaacagctctgtctacagcagcaagaaaaggagagctccctaaagaagcttctaccccaggcagagatgtttgaacacctctctggtaagctgcagcagttcatggaaaacaaaagtcggatgctggcctctggaaatcagccagatcaagatattacacatttcttccaacagatccaggagctcaatttggaaatggaagaccaacaggagaacctagatactcttgagcacctggtcactgaactgagctcttgtggctttgcgctggacttgtgccagcatcaggacagggtacagaatctaagaaaagacttcacagagctacagaagacagttaaagagagagagaaagatgcatcatcttgccaggaacagttggatgaattccggaagctggtcaggaccttccagaaatggttgaaagaaactgaagggagtattccacctacggaaacttctatgagtgctaaagagttagaaaagcagattgaacacctgaagagtctactagatgactgggcaagtaagggaactctggtggaagaaatcaattgcaaaggtacttctttagaaaatctcatcatggaaatcacagcacctgattcccaaggcaagacagatctgacggagatccagtgtgacatgtcagatgtaaacttgaagtatgagaaactagggggagtacttcatgaacgccaggaaagccttcaggctatcctcaacagaatggaggaggttcacaaggaggcaaactctgtgctgcagtggctggaatcaaaagaggaagtcctgaaatccatggatgccatgtcatctccaaccaagacagaaacagtgaaagcccaagctgaatctaacaaggccttcctggctgagttggaacagaattctccaaaaattcaaaaagtaaaggaagccctggctggattactggtgacatatcccaactcacaggaagcagaaaattggaagaaaattcaggaagaactcaattcccgatgggaaagggccactgaggttactgtggctcggcaaaggcagctagaggaatctgcaagtcatctggcctgcttccaggctgcagaatcccagctccggccgtggctgatggagaaagaactgatgatgggagtgctggggcccctgtctattgaccccaacatgttgaatgcacaaaagcaacaggtccagtttatgctaaaggaatttgaagcacgcaggcaacagcatgagcaactgaatgaggcagctcagggcatcctaacaggccctggagatgtctctctgtccaccagccaagtacagaaagaactccagagcatcaatcagaaatgggttgagctgactgacaaactcaactcccgttccagccaaattgaccaagctattgttaagagcacccagtaccaggaactgctccaggacttatcagagaaggtgagggcagttggacaacggctgagtgtccagtcagctatcagcacccaaccagaggctgtaaagcagcaattggaagagaccagtgaaattcgatctgacttggagcagttagaccacgaggttaaggaggctcagacactgtgcgatgaactctcagtgctcattggtgagcagtacctcaaggatgaactgaagaagcgtttggagacagttgccctgcctctccaaggtttagaagaccttgcagccgatcgcattaacagactccaggcagctcttgccagcacccagcagttccagcaaatgtttgatgagttgaggacctggttggatgataaacaaagccagcaagcaaaaaactgcccaatttctgcaaaattggagcggctacagtctcagctacaggagaatgaagagtttcagaaaagtcttaatcaacacagtggctcctatgaggtgattgtggctgaaggggaatctctacttctttctgtacctcctggagaagagaaaaggactctacaaaaccagttggttgagctcaaaaaccattgggaagagcttagtaaaaaaactgcagacagacaatccaggctcaaggattgtatgcagaaagctcagaaatatcagtggcatgtggaagaccttgtgccatggatagaagattgtaaagctaagatgtctgagttgcgagtcactctggatccagtgcagctagagtccagtctcctaagatcaaaggctatgctgaatgaggtggagaagcgccgctccctgctggaaatattgaatagtgctgctgacattctgatcaattcttcagaagcagatgaggatggaatccgggatgagaaggctgggatcaaccagaacatggatgctgttacagaagagctgcaggccaaaacagggtcactcgaagaaatgactcagaggctcagggagttccaggaaagctttaagaatattgaaaagaaggttgaaggagccaaacaccaacttgagatctttgatgctctgggttctcaagcctgtagcaacaagaacctggagaagctaagagctcaacaggaagtgctgcaggccctagagcctcaggtagactatctgaggaactttactcagggtctggtagaagatgccccagatggatctgatgcttctcaacttctccaccaagctgaggtcgcccagcaagagttcctcgaagttaagcaaagagtgaacagtggttgtgtgatgatggaaaacaagctggaggggattggccagtttcactgccgggtccgagagatgttctctcaattggcagacctggatgatgagctagatggcatgggtgctattggcagagacactgatagcctccagtcccaaatcgaggatgtccggctattccttaacaaaattcacgtcctcaaattagacatagaggcctctgaagcagagtgtcgacatatgctagaagaagaggggactctggatttgttaggtctcaaaagggagctagaagccctgaacaaacagtgtggcaaactgacagagagggggaaagctcgtcaggaacagctggaactgacactaggccgtgtagaggacttctacaggaaattgaaaggactcaatgacgcgaccacagcagcagaggaggcagaggccctccagtgggtagtggggaccgaagtggaaatcatcaaccaacaattagcagattttaaaatgtttcagaaagaacaagtggatcctcttcagatgaaattgcagcaggtgaatggacttggccagggattaattcagagtgcaggaaaagactgtgatgtacagggtttagaacatgacatggaagagatcaatgctcgatggaatacattgaataaaaaggtcgcacaaagaattgcacagctacaggaagctttgttgcattgtgggaagtttcaagatgccttggagccattgctcagctggttggcagataccgaggagctcatagccaatcagaaacctccatctgctgagtataaagtggtgaaagcacagatccaagaacagaagttgctccagcggctcctagatgatcgaaaggccacagtagacatgcttcaagcagaaggaggcagaatagcccagtcagcagagctggctgatagagagaaaatcactggacagctggagagtcttgaaagtagatggactgaactactcagtaaggcagcagccaggcaaaaacagctggaagacatcctggttctggccaaacagttccatgagacagctgagcctatttctgacttcttatctgtcacagagaaaaagcttgctaactcagaacctgttggcactcagactgccaaaatacagcagcagatcattcggcacaaggctctggaagaagacatagaaaaccatgcaacagatgtgcaccaggcagtcaaaattgggcagtccctctcctccctgacatctcctgcagaacagggtgtgctgtcagaaaagatagactcattgcaggcccgatacagtgaaattcaagaccgctgttgtcggaaggcagccctacttgaccaagctctgtctaatgctaggctgtttggggaggatgaggtggaggtgctcaactggctggctgaggttgaggacaagctcagttcagtgttcgtaaaggatttcaaacaggatgtcctgcacaggcagcatgctgaccacctggctttaaatgaagaaattgttaatagaaagaagaatgtagatcaagctattaaaaatggtcaggctcttctaaaacaaaccacaggtgaggaggtgttacttatccaggaaaaactagatggtataaagactcgttacgcagacatcacagttactagctccaaggccctcagaactttagagcaagcccggcagctggccaccaagttccagtctacttatgaggaactgaccgggtggctgagggaggtggaggaggagctggcaaccagtggaggacagtctcccacaggggaacagataccccagtttcagcagagacagaaggaattaaagaaggaggtcatggagcacaggctggtgttggacacagtgaatgaggtgagccgtgctctcttagagctggtgccctggagagccagagaagggctggataaacttgtgtccgatgctaacgagcagtacaaactagtcagtgacactattggacaaagggtggatgaaattgatgctgctattcagagatcacaacagtatgagcaagctgccgatgcagaactagcttgggttgctgaaacaaaacggaaactgatggctctgggtccaattcgcctggaacaggaccagaccacagctcagcttcaggtacagaaggctttctccattgacattattcgacacaaagattcaatggatgaactcttcagtcaccgtagtgaaatctttggcacatgtggggaggagcaaaaaactgtattacaggaaaagacagagtctctaatacagcaatatgaagccattagcctactcaattcagagcgttatgcccgcctagagcgggcccaggtcttagtaaaccagttttgggaaacttatgaagagctcagcccctggattgaggaaactcgggcactaatagcacagttaccctctccagccattgatcatgagcagctcaggcagcaacaagaggaaatgaggcaattaagggaatctattgctgaacacaaacctcatattgacaaactactaaagataggcccacaactaaaggaattaaaccctgaggaaggggaaatggtggaagaaaaataccagaaagcagaaaacatgtatgcccaaataaaggaggaggtgcgccagcgagccctggctctggatgaagccgtgtcccagtccacacaggtatgtgttttcatgataaaattgagcctatgttggagacactggagaatctttcctctcgcctgcgtatgccaccactgatccctgctgaagtagacaagatcagagagtgcatcagtgacaataagagtgccaccgtggagctagaaaaactgcagccatcctttgaggccttgaagcgccgtggagaggagcttattggacgatctcagggagcagacaaggatctggctgcaaaagaaatccaggataaattggatcaaatggtattcttctgggaggacatcaaagctcgggctgaagaacgagaaatcaaatttcttgatgtccttgaattagcagagaagttctggtatgacatggcagctctcctgaccaccatcaaagacacccaggatattgtccatgacttggaaagcccaggcattgatccttccatcatcaaacaacaggttgaagctgctgagactattaaggaagagacagatggtctgcatgaagagctggagtttattcggatccttggagcagatttgatttttgcctgtggagaaactgagaagcctgaagtgaggaagagcattgatgagatgaataatgcttgggagaacttaaacaaaacatggaaagagaggctagaaaaacttgaggatgctatgcaagctgctgtgcagtatcaggacactcttcaggctatgtttgactggctagataacactgtgattaaactctgcaccatgccccctgttggcactgacctcaatactgttaaagatcagttaaatgaaatgaaggagttcaaagtagaagtttaccaacagcaaattgagatggagaagcttaatcaccagggtgaactgatgttaaagaaagctactgatgagacggacagagacattatacgagaaccactgacagaactcaaacacctctgggagaacctgggtgagaaaattgcccaccgacagcacaaactagaaggggctctgttggcccttggtcagttccagcatgccttagaggaactaatgagttggctgactcataccgaagagttgttagatgctcagagaccaataagtggagacccaaaagtcattgaagttgagctcgcaaagcaccatgtcctaaaaaatgatgttttggctcatcaagccacagtggaaacagtcaacaaagctggcaatgagcttcttgaatccagtgctggagatgatgccagcagcttaaggagccgtttggaagccatgaaccaatgctgggagtcagtgttacagaaaacagaggagagggagcagcagcttcagtcaactctgcagcaggcccagggcttccacagtgaaattgaagatttcctcttggaacttactagaatggagagccagctttctgcatctaagcccacaggaggacttcctgaaactgctagggaacagcttgatacacatatggaactctattcccagctgaaagccaaggaagagacttataatcaactacttgacaagggcagactcatgcttctaagccgtgacgactctgggtctggctccaagacagaacagagtgtagcacttttggagcagaagtggcatgtggtcagcagtaagatggaagaaagaaagtcaaagctggaagaggccctcaacttggcaacagaattccagaattccctacaagaatttatcaactggctcactctagcagagcagagtttaaacatcgcttctccaccaagcctgattctaaatactgtcctttcccagatagaagagcacaaggtttttgctaatgaagtaaatgctcatcgagaccagatcattgagctggatcaaactgggaatcaattaaagttccttagccaaaagcaggatgttgttctgatcaagaatttgttggtgagcgtgcagtctcgatgggagaaggttgtccagcgatctattgaaagagggcgatcactagatgatgccaggaagcgggcaaaacaattccatgaagcttggaaaaaactgattgactggctagaagatgcagagagtcacctggactcagaactagagatatccaatgacccagacaaaattaaacttcagctttctaagcataaggagtttcagaagactcttggtggcaagcagcctgtgtatgataccacaattagaactggcagagcactgaaagaaaagactttgcttcccgaagatagtcagaaacttgacaatttcctaggagaagtcagagacaaatgggatactgtttgtggcaagtctgtggagcggcagcacaagttggaggaagccctgctcttttcgggtcagttcatggatgctttgcaggcattggttgactggttatacaaggtggagccacagctggctgaggaccagcccgtgcacggggaccttgacctcgtcatgaacctcatggatgcacacaaggttttccagaaggaactgggaaagcgaacaggaaccgttcaggtcctgaagcggtcaggccgagagctgattgagaatagtcgagatgacaccacttgggtaaaaggacagctccaggaactgagcactcgctgggacactgtctgtaaactctctgtttccaaacaaagccggcttgagcaggccttaaaacaagcggaagtgtttcgagacacagtccacatgctgttggagtggctttctgaagcagagcaaacgcttcgctttcggggagcacttcctgatgacacagaggccctgcagtctctcattgacacccataaggaattcatgaagaaagtagaagaaaagcgagtggacgttaactcagcagtagccatgggagaagtcatcctggctgtctgccaccccgattgcatcacaaccatcaaacactggatcaccatcatccgagctcgcttcgaggaggtcctgacatgggctaagcagcaccagcagcgtcttgaaacggccttgtcagaactggtggctaatgctgagctcctggaagaacttctggcatggatccagtgggctgagaccaccctcattcagcgggatcaggagccaatcccgcagaacattgaccgagttaaagcccttatcgctgagcatcagacatttatggaggagatgactcgcaaacagcctgacgtggaccgggtcaccaagacatacaaaaggaaaaacatagagcctactcacgcgcctttcatagagaaatcccgcagcggaggcaggaaatccctaagtcagccaacccctcctcccatgccaatcctttcacagtctgaagcaaaaaacccacggatcaaccagctttctgcccgctggcagcaggtgtggctgttagcactggagcggcaaaggaaactgaatgatgccttggatcggctggaggagttgaaagaatttgccaactttgactttgatgtctggaggaaaaagtatatgcgttggatgaatcacaaaaagtctcgagtgatggatttcttccggcgcattgataaggaccaggatgggaagataacacgtcaggagtttatcgatggcattttagcatccaagttccccaccaccaagttagagatgactgctgtggctgacattttcgaccgagatggggatggttacattgattattatgaatttgtggctgctcttcatcccaacaaggatgcgtatcgaccaacaaccgatgcagataaaatcgaagatgaggttacaagacaagtggctcagtgcaaatgtgcaaaaaggtttcaggtggagcagatcggagagaataaataccggtttggggattctcagcagttgcggctggtccgtattctgcgcagcaccgtgatggttcgcgttggtggaggatggatggccttggatgaatttttagtgaaaaatgatccctgccgagcacgaggtagaactaacattgaacttagagagaaattcatcctaccagagggagcatcccagggaatgacccccttccgctcacggggtcgaaggtccaaaccatcttcccgggcagcttcccctactcgttccagctccagtgctagtcagagtaaccacagctgtacatccatgccatcttctccagccaccccagccagtggaaccaaggttatcccatcatcaggtagcaagttgaaacgaccaacaccaacttttcattctagtcggacatcccttgctggtgataccagcaatagttcttccccggcctccacaggtgccaaaactaatcgggcagaccctaaaaagtctgccagtcgccctgggagtcgggctgggagtcgagccgggagtcgagccagcagccggcgaggaagtgacgcttctgactttgacctcttagagacgcagtctgcttgttccgacacttcagaaagcagcgctgcagggggccaaggcaactccaggagagggctaaacaaaccttccaaaatcccaaccatgtctaagaagaccaccactgcctcccccaggactccaggtcccaagcgataacactgtctaagcacccccaagccactatccactttgaatcctgctccatacattgggtgtatatttattctgaacgggagaagttatattgttaaaagtgtaaaagaataattgtgttatgaagctgccttattttttttctttttgtaagttactattttcatgtgaatatttatgtagataaaatttgcctcctggtaaccctgtaatggatggggcccagaaatgaaatatttgagaaaaacaagtgaaaaggtcaagatacaaatgtgtattaaaaaaaaaaaagcctattaatagggtttctgcgcggtgcagggttgtaaacctgctttatcttttaggattattcctaaatgcatcttctttataaacttgacttgctatctcagcaagataaattatattaaaaaaataagaatcctgcagtgtttaaggaactctttttttgtaaatcacggacacctcaattagcaagaactgaggggagggctttttccattgtttaatgttttgtgatttttagctaaagagagggaacctcatctaagtaacatttgcacatgatacagcaaaaggagttcattgcaatactgtctttggatattgtttcagtactgggtgtttaaaggacaaatagctgctagaattcaggggtaaatgtaagtgttcagaaaacgtcagaacatttggggttttaaactgatttgttgctccctatccagcctagacaccagtaactcttgtgttcaccaggacccagacccttggcaagggataggctcgttggtgacattgtgaatttcagatttgttttatccactttttttgctatttatttaaatggtcgatcaacttcccacaaactgaggaatgaattccacgagcctgttctgaaaatgtggacgtaagacaaacacgtgctcgtcctttaatggagttcaccagcacacttgttaaccagtcctgtttgctttcgtctttttttgtgcgtaataaagtcaactgaccaagtgaccatgaaaaggggctgtctggggctcctgttttttagctgctgttcttcagctccgaccatgttgctgtgtgattatctcaattggttttaattgaggcagaaactgaagctctaccaatgaactgtttagaaacaagacacacttttgtattaaaattgcttgcagtaacaaat

SEQ ID NO: 2701 - protein, 3847 aa, Homo sapiens; identical to SEQ ID NO: 2699

SEQ ID NO: 2702 - DNA, 17421 bp, Homo sapiens
ggcgcgatgtcggctcactacaacctctgcctcctggattcaagcaattctgtacctcagcctcccgagtagctgtgattacagatgaacgggaccgggttcagaagaaaacgttcaccaagtgggtcaacaagcacttaatgaaggtccgcaagcacatcaatgatctttatgaagatctgcgggatggccataacctgatctctctgttggaggtcctctcaggcatcaaactgccccgggagaagggcaggatgcgttttcataggctgcagaatgtgcagattgccctggacttcctaaagcagcgacaggtgaaactagtgaatattcgcaatgatgacatcacagatggcaaccccaagttgaccctgggtctgatctggaccattattttgcatttccagatctctgacatctacattagtggagaatcaggggatatgtcagccaaggagaaactactcctgtggacccagaaggtgacagctggttacacaggaatcaaatgcaccaacttttcctcctgctggagtgatgggaagatgttcaatgcactcattcaccgataccgacccgatctagtagacatggagagggtgcaaatccaaagtaaccgagagaatctggaacaggcttttgaagtggcagaaagactgggggtcactcgcctgctggatgcagaagatgtggatgtgccatctccagatgaaaagtctgtaatcacttatgtgtcttcgatttatgatgccttccctaaagttcctgagggtggagaagggatcagtgctacggaagtggactccaggtggcaagaataccaaagccgagtggactccctcattccctggatcaaacagcatacaatactgatgtcagataaaacttttccccaaaaccctgttgaactaaaggcactttataaccaatatatacacttcaaagaaacagaaattctggccaaggagagagaaaaaggaagaattgaggaattatataaattactagaggtgtggattgaatttggccgaattaaactgcctcaaggttatcaccctaatgatgtggaagaagagtggggaaagctcatcatagagatgctggaacgagagaaatcacttcggccggctgtggagaggctggaattgctgctacagattgcaaacaaaatccagaatggtgctttgaactgtgaagaaaaactgacactagctaagaatacactgcaggctgatgctgctcacctggaatcaggacaaccggtacaatgtgagtcagatgtcattatgtacattcaggagtgtgaaggtctcatcaggcagctgcaggtggatctccagatcctgcgggatgagaattactaccagctagaagagctggcttttagggtcatgcgtcttcaggatgagctggtcaccttgcgtctagagtgtacaaacctgtaccggaagggtcatttcacttcacttgaattggttccaccctctactttaaccaccactcatctgaaagcagaacccttaaccaaggcaacccattcttcttctacctcctggttccgaaagcctatgactcgggctgaacttgtggccatcagctcctctgaagatgaaggcaatctccgatttgtgtatgaactactgtcttgggtagaagagatgcagatgaaactggagcgagcagagtggggcaatgacctgcctagtgtggagttgcagctagaaacacagcagcacatccatacgagtgtagaagagctgggctcaagtgtcaaggaggccaggttgtatgagggaaagatgtcccagaatttccataccagctatgctgaaactcttggaaagctggagacacagtattgtaaattgaaggaaacttctagcttccggatgaggcaccttcagagcctgcataaatttgtttccagagctacagctgagttgatctggttgaatgagaaggaggaggaggaactagcatatgactggagtgacaacaattccaatatctcagccaagagaaattacttctctgagttgacaatggaactggaggagaaacaggatgtgtttcgttctctacaagatacagcagaactactttcacttgagaaccacccagccaagcagacagtggaggcttacagtgctgctgtccagtcccagttgcagtggatgaagcagctgtgcctgtgtgttgagcagcatgtgaaagagaatactgcttattttcagttcttcagtgatgcacgagagctggagtcattcttgaggaacctccaagattccattaaacgaaaatattcctgtgaccacaacaccagcttatcccgccttgaagacctgctccaggactccatggatgaaaaggagcagcttatacagtccaagagttccgttgccagtctcgttgggagatcaaaaaccatcgttcagctaaaaccacgcagtccagaccatgtgttaaagaacaccatttctgtcaaggctgtctgtgactacaggcagatcgagattactatttgcaaaaatgatgaatgtgtgctagaagataattctcagcggaccaaatggaaagtgatcagccccacagggaacgaggcaatggtgccgtcagtctgcttcctcatccccccacccaataaggatgccattgagatggccagcagggtcgaacaatcttatcagaaggttatggccctttggcatcagctgcatgttaacaccaaaagccttatctcttggaactatctgcgtaaagaccttgaccttgtacagacctggaacctagaaaagcttcgatcctcagcaccaggggagtgccatcagattatgaagaaccttcaggcccactatgaagactttctgcaggatagtcgtgactctgtgctgttctcagtggctgatcgcttgcgcttggaagaggaggtggaagcttgtaaagcccgcttccagcacctgatgaagtccatggagaatgaggacaaagaggagactgtggccaagatgtacatttcagagttgaagaacatccggctacgcctggaggagtatgaacagagggtggtcaaacgaattcagtctctagccagctctaggactgacagagatgcctggcaggacaatgcattaaggattgcagagcaagagcacacccaggaggatttacagcaattgaggtcagacttggatgcagtttctatgaaatgtgacagctttctccatcagtctccatctagttcaagtgtcccaactctgcgctcagaactgaatctgctggtggagaagatggaccatgtctatggtctctctactgtatatctgaataagttaaagacagttgatgttatagtacgtagcatacaggatgctgaactcttggtcaaaggttatgagattaagctgagtcaagaagaagtagtactggcagatctctcagctctggaggcccattggtcgacattacggcactggcttagtgatgtgaaggacaagaattcagtgttttcagtcctggatgaggaaattgccaaggccaaggtagtggcagagcagatgagtcgtctgacaccagagcgaaatctggatttggagcgctatcaggaaaaaggctcccagctgcaggagcgttggcaccgagtcattgcccagctcgagattcgccaatctgagctagaaagtatccaggaagttctgggagattaccgagcctgccatggaactctcatcaagtggattgaggaaaccactgcccagcaggaaatgatgaagccaggccaggcagaggatagcagagtgctttcggagcagctcagccagcagacggccctatttgcagaaattgagagaaatcagacaaaactggatcaatgtcaaaaattttcccagcagtactctactattgtaaaggactatgaattgcaactgatgacatacaaggcctttgtggaatcgcagcagaaatcccctggcaagcgccgtcgcatgctttcctcttcagatgccatcactcaagagttcatggacttaaggactcgctacacggcattggtgactttaacaactcagcacgtgaaatacatcagtgatgcactccggcgtctggaggaggaggagaaagtggtagaagaggagaaacaagaacatgtggagaaggttaaagaacttttgggctgggtgtctaccctagcgaggaatacacaaggaaaagctacctcatccgagaccaaagaatcaacagacattgaaaaagctattttggaacagcaggttctgtcagaagagctgacaacaaagaaagaacaagtctctgaagctattaaaacatcacagatcttcttggccaagcatggtcataagctctcagaaaaagagaagaaacaaatatctgagcaattgaatgccctaaacaaggcttaccatgacctttgtgatggttctgcaaatcagcttcagcagcttcagagccagttggctcaccagacagaacaaaagaccctgcagaaacaacaaaatacctgtcaccagcaactggaggatctttgcagttgggtaggacaggcagaaagagcactggcaggccaccaaggcagaaccacccagcaggatctctctgctttgcagaagaaccaaagtgacttgaaggatttacaggatgacattcagaatcgtgccacctcatttgccactgttgtcaaggacattgaggggttcatggaagagaatcagaccaagctgagcccacgtgagttgacagctcttcgggaaaagcttcatcaggctaaggagcaatatgaggcgctccaggaagagacacgtgtggcccagaaggaactggaggaagcagtgacctccgccttacagcaggagactgaaaagagtaaagcagcaaaggaactggcagagaacaagaagaagatcgatgctctcctggattgggtaacttcagtaggatcatctggtggacagctgctgaccaaccttccaggaatggagcagctctcgggagctagcttggagaaaggagccttggacaccactgatggttacatgggggtgaatcaagccccagagaaactggacaagcaatgtgagatgatgaaggcccgtcaccaagaattgctgtcccagcagcaaaatttcattctggccacccagtcagctcaggccttcttggatcagcatggccacaatctcacacctgaggagcaacagatgctgcaacagaagctgggagagctaaaggaacaatactctacttccctggcccaatcagaggcagaactgaagcaggtgcagacacttcaggatgagttgcagaaatttctgcaggatcataaagagtttgaaagctggttggaacgatccgagaaagagctggagaacatgcataagggaggcagcagccccgagacccttccctccctgctaaagcggcaaggaagcttctcagaggatgtcatttcccacaaaggagacttgagatttgtgactatctcaggacagaaagtcttggacatggaaaacagttttaaggaaggcaaagaaccatcagaaattggaaacttagtaaaggacaagttgaaggatgcaacagaaagatacactgctctccactcaaagtgtacacgattaggatctcacctgaatatgctgttaggccagtatcatcaattccaaaacagtgctgacagcctgcaggcctggatgcaggcttgtgaggccaacgtggagaagctcctctcagatactgttgcctctgaccctggagttctccaggagcagcttgcaacaacaaagcagttgcaggaggaattggctgagcaccaagtacctgtggaaaaactccaaaaagtagctcgtgacataatggaaattgaaggggagccagccccagaccacaggcatgttcaagaaactacagattccatactcagccacttccaaagcctctcctatagcctggctgagcgatcttctctgctgcagaaagcaattgcccaatctcagagtgtccaggaaagcctggagagcctgttgcagtctattggggaagttgaacaaaacctggaagggaagcaggtgtcatcactctcatcaggagtcatccaggaagccttagccacaaatatgaaattgaagcaggacattgctcggcaaaagagcagcttggaggccacccgtgagatggtgacccgattcatggagacagcagacagtactacagcagcagtgctgcagggcaaactggcagaggtgagccagcggttcgaacagctctgtctacagcagcaagaaaaggagagctccctaaagaagcttctaccccaggcagagatgtttgaacacctctctggtaagctgcagcagttcatggaaaacaaaagtcggatgctggcctctggaaatcagccagatcaagatattacacatttcttccaacagatccaggagctcaatttggaaatggaagaccaacaggagaacctagatactcttgagcacctggtcactgaactgagctcttgtggctttgcgctggacttgtgccagcatcaggacagggtacagaatctaagaaaagacttcacagagctacagaagacagttaaagagagagagaaagatgcatcatcttgccaggaacagttggatgaattccggaagctggtcaggaccttccagaaatggttgaaagaaactgaagggagtattccacctacggaaacttctatgagtgctaaagagttagaaaagcagattgaacacctgaagagtctactagatgactgggcaagtaagggaactctggtggaagaaatcaattgcaaaggtacttctttagaaaatctcatcatggaaatcacagcacctgattcccaaggcaagacagatctgacggagatccagtgtgacatgtcagatgtaaacttgaagtatgagaaactagggggagtacttcatgaacgccaggaaagccttcaggctatcctcaacagaatggaggaggttcacaaggaggcaaactctgtgctgcagtggctggaatcaaaagaggaagtcctgaaatccatggatgccatgtcatctccaaccaagacagaaacagtgaaagcccaagctgaatctaacaaggccttcctggctgagttggaacagaattctccaaaaattcaaaaagtaaaggaagccctggctggattactggtgacatatcccaactcacaggaagcagaaaattggaagaaaattcaggaagaactcaattcccgatgggaaagggccactgaggttactgtggctcggcaaaggcagctagaggaatctgcaagtcatctggcctgcttccaggctgcagaatcccagctccggccgtggctgatggagaaagaactgatgatgggagtgctggggcccctgtctattgaccccaacatgttgaatgcacaaaagcaacaggtccagtttatgctaaaggaatttgaagcacgcaggcaacagcatgagcaactgaatgaggcagctcagggcatcctaacaggccctggagatgtctctctgtccaccagccaagtacagaaagaactccagagcatcaatcagaaatgggttgagctgactgacaaactcaactcccgttccagccaaattgaccaagctattgttaagagcacccagtaccaggaactgctccaggacttatcagagaaggtgagggcagttggacaacggctgagtgtccagtcagctatcagcacccaaccagaggctgtaaagcagcaattggaagagaccagtgaaattcgatctgacttggagcagttagaccacgaggttaaggaggctcagacactgtgcgatgaactctcagtgctcattggtgagcagtacctcaaggatgaactgaagaagcgtttggagacagttgccctgcctctccaaggtttagaagaccttgcagccgatcgcattaacagactccaggcagctcttgccagcacccagcagttccagcaaatgtttgatgagttgaggacctggttggatgataaacaaagccagcaagcaaaaaactgcccaatttctgcaaaattggagcggctacagtctcagctacaggagaatgaagagtttcagaaaagtcttaatcaacacagtggctcctatgaggtgattgtggctgaaggggaatctctacttctttctgtacctcctggagaagagaaaaggactctacaaaaccagttggttgagctcaaaaaccattgggaagagcttagtaaaaaaactgcagacagacaatccaggctcaaggattgtatgcagaaagctcagaaatatcagtggcatgtggaagaccttgtgccatggatagaagattgtaaagctaagatgtctgagttgcgagtcactctggatccagtgcagctagagtccagtctcctaagatcaaaggctatgctgaatgaggtggagaagcgccgctccctgctggaaatattgaatagtgctgctgacattctgatcaattcttcagaagcagatgaggatggaatccgggatgagaaggctgggatcaaccagaacatggatgctgttacagaagagctgcaggccaaaacagggtcactcgaagaaatgactcagaggctcagggagttccaggaaagctttaagaatattgaaaagaaggttgaaggagccaaacaccaacttgagatctttgatgctctgggttctcaagcctgtagcaacaagaacctggagaagctaagagctcaacaggaagtgctgcaggccctagagcctcaggtagactatctgaggaactttactcagggtctggtagaagatgccccagatggatctgatgcttctcaacttctccaccaagctgaggtcgcccagcaagagttcctcgaagttaagcaaagagtgaacagtggttgtgtgatgatggaaaacaagctggaggggattggccagtttcactgccgggtccgagagatgttctctcaattggcagacctggatgatgagctagatggcatgggtgctattggcagagacactgatagcctccagtcccaaatcgaggatgtccggctattccttaacaaaattcacgtcctcaaattagacatagaggcctctgaagcagagtgtcgacatatgctagaagaagaggggactctggatttgttaggtctcaaaagggagctagaagccctgaacaaacagtgtggcaaactgacagagagggggaaagctcgtcaggaacagctggaactgacactaggccgtgtagaggacttctacaggaaattgaaaggactcaatgacgcgaccacagcagcagaggaggcagaggccctccagtgggtagtggggaccgaagtggaaatcatcaaccaacaattagcagattttaaaatgtttcagaaagaacaagtggatcctcttcagatgaaattgcagcaggtgaatggacttggccagggattaattcagagtgcaggaaaagactgtgatgtacagggtttagaacatgacatggaagagatcaatgctcgatggaatacattgaataaaaaggtcgcacaaagaattgcacagctacaggaagctttgttgcattgtgggaagtttcaagatgccttggagccattgctcagctggttggcagataccgaggagctcatagccaatcagaaacctccatctgctgagtataaagtggtgaaagcacagatccaagaacagaagttgctccagcggctcctagatgatcgaaaggccacagtagacatgcttcaagcagaaggaggcagaatagcccagtcagcagagctggctgatagagagaaaatcactggacagctggagagtcttgaaagtagatggactgaactactcagtaaggcagcagccaggcaaaaacagctggaagacatcctggttctggccaaacagttccatgagacagctgagcctatttctgacttcttatctgtcacagagaaaaagcttgctaactcagaacctgttggcactcagactgccaaaatacagcagcagatcattcggcacaaggctctggaagaagacatagaaaaccatgcaacagatgtgcaccaggcagtcaaaattgggcagtccctctcctccctgacatctcctgcagaacagggtgtgctgtcagaaaagatagactcattgcaggcccgatacagtgaaattcaagaccgctgttgtcggaaggcagccctacttgaccaagctctgtctaatgctaggctgtttggggaggatgaggtggaggtgctcaactggctggctgaggttgaggacaagctcagttcagtgttcgtaaaggatttcaaacaggatgtcctgcacaggcagcatgctgaccacctggctttaaatgaagaaattgttaatagaaagaagaatgtagatcaagctattaaaaatggtcaggctcttctaaaacaaaccacaggtgaggaggtgttacttatccaggaaaaactagatggtataaagactcgttacgcagacatcacagttactagctccaaggccctcagaactttagagcaagcccggcagctggccaccaagttccagtctacttatgaggaactgaccgggtggctgagggaggtggaggaggagctggcaaccagtggaggacagtctcccacaggggaacagataccccagtttcagcagagacagaaggaattaaagaaggaggtcatggagcacaggctggtgttggacacagtgaatgaggtgagccgtgctctcttagagctggtgccctggagagccagagaagggctggataaacttgtgtccgatgctaacgagcagtacaaactagtcagtgacactattggacaaagggtggatgaaattgatgctgctattcagagatcacaacagtatgagcaagctgccgatgcagaactagcttgggttgctgaaacaaaacggaaactgatggctctgggtccaattcgcctggaacaggaccagaccacagctcagcttcaggtacagaaggctttctccattgacattattcgacacaaagattcaatggatgaactcttcagtcaccgtagtgaaatctttggcacatgtggggaggagcaaaaaactgtattacaggaaaagacagagtctctaatacagcaatatgaagccattagcctactcaattcagagcgttatgcccgcctagagcgggcccaggtcttagtaaaccagttttgggaaacttatgaagagctcagcccctggattgaggaaactcgggcactaatagcacagttaccctctccagccattgatcatgagcagctcaggcagcaacaagaggaaatgaggcaattaagggaatctattgctgaacacaaacctcatattgacaaactactaaagataggcccacaactaaaggaattaaaccctgaggaaggggaaatggtggaagaaaaataccagaaagcagaaaacatgtatgcccaaataaaggaggaggtgcgccagcgagccctggctctggatgaagccgtgtcccagtccacacaggtatgtgttttcatgataaaattgagcctatgttggagacactggagaatctttcctctcgcctgcgtatgccaccactgatccctgctgaagtagacaagatcagagagtgcatcagtgacaataagagtgccaccgtggagctagaaaaactgcagccatcctttgaggccttgaagcgccgtggagaggagcttattggacgatctcagggagcagacaaggatctggctgcaaaagaaatccaggataaattggatcaaatggtattcttctgggaggacatcaaagctcgggctgaagaacgagaaatcaaatttcttgatgtccttgaattagcagagaagttctggtatgacatggcagctctcctgaccaccatcaaagacacccaggatattgtccatgacttggaaagcccaggcattgatccttccatcatcaaacaacaggttgaagctgctgagactattaaggaagagacagatggtctgcatgaagagctggagtttattcggatccttggagcagatttgatttttgcctgtggagaaactgagaagcctgaagtgaggaagagcattgatgagatgaataatgcttgggagaacttaaacaaaacatggaaagagaggctagaaaaacttgaggatgctatgcaagctgctgtgcagtatcaggacactcttcaggctatgtttgactggctagataacactgtgattaaactctgcaccatgccccctgttggcactgacctcaatactgttaaagatcagttaaatgaaatgaaggagttcaaagtagaagtttaccaacagcaaattgagatggagaagcttaatcaccagggtgaactgatgttaaagaaagctactgatgagacggacagagacattatacgagaaccactgacagaactcaaacacctctgggagaacctgggtgagaaaattgcccaccgacagcacaaactagaaggggctctgttggcccttggtcagttccagcatgccttagaggaactaatgagttggctgactcataccgaagagttgttagatgctcagagaccaataagtggagacccaaaagtcattgaagttgagctcgcaaagcaccatgtcctaaaaaatgatgttttggctcatcaagccacagtggaaacagtcaacaaagctggcaatgagcttcttgaatccagtgctggagatgatgccagcagcttaaggagccgtttggaagccatgaaccaatgctgggagtcagtgttacagaaaacagaggagagggagcagcagcttcagtcaactctgcagcaggcccagggcttccacagtgaaattgaagatttcctcttggaacttactagaatggagagccagctttctgcatctaagcccacaggaggacttcctgaaactgctagggaacagcttgatacacatatggaactctattcccagctgaaagccaaggaagagacttataatcaactacttgacaagggcagactcatgcttctaagccgtgacgactctgggtctggctccaagacagaacagagtgtagcacttttggagcagaagtggcatgtggtcagcagtaagatggaagaaagaaagtcaaagctggaagaggccctcaacttggcaacagaattccagaattccctacaagaatttatcaactggctcactctagcagagcagagtttaaacatcgcttctccaccaagcctgattctaaatactgtcctttcccagatagaagagcacaaggtttttgctaatgaagtaaatgctcatcgagaccagatcattgagctggatcaaactgggaatcaattaaagttccttagccaaaagcaggatgttgttctgatcaagaatttgttggtgagcgtgcagtctcgatgggagaaggttgtccagcgatctattgaaagagggcgatcactagatgatgccaggaagcgggcaaaacaattccatgaagcttggaaaaaactgattgactggctagaagatgcagagagtcacctggactcagaactagagatatccaatgacccagacaaaattaaacttcagctttctaagcataaggagtttcagaagactcttggtggcaagcagcctgtgtatgataccacaattagaactggcagagcactgaaagaaaagactttgcttcccgaagatagtcagaaacttgacaatttcctaggagaagtcagagacaaatgggatactgtttgtggcaagtctgtggagcggcagcacaagttggaggaagccctgctcttttcgggtcagttcatggatgctttgcaggcattggttgactggttatacaaggtggagccacagctggctgaggaccagcccgtgcacggggaccttgacctcgtcatgaacctcatggatgcacacaaggttttccagaaggaactgggaaagcgaacaggaaccgttcaggtcctgaagcggtcaggccgagagctgattgagaatagtcgagatgacaccacttgggtaaaaggacagctccaggaactgagcactcgctgggacactgtctgtaaactctctgtttccaaacaaagccggcttgagcaggccttaaaacaagcggaagtgtttcgagacacagtccacatgctgttggagtggctttctgaagcagagcaaacgcttcgctttcggggagcacttcctgatgacacagaggccctgcagtctctcattgacacccataaggaattcatgaagaaagtagaagaaaagcgagtggacgttaactcagcagtagccatgggagaagtcatcctggctgtctgccaccccgattgcatcacaaccatcaaacactggatcaccatcatccgagctcgcttcgaggaggtcctgacatgggctaagcagcaccagcagcgtcttgaaacggccttgtcagaactggtggctaatgctgagctcctggaagaacttctggcatggatccagtgggctgagaccaccctcattcagcgggatcaggagccaatcccgcagaacattgaccgagttaaagcccttatcgctgagcatcagacatttatggaggagatgactcgcaaacagcctgacgtggaccgggtcaccaagacatacaaaaggaaaaacatagagcctactcacgcgcctttcatagagaaatcccgcagcggaggcaggaaatccctaagtcagccaacccctcctcccatgccaatcctttcacagtctgaagcaaaaaacccacggatcaaccagctttctgcccgctggcagcaggtgtggctgttagcactggagcggcaaaggaaactgaatgatgccttggatcggctggaggagttgaaagaatttgccaactttgactttgatgtctggaggaaaaagtatatgcgttggatgaatcacaaaaagtctcgagtgatggatttcttccggcgcattgataaggaccaggatgggaagataacacgtcaggagtttatcgatggcattttagcatccaagttccccaccaccaagttagagatgactgctgtggctgacattttcgaccgagatggggatggttacattgattattatgaatttgtggctgctcttcatcccaacaaggatgcgtatcgaccaacaaccgatgcagataaaatcgaagatgaggttacaagacaagtggctcagtgcaaatgtgcaaaaaggtttcaggtggagcagatcggagagaataaataccggtttggggattctcagcagttgcggctggtccgtattctgcgcagcaccgtgatggttcgcgttggtggaggatggatggccttggatgaatttttagtgaaaaatgatccctgccgagcacgaggtagaactaacattgaacttagagagaaattcatcctaccagagggagcatcccagggaatgacccccttccgctcacggggtcgaaggtccaaaccatcttcccgggcagcttcccctactcgttccagctccagtgctagtcagagtaaccacagctgtacatccatgccatcttctccagccaccccagccagtggaaccaaggttatcccatcatcaggtagcaagttgaaacgaccaacaccaacttttcattctagtcggacatcccttgctggtgataccagcaatagttcttccccggcctccacaggtgccaaaactaatcgggcagaccctaaaaagtctgccagtcgccctgggagtcgggctgggagtcgagccgggagtcgagccagcagccggcgaggaagtgacgcttctgactttgacctcttagagacgcagtctgcttgttccgacacttcagaaagcagcgctgcagggggccaaggcaactccaggagagggctaaacaaaccttccaaaatcccaaccatgtctaagaagaccaccactgcctcccccaggactccaggtcccaagcgataacactgtctaagcacccccaagccactatccactttgaatcctgctccatacattgggtgtatatttattctgaacgggagaagttatattgttaaaagtgtaaaagaataattgtgttatgaagctgccttattttttttctttttgtaagttactattttcatgtgaatatttatgtagataaaatttgcctcctggtaaccctgtaatggatggggcccagaaatgaaatatttgagaaaaacaagtgaaaaggtcaagatacaaatgtgtattaaaaaaaaaaaagcctattaatagggtttctgcgcggtgcagggttgtaaacctgctttatcttttaggattattcctaaatgcatcttctttataaacttgacttgctatctcagcaagataaattatattaaaaaaataagaatcctgcagtgtttaaggaactctttttttgtaaatcacggacacctcaattagcaagaactgaggggagggctttttccattgtttaatgttttgtgatttttagctaaagagagggaacctcatctaagtaacatttgcacatgatacagcaaaaggagttcattgcaatactgtctttggatattgtttcagtactgggtgtttaaaggacaaatagctgctagaattcaggggtaaatgtaagtgttcagaaaacgtcagaacatttggggttttaaactgatttgttgctccctatccagcctagacaccagtaactcttgtgttcaccaggacccagacccttggcaagggataggctcgttggtgacattgtgaatttcagatttgttttatccactttttttgctatttatttaaatggtcgatcaacttcccacaaactgaggaatgaattccacgagcctgttctgaaaatgtggacgtaagacaaacacgtgctcgtcctttaatggagttcaccagcacacttgttaaccagtcctgtttgctttcgtctttttttgtgcgtaataaagtcaactgaccaagtgaccatgaaaaggggctgtctggggctcctgttttttagctgctgttcttcagctccgaccatgttgctgtgtgattatctcaattggttttaattgaggcagaaactgaagctctaccaatgaactgtttagaaacaagacacacttttgtattaaaattgcttgcagtaacaaatattttgtatttcctgattttcttttcaactattaccttatctataaatgttaccctggggtataatcatgttgtaggtacttaaatgcattccgcaaatcaaaatatcttgatggataaattatagagcttaatag

SEQ ID NO: 2703 - protein, 3847 aa, Homo sapiens; identical to SEQ ID NO: 2699

SEQ ID NO: 2704 - DNA, 590 bp, Homo sapiens
cacagccctttttgaggagctgcgaagggtgcacaggccagtagctggaggttctttggtaccccctccttttaggtggggtcagcagacacaggggcgccatgtggccgagttaccaagatgaacacgagttcaacgcccacctggtttgtcgcatgtgctgtatggatgaacgggaccgggttcagaagaaaacgttcaccaagtgggtcaacaagcacttaatgaaggtccgcaagcacatcaatgatctttatgaagatctgcgggatggccataacctgatctctctgttggaggtcctctcaggcatcaaactgccccgggagaagggcaggatgcgttttcataggctgcagaatgtgcagattgccctggacttcctaaagcagcgacaggtgaaactagtgaatattcgcaatgatgacatcacagatggcaaccccaagttgaccctgggtctgatctggaccattattttgcatttccagatttcgctcttgttgcacaggctggagtgcaatggcaccatctcggcttaccaaaacctctgcctcccaggttcaagcgattctcctgcctcagcctcc

SEQ ID NO: 2705 - protein, 162 aa, Homo sapiens
MWPSYQDEHEFNAHLVCRMCCMDERDRVQKKTFTKWVNKHLMKVRKHINDLYEDLRDGHNLISLLEVLSGIKLPREKGRMRFHRLQNVQIALDFLKQRQVKLVNIRNDDITDGNPKLTLGLIWTIILHFQISLLLHRLECNGTISAYQNLCLPGSSDSPASA

SEQ ID NO: 2706 - DNA, 460 bp, Homo sapiens
agccctttttgaggagctgcgaagggtgcacaggccagtagctggaggttctttggtaccccctccttttaggtggggtcagcagacacaggggcgccatgtggccgagttaccaagatgaacacgagttcaacgcccacctggtttgtcgcatgtgctgtatggatgaacgggaccgggttcagaagaaaacgttcaccaagtgggtcaacaagcacttaatgaaggtccgcaagcacatcaatgatctttatgaagatctgcgggatggccataacctgatctctctgttggaggtcctctcaggcatcaaactgccccgggagaagggcaggatgcgttttcataggctgcagaatgtgcagattgccctggacttcctaaagcagcgacaggtaagaccatcacatgccttccccattcttccaggctgtgttggcattggggccctattcagaga

SEQ ID NO: 2707 - protein, 119 aa, Homo sapiens
MWPSYQDEHEFNAHLVCRMCCMDERDRVQKKTFTKWVNKHLMKVRKHINDLYEDLRDGHNLISLLEVLSGIKLPREKGRMRFHRLQNVQIALDFLKQRQVRPSHAFPILPGCVGIGALF

SEQ ID NO: 2708 - DNA, 457 bp, Homo sapiens
gtaaattaaaaaaaaaaaatttctttttgagacagggtcttgctgtcacccaggctggagggcagtgacacaatcttggctcactgcaacctctgcctcctgggctcaagtgaccctcccacctcagccacccaagtagctgggaccacaggcgcaagccaccatgcctggcttatttttgtattttttgtagagacagagttttgtcatattgcccaggctggtcttgaactcctgagctcaagtgatccacacaccttaacctctgaaagtgcagggattataggcatgagccaccatgcccagcctacttgtgctttttttaagtttggaatcctttgactcctttttgggctgccagaatcctactcgttatccaaggtttatgtactgggactatgtgggtaggctatgttggatcagaacatagaattttgcccctcaaatgcaggctttc

SEQ ID NO: 2709 - protein, 43 aa, Homo sapiens
MPSLLVLFLSLESFDSFLGCQNPTRYPRFMYWDYVGRLCWIRT

SEQ ID NO: 2710 - DNA, 558 bp, Homo sapiens
agagtgttggataaatgggatcatgcagcatgcaagattttgaaactgccggccagacgcgatggctcacgcctgtaatcccagcactttgggaggctgagacaggcggatcacgaggactaaaggaccacacaagaattccttacagtagaagccaggcctgggagcattacacaaagcaccccctaagaccagatgaaacagtgatggctgctgcccttgcactcaatgagatggaccaatatgtcatttgtagggccacaattgtgaggccattcattaggagaagctcaccagtttgatgcctgagaggacctccaacagagagatcaggttatggccatcccgcagatcttcataaagatcattgatgtgcttgcggacctgtgaatgagagtgaaacagacagatttttatttgatattgaattattatactatccacataaaaatctctggttctaggtaaacacaaattaaagaatttaaaagtggaagcaacaattaaataataaaattcaggaagtttcagattggaataaaatacatgtgaaatgat

SEQ ID NO: 2711 - protein, 95 aa, Homo sapiens
MGSCSMQDFETAGQTRWLTPVIPALWEAETGGSRGLKDHTRIPYSRSQAWEHYTKHPLRPDETVMAAALALNEMDQYVICRATIVRPFIRRSSPV

SEQ ID NO: 2712 - DNA, 438 bp, Homo sapiens
tgtgtaaactcatgtgtgatgtgtagatggtggcgtttcatgtgccttgctggacttttacagacccgatctagtagacatggagagggtgcaaatccaaagtaaccgagagaatctggaacaggcttttgaagtggcagaaagactgggggtcactcgcctgctggatgcagaagatgtggatgtgccatctccagatgaaaagtctgtaatcacttatgtgtcttcgatttatgatgccttccctaaagttcctgagggtggagaagggatcagtgctacggaagtggactccaggtggcaagaataccaaagccgagtggactccctcattccctggatcaaacagcatacaatactgatgtcagataaaacttttccccaaaaccctgttgaactaaaggtaaagtcaaggacttaaatttttttggtaaaatc

SEQ ID NO: 2713 - protein, 113 aa, Homo sapiens
MERVQIQSNRENLEQAFEVAERLGVTRLLDAEDVDVPSPDEKSVITYVSSIYDAFPKVPEGGEGISATEVDSRWQEYQSRVDSLIPWIKQHTILMSDKTFPQNPVELKVKSRT

SEQ ID NO: 2714 - DNA, 734 bp, Homo sapiens
tgtagcctttcttagtgtcaggaaattgaaccccatcctgagagcccttgaggagctttgaagctagtactgtgagcattaaactgagcagcatctaggcaattaaaggaaatggattttatatagtttggagtggcctgagctactttctcttgtgcttgttttggatattgctaatcaggtgtgtgatgtttaccttctggcaataggaagtggactccaggtggcaagaataccaaagccgagtggactccctcattccctggatcaaacagcatacaatactgatgtcagataaaacttttccccaaaaccctgttgaactaaaggtaaagtcaaggacttaaatttttttggtaaaatctttctagggagtaagtctccaagcttatcactgctggcttctaggtgaggtggtatgaaaaattgggtcctatagtttgtgtccatttattcaccaaatattaattttataggcactttataaccaatatatacacttcaaagaaacagaaattctggccaaggagagagaaaaaggaagaattgaggaattatataaattactagaggtgtggattgaatttggccgaattaaactgcctcaaggttatcaccctaatgatgtggaagaagagtggggaaagctcatcatagagatgctggaacgagagaaatcacttcggccggctgtggagaggctggaattgctgctacagattgcaaacaaaatc

SEQ ID NO: 2715 - protein, 35 aa, Homo sapiens
CGRRVGKAHHRDAGTREITSAGCGEAGIAATDCKQ

SEQ ID NO: 2716 - DNA, 750 bp, Homo sapiens
ggtgctttgaactgtgaagaaaaactgacactagctaagaatacactgcaggctgtaagtctctgactgttttgtccaacatctgtgtcacatgtttcctgcttctcaccctctgctctaattgttgaagttagcaatcgaggaatccagatgtattatttccctttttttttttttttggaattgcagtagacttcttggctccctctgtcctagtgagtggggcaatggaagttttcccactgttattctctcttcctgtctcaggatgctgctcacctggaatcaggacaaccggtacaatgtgagtcagatgtcattatgtacattcaggagtgtgaaggtctcatcaggcagctgcaggtggatctccagatcctgcgggatgagaattactaccagctagaagagctggcttttagggtcatgcgtcttcaggatgagctggtcaccttgcgtctagagtgtacaaacctgtaccggaagggtcatttcacttcacttgaattggttccaccctctactttaaccaccactcatctgaaagcagaacccttaaccaaggcaacccattcttcttctacctcctggttccgaaagcctatgactcgggctgaacttgtggccatcagctcctctgaagatgaaggcaatctccgatttgtgtatgaactactgtcttgggtagaagagatgcaggtgggtgcatatccaaaagcttatgcagtacactgatgtttactggatctg

SEQ ID NO: 2717 - protein, 137 aa, Homo sapiens
MYIQECEGLIRQLQVDLQILRDENYYQLEELAFRVMRLQDELVTLRLECTNLYRKGHFTSLELVPPSTLTTTHLKAEPLTKATHSSSTSWFRKPMTRAELVAISSSEDEGNLRFVYELLSWVEEMQVGAYPKAYAVH

SEQ ID NO: 2718 - DNA, 19121 bp, Homo sapiens
ggctctgattcagttttctttttcttctcttttccttttttttttttttttttttttttttttaggaatgcagagcagttgctggggtgattgacctaggcacagtggagatatttcccatcttcaaagccatgcaaaagggcctccttgaccaagacacaggcctagtgcttctggaatctcaggttatcatgtctggcctcattgcccctgagacgggtgaaaacctctctttggaggagggcatagccagaaacctcattaatccccagatgtaccagcagctccgggagctacaggatgccctggccttaataagcaggcttactgagagcagaggccctctttctgtggtggaagcaattgaaaagagaataatcagtgagacagttggactgaaaatcttagaagctcacctggcaactggaggtttcagtctttcccctagtgagaactgtattaacctggaagaggcttttcatcaaggcctcatttctgcatggcttcattcagtattagagtcttatcttagaacatccaagaatttgatagaccctaacacagctgagaaaattggtttgctggatctgatgcagcgatgtattgtccaccaggaatcaggattcaaattactgcctgtcaaacaattggcaggggggatggtgagcttgaaatcaggccggaaggttagcattttccgtgcagttcaggaagggctaatagataggcaggtcactgtccggttgctggaagctcagctttttgctggtggcatagtagatccaagaacaggacacagacttacagtggaagaggctgtaagacataatctgattgaccaagatatggcctgtgctatcctcataaggcagcttcagacaggaggcatcatagacactgtcacggggcaaaggctaacaatagatgaagcagtgagcaatgatctagtagctgctaagatcgcccttgtgattctggagtccctctggtcattcatggggttgctgtggcctgaatctggagagatcctcccaattacagatgccctagaacaaggtattgtgtctactgaactagcacataaaatccttagtaaccgacagcatattaaggctctgtttctaccagcaaccacagagattttgtcctggaagaaagcaatagaaagtggtatcctggatagagatcttgccaataacttaaaatcgatttgtatacctgatgtgatgccccacatgcaactagcagactctgcagaacaaaatattaatcctggagcagcagttctaccgtgcagcaagagccaccctaaggccacagcaagccagagtgagaatctgttgttccagctgatgactcacagctatattaatgtgcaaaatggacagaggctgcttctgttagataaagagctgatggagacactaacatccagagatgagtatcaaacaagtcctccaaaagtggttgaaattgggcatcaaaggcaaaaaactcctgagggattgcaagaatcagctaatgtgaaaatctcaggaactttcagcagtgggtggactgtgaggctgcctgagttccagttttcttctcagaacaaagaatatcccgatcgggaagattgcactacagaaaaaggcaaaaagaccactgtagaaacagaagattcttctgtagagaaccctgaacaggatctgtttgtagaacaaaaagagagaaatccaaacattgatgctttgaaggtaataaataaagtcaaattagaggtacaaaggcagttgataggtacccaaagggaagaccaaacagcagtgtctgtcagagaaaatgccagcaggggacacctcctgaccatacctcctgctgaggcggaaggtgtgccgttggtggttgacaaagatgttttttctgttgaaacaccaaagaaagaacatcaacctctaagaaacacttcctttacatgtcagaatgaacaagcacacactcttgagactgaatatattcatgatgaaactggaggatctcacataaaaccccaaagcaaaaagttacaagttcaggtaaagaaaactctaggtataaagttagaactaaagtctgaaactgatgggaatgttcatcctctggacaaaaaggaaatgttaaagaaaacatttctggctaaggatgaccataaagaaagtcaagaagcacagaacatcgcaggtggtagtatgatgatgtcagaaaagaccgatgaggaagatagtggcagggaaatttttctgtcatgcagtcatccattagaattgcttgaagaagctaccttaaatgtattatctgcacagttactagatggtggtatctttcatgaacaaacaggtcaaaagctcttactaaatgaagcaatatcccgaggcattgtgccaagtcacactgccgtgaagcttatggagaagctgaacatgtttcaggggttctttgactctcagacttgtgagtctttgacaactgaagaagtcattaatgaaggtctgatggatgagaaattattacataatgtcctcatggcagacaaagctataagtggtgtcttagacccccgtacccagacactgtgctctgtaaaggatgcagttacagttggacttcttgacaaggaaacagccaccagaattttagagaggcaggtggtgactggtggaattattgatctgaaacgaggcaaaaaagtttcagtaactttggcctcaactcttggcttggtggacgttgctgaccagccagaacttataaatctggagaaagcttccaaaggtagagatgctgaaaaaacagttagggagagattaattagtttacaaatggaaacaacaggacttatagaccctgatagtaaagcacctttaacagttgtgcagtccattgacagaggtcttttggagagagaggaggccgttcgtttgttgactaagcaagtggtagatggaggtatcattcaccatatatctgggatgagactttctgttgataatgccttcagacatggcttaattggtgaagatttagccgagaaactcaaaagagttgagaacttaaacatccatcagatttttaatcctgaaacgaaggaaaatatttccctccctaaagccataaaattagatcttattacctcagacctgaaaagagaaatccaggaggttcaggcctttactggaaactttgtggatctcatttctggtcagagattgaccttggcagaagctaaaaaagaaggactgttaactaatgaagcagtattgtctccaggaatgatgcatggcattgtagatcccgagaactgcagaattgtcccctactcagaattagtcaagaaatgtaagattgatattgaatctggacagagatatctagaagtaattcccttctcagacattaaagatggggtgagcgacaaagtgcttacattgtctcaagcaattcagcttggaaaagtagactttgcatctacgctgaaggttctagaagcccaggcaaatactggtggaatcatagatactgctactggaaaaagactgacattggcatcagctttggaagagaaactggtggatgaaaacatggtcagaattattgcatctcatcaggtgttaaatggaggaattgttgacatatttagtgatcagagagtgactttagtagaagctattgagaaaagactgatcagccctgaactggcaaatatgatccaaatagatagttcagagttcagcgatcacagggctcagattgaaaagcaagaagggattgaagtgtgtgcattacaaaatgaatttctaggaaaggatatgttaattgcttgtaatcagactgctgaaatgagttgtaataaagtagaagagagtgagagattatttcaagttgaaaatcagtctgcacaagaaaaggttaaagtgagagtttctgatggggagcaggcaaaaaagagcagggaaatttccttaaaggaatttgggtgcaaggatcaacgtaagccaagaatgtcttcagatgctaaagaatttatcagtatcataaatcctcataatcttaaaggtaaatccttgggccaagtgtcattgacacacccttactctgaatgtgattttaaacttaaagaagtggctagaaataacatgggaaatgatacaaatgaagagcaggaaaaagcagtgacaaaaatagaaattatttctcatatgaagcagtctacctcatgtctagattctgaagaaataagagaaaatcaaggggaagtgattttggaagtacaagaaacatattgtgaaacgtcaggcaaattgccgagtgagcaggttttgcagcaaccaatgaatgctcgggtgaaaagtaagagagagaagagggaggtgattgtagaagaaagtatcagaacatgcaaaccagcatttctttctgaagaaaagttgtatcaggaaactgccattagagatgagcatgactcccatataaagagccaacctagggaaatgacctcaagtgaaaaagggaaagaagctgatacagaaatgggattttctattacttttaaaattgaagagtcctcttcccaagtggtacctcaaggaatttctgtaaaacatttagatgctttaacactcttcagctctaaacaggccaatgaaggaaaagtaaacaatttaagtctctgcttgactttaaaaccagaagaaaacttatctcgagaaattgcctgtggggcccagagtgaaccattcccttgtatgaccccaagacctgaaggattgcactaccaggaatcagatggaaaagcccaagtgacaggcccatcccaaatttccaaaacagacaagtctttccaaggaaccaccagacaggagaccaactatcaagattcctgggttacttcgaaaactaaggaaaccaaacatcaaatttcctcatctaatgaatgtaaagaaaagtcataccaagaagtatcttttgacccagcaagaggtcttaaattggaagaaatcacagtttctagaccagattcaaaagaagtcaggtatctagaattctcagacagaaaagaccttcatcatcagggcagcaaaagtgatgataaactttgtggaactctcaaatctgaaatagcaacacaggaactaactggagagaaatttctagaaatggcaaaccctaatgttgcaggtctagaagcaggatccattgaggacatagtgactcagagaggttccagagtcttgggatcctttcttccagagaaactgttcaaaggagtgtctcaaaaagagaatacagggcaacagaatgccatcattagtcctactgttctagagaccagtgaagaaaagacagtgtccctaacagtatgctctgcagtgaagacagagaagacaccacaggaaaagctcagagaaagccctggcagtgaacaaactcccttcatgactgcacctgaaggaaagggaaatggaggtgtaaacccagagcccttcagagcaactcagaatgtatttacccggcaactctgtttagaacatgatgaaaagctagtatcctatctgtctctgttacggaacattgaaatgaggaccaaacagattcaacctttggagctaaacctggcagaactacaggatctgctgtgtcaggccaaggtattagaaagggagttaaaggatctgaccaccttggtcagtcaggagctggagtgtgtgaatcagattatcatcagccagcctcaagaagttcctgctcaactgttgaaggctctagagaaagatgccaagaatcttcagaagtctctcagctctgtgagtgacacttggaattccaggctactccacttccagaatgctgtggaaatagaaaagactaaagtgttaaatcagcacacacagctagaaggccgacttcaagatctgagagcctgggttggcaataaaaatcttattctgaacagcaagggatctaacagtgaaatagatgttgacagcctgaacctctgcctccaacagtatgaggatttgaaacagcccatggctgaaaggaaagctcagctggatgctcttgcttttgatattcagttctttatctcagaacatgcccaggacttgtcccctcagcagaatcgacagatgctgaggcttctgaatgaactgcagaggtccttccaggacattttggaacagactgccgctcaggtggatgccttgcagggccatcttcaacaaatggagcaggaagccctggtgaagaccctgcagaaacaacaaaatacctgtcaccagcaactggaggatctttgcagttgggtaggacaggcagaaagagcactggcaggccaccaaggcagaaccacccagcaggatctctctgctttgcagaagaaccaaagtgacttgaaggatttacaggatgacattcagaatcgtgccacctcatttgccactgttgtcaaggacattgaggggttcatggaagagaatcagaccaagctgagcccacgtgagttgacagctcttcgggaaaagcttcatcaggctaaggagcaatatgaggcgctccaggaagagacacgtgtggcccagaaggaactggaggaagcagtgacctccgccttacagcaggagactgaaaagagtaaagcagcaaaggaactggcagagaacaagaagaagatcgatgctctcctggattgggtaacttcagtaggatcatctggtggacagctgctgaccaaccttccaggaatggagcagctctcgggagctagcttggagaaaggagccttggacaccactgatggttacatgggggtgaatcaagccccagagaaactggacaagcaatgtgagatgatgaaggcccgtcaccaagaattgctgtcccagcagcaaaatttcattctggccacccagtcagctcaggccttcttggatcagcatggccacaatctcacacctgaggagcaacagatgctgcaacagaagctgggagagctaaaggaacaatactctacttccctggcccaatcagaggcagaactgaagcaggtgcagacacttcaggatgagttgcagaaatttctgcaggatcataaagagtttgaaagctggttggaacgatccgagaaagagctggagaacatgcataagggaggcagcagccccgagacccttccctccctgctaaagcggcaaggaagcttctcagaggatgtcatttcccacaaaggagacttgagatttgtgactatctcaggacagaaagtcttggacatggaaaacagttttaaggaaggcaaagaaccatcagaaattggaaacttagtaaaggacaagttgaaggatgcaacagaaagatacactgctctccactcaaagtgtacacgattaggatctcacctgaatatgctgttaggccagtatcatcaattccaaaacagtgctgacagcctgcaggcctggatgcaggcttgtgaggccaacgtggagaagctcctctcagatactgttgcctctgaccctggagttctccaggagcagcttgcaacaacaaagcagttgcaggaggaattggctgagcaccaagtacctgtggaaaaactccaaaaagtagctcgtgacataatggaaattgaaggggagccagccccagaccacaggcatgttcaagaaactacagattccatactcagccacttccaaagcctctcctatagcctggctgagcgatcttctctgctgcagaaagcaattgcccaatctcagagtgtccaggaaagcctggagagcctgttgcagtctattggggaagttgaacaaaacctggaagggaagcaggtgtcatcactctcatcaggagtcatccaggaagccttagccacaaatatgaaattgaagcaggacattgctcggcaaaagagcagcttggaggccacccgtgagatggtgacccgattcatggagacagcagacagtactacagcagcagtgctgcagggcaaactggcagaggtgagccagcggttcgaacagctctgtctacagcagcaagaaaaggagagctccctaaagaagcttctaccccaggcagagatgtttgaacacctctctggtaagctgcagcagttcatggaaaacaaaagtcggatgctggcctctggaaatcagccagatcaagatattacacatttcttccaacagatccaggagctcaatttggaaatggaagaccaacaggagaacctagatactcttgagcacctggtcactgaactgagctcttgtggctttgcgctggacttgtgccagcatcaggacagggtacagaatctaagaaaagacttcacagagctacagaagacagttaaagagagagagaaagatgcatcatcttgccaggaacagttggatgaattccggaagctggtcaggaccttccagaaatggttgaaagaaactgaagggagtattccacctacggaaacttctatgagtgctaaagagttagaaaagcagattgaacacctgaagagtctactagatgactgggcaagtaagggaactctggtggaagaaatcaattgcaaaggtacttctttagaaaatctcatcatggaaatcacagcacctgattcccaaggcaagacaggttccatactgccctctgtaggaagctctgtaggcagtgtaaacggataccacacctgcaaagatctgacggagatccagtgtgacatgtcagatgtaaacttgaagtatgagaaactagggggagtacttcatgaacgccaggaaagccttcaggctatcctcaacagaatggaggaggttcacaaggaggcaaactctgtgctgcagtggctggaatcaaaagaggaagtcctgaaatccatggatgccatgtcatctccaaccaagacagaaacagtgaaagcccaagctgaatctaacaaggccttcctggctgagttggaacagaattctccaaaaattcaaaaagtaaaggaagccctggctggattactggtgacatatcccaactcacaggaagcagaaaattggaagaaaattcaggaagaactcaattcccgatgggaaagggccactgaggttactgtggctcggcaaaggcagctagaggaatctgcaagtcatctggcctgcttccaggctgcagaatcccagctccggccgtggctgatggagaaagaactgatgatgggagtgctggggcccctgtctattgaccccaacatgttgaatgcacaaaagcaacaggtccagtttatgctaaaggaatttgaagcacgcaggcaacagcatgagcaactgaatgaggcagctcagggcatcctaacaggccctggagatgtctctctgtccaccagccaagtacagaaagaactccagagcatcaatcagaaatgggttgagctgactgacaaactcaactcccgttccagccaaattgaccaagctattgttaagagcacccagtaccaggaactgctccaggacttatcagagaaggtgagggcagttggacaacggctgagtgtccagtcagctatcagcacccaaccagaggctgtaaagcagcaattggaagagaccagtgaaattcgatctgacttggagcagttagaccacgaggttaaggaggctcagacactgtgcgatgaactctcagtgctcattggtgagcagtacctcaaggatgaactgaagaagcgtttggagacagttgccctgcctctccaaggtttagaagaccttgcagccgatcgcattaacagactccaggcagctcttgccagcacccagcagttccagcaaatgtttgatgagttgaggacctggttggatgataaacaaagccagcaagcaaaaaactgcccaatttctgcaaaattggagcggctacagtctcagctacaggagaatgaagagtttcagaaaagtcttaatcaacacagtggctcctatgaggtgattgtggctgaaggggaatctctacttctttctgtacctcctggagaagagaaaaggactctacaaaaccagttggttgagctcaaaaaccattgggaagagcttagtaaaaaaactgcagacagacaatccaggctcaaggattgtatgcagaaagctcagaaatatcagtggcatgtggaagaccttgtgccatggatagaagattgtaaagctaagatgtctgagttgcgagtcactctggatccagtgcagctagagtccagtctcctaagatcaaaggctatgctgaatgaggtggagaagcgccgctccctgctggaaatattgaatagtgctgctgacattctgatcaattcttcagaagcagatgaggatggaatccgggatgagaaggctgggatcaaccagaacatggatgctgttacagaagagctgcaggccaaaacagggtcactcgaagaaatgactcagaggctcagggagttccaggaaagctttaagaatattgaaaagaaggttgaaggagccaaacaccaacttgagatctttgatgctctgggttctcaagcctgtagcaacaagaacctggagaagctaagagctcaacaggaagtgctgcaggccctagagcctcaggtagactatctgaggaactttactcagggtctggtagaagatgccccagatggatctgatgcttctcaacttctccaccaagctgaggtcgcccagcaagagttcctcgaagttaagcaaagagtgaacagtggttgtgtgatgatggaaaacaagctggaggggattggccagtttcactgccgggtccgagagatgttctctcaattggcagacctggatgatgagctagatggcatgggtgctattggcagagacactgatagcctccagtcccaaatcgaggatgtccggctattccttaacaaaattcacgtcctcaaattagacatagaggcctctgaagcagagtgtcgacatatgctagaagaagaggggactctggatttgttaggtctcaaaagggagctagaagccctgaacaaacagtgtggcaaactgacagagagggggaaagctcgtcaggaacagctggaactgacactaggccgtgtagaggacttctacaggaaattgaaaggactcaatgacgcgaccacagcagcagaggaggcagaggccctccagtgggtagtggggaccgaagtggaaatcatcaaccaacaattagcagattttaaaatgtttcagaaagaacaagtggatcctcttcagatgaaattgcagcaggtgaatggacttggccagggattaattcagagtgcaggaaaagactgtgatgtacagggtttagaacatgacatggaagagatcaatgctcgatggaatacattgaataaaaaggtcgcacaaagaattgcacagctacaggaagctttgttgcattgtgggaagtttcaagatgccttggagccattgctcagctggttggcagataccgaggagctcatagccaatcagaaacctccatctgctgagtataaagtggtgaaagcacagatccaagaacagaagttgctccagcggctcctagatgatcgaaaggccacagtagacatgcttcaagcagaaggaggcagaatagcccagtcagcagagctggctgatagagagaaaatcactggacagctggagagtcttgaaagtagatggactgaactactcagtaaggcagcagccaggcaaaaacagctggaagacatcctggttctggccaaacagttccatgagacagctgagcctatttctgacttcttatctgtcacagagaaaaagcttgctaactcagaacctgttggcactcagactgccaaaatacagcagcagatcattcggcacaaggctctggaagaagacatagaaaaccatgcaacagatgtgcaccaggcagtcaaaattgggcagtccctctcctccctgacatctcctgcagaacagggtgtgctgtcagaaaagatagactcattgcaggcccgatacagtgaaattcaagaccgctgttgtcggaaggcagccctacttgaccaagctctgtctaatgctaggctgtttggggaggatgaggtggaggtgctcaactggctggctgaggttgaggacaagctcagttcagtgttcgtaaaggatttcaaacaggatgtcctgcacaggcagcatgctgaccacctggctttaaatgaagaaattgttaatagaaagaagaatgtagatcaagctattaaaaatggtcaggctcttctaaaacaaaccacaggtgaggaggtgttacttatccaggaaaaactagatggtataaagactcgttacgcagacatcacagttactagctccaaggccctcagaactttagagcaagcccggcagctggccaccaagttccagtctacttatgaggaactgaccgggtggctgagggaggtggaggaggagctggcaaccagtggaggacagtctcccacaggggaacagataccccagtttcagcagagacagaaggaattaaagaaggaggtcatggagcacaggctggtgttggacacagtgaatgaggtgagccgtgctctcttagagctggtgccctggagagccagagaagggctggataaacttgtgtccgatgctaacgagcagtacaaactagtcagtgacactattggacaaagggtggatgaaattgatgctgctattcagagatcacaacagtatgagcaagctgccgatgcagaactagcttgggttgctgaaacaaaacggaaactgatggctctgggtccaattcgcctggaacaggaccagaccacagctcagcttcaggtacagaaggctttctccattgacattattcgacacaaagattcaatggatgaactcttcagtcaccgtagtgaaatctttggcacatgtggggaggagcaaaaaactgtattacaggaaaagacagagtctctaatacagcaatatgaagccattagcctactcaattcagagcgttatgcccgcctagagcgggcccaggtcttagtaaaccagttttgggaaacttatgaagagctcagcccctggattgaggaaactcgggcactaatagcacagttaccctctccagccattgatcatgagcagctcaggcagcaacaagaggaaatgaggcaattaagggaatctattgctgaacacaaacctcatattgacaaactactaaagataggcccacaactaaaggaattaaaccctgaggaaggggaaatggtggaagaaaaataccagaaagcagaaaacatgtatgcccaaataaaggaggaggtgcgccagcgagccctggctctggatgaagccgtgtcccagtccacacaggtatgtgttttcatgataaaattgagcctatgttggagacactggagaatctttcctctcgcctgcgtatgccaccactgatccctgctgaagtagacaagatcagagagtgcatcagtgacaataagagtgccaccgtggagctagaaaaactgcagccatcctttgaggccttgaagcgccgtggagaggagcttattggacgatctcagggagcagacaaggatctggctgcaaaagaaatccaggataaattggatcaaatggtattcttctgggaggacatcaaagctcgggctgaagaacgagaaatcaaatttcttgatgtccttgaattagcagagaagttctggtatgacatggcagctctcctgaccaccatcaaagacacccaggatattgtccatgacttggaaagcccaggcattgatccttccatcatcaaacaacaggttgaagctgctgagactattaaggaagagacagatggtctgcatgaagagctggagtttattcggatccttggagcagatttgatttttgcctgtggagaaactgagaagcctgaagtgaggaagagcattgatgagatgaataatgcttgggagaacttaaacaaaacatggaaagagaggctagaaaaacttgaggatgctatgcaagctgctgtgcagtatcaggacactcttcaggctatgtttgactggctagataacactgtgattaaactctgcaccatgccccctgttggcactgacctcaatactgttaaagatcagttaaatgaaatgaaggagttcaaagtagaagtttaccaacagcaaattgagatggagaagcttaatcaccagggtgaactgatgttaaagaaagctactgatgagacggacagagacattatacgagaaccactgacagaactcaaacacctctgggagaacctgggtgagaaaattgcccaccgacagcacaaactagaaggggctctgttggcccttggtcagttccagcatgccttagaggaactaatgagttggctgactcataccgaagagttgttagatgctcagagaccaataagtggagacccaaaagtcattgaagttgagctcgcaaagcaccatgtcctaaaaaatgatgttttggctcatcaagccacagtggaaacagtcaacaaagctggcaatgagcttcttgaatccagtgctggagatgatgccagcagcttaaggagccgtttggaagccatgaaccaatgctgggagtcagtgttacagaaaacagaggagagggagcagcagcttcagtcaactctgcagcaggcccagggcttccacagtgaaattgaagatttcctcttggaacttactagaatggagagccagctttctgcatctaagcccacaggaggacttcctgaaactgctagggaacagcttgatacacatatggaactctattcccagctgaaagccaaggaagagacttataatcaactacttgacaagggcagactcatgcttctaagccgtgacgactctgggtctggctccaagacagaacagagtgtagcacttttggagcagaagtggcatgtggtcagcagtaagatggaagaaagaaagtcaaagctggaagaggccctcaacttggcaacagaattccagaattccctacaagaatttatcaactggctcactctagcagagcagagtttaaacatcgcttctccaccaagcctgattctaaatactgtcctttcccagatagaagagcacaaggtttttgctaatgaagtaaatgctcatcgagaccagatcattgagctggatcaaactgggaatcaattaaagttccttagccaaaagcaggatgttgttctgatcaagaatttgttggtgagcgtgcagtctcgatgggagaaggttgtccagcgatctattgaaagagggcgatcactagatgatgccaggaagcgggcaaaacaattccatgaagcttggaaaaaactgattgactggctagaagatgcagagagtcacctggactcagaactagagatatccaatgacccagacaaaattaaacttcagctttctaagcataaggagtttcagaagactcttggtggcaagcagcctgtgtatgataccacaattagaactggcagagcactgaaagaaaagactttgcttcccgaagatagtcagaaacttgacaatttcctaggagaagtcagagacaaatgggatactgtttgtggcaagtctgtggagcggcagcacaagttggaggaagccctgctcttttcgggtcagttcatggatgctttgcaggcattggttgactggttatacaaggtggagccacagctggctgaggaccagcccgtgcacggggaccttgacctcgtcatgaacctcatggatgcacacaaggttttccagaaggaactgggaaagcgaacaggaaccgttcaggtcctgaagcggtcaggccgagagctgattgagaatagtcgagatgacaccacttgggtaaaaggacagctccaggaactgagcactcgctgggacactgtctgtaaactctctgtttccaaacaaagccggcttgagcaggccttaaaacaagcggaagtgtttcgagacacagtccacatgctgttggagtggctttctgaagcagagcaaacgcttcgctttcggggagcacttcctgatgacacagaggccctgcagtctctcattgacacccataaggaattcatgaagaaagtagaagaaaagcgagtggacgttaactcagcagtagccatgggagaagtcatcctggctgtctgccaccccgattgcatcacaaccatcaaacactggatcaccatcatccgagctcgcttcgaggaggtcctgacatgggctaagcagcaccagcagcgtcttgaaacggccttgtcagaactggtggctaatgctgagctcctggaagaacttctggcatggatccagtgggctgagaccaccctcattcagcgggatcaggagccaatcccgcagaacattgaccgagttaaagcccttatcgctgagcatcagacatttatggaggagatgactcgcaaacagcctgacgtggaccgggtcaccaagacatacaaaaggaaaaacatagagcctactcacgcgcctttcatagagaaatcccgcagcggaggcaggaaatccctaagtcagccaacccctcctcccatgccaatcctttcacagtctgaagcaaaaaacccacggatcaaccagctttctgcccgctggcagcaggtgtggctgttagcactggagcggcaaaggaaactgaatgatgccttggatcggctggaggagttgaaagaatttgccaactttgactttgatgtctggaggaaaaagtatatgcgttggatgaatcacaaaaagtctcgagtgatggatttcttccggcgcattgataaggaccaggatgggaagataacacgtcaggagtttatcgatggcattttagcatccaagttccccaccaccaagttagagatgactgctgtggctgacattttcgaccgagatggggatggttacattgattattatgaatttgtggctgctcttcatcccaacaaggatgcgtatcgaccaacaaccgatgcagataaaatcgaagatgaggttacaagacaagtggctcagtgcaaatgtgcaaaaaggtttcaggtggagcagatcggagagaataaataccggtttggggattctcagcagttgcggctggtccgtattctgcgcagcaccgtgatggttcgcgttggtggaggatggatggccttggatgaatttttagtgaaaaatgatccctgccgagcacgaggtagaactaacattgaacttagagagaaattcatcctaccagagggagcatcccagggaatgacccccttccgctcacggggtcgaaggtccaaaccatcttcccgggcagcttcccctactcgttccagctccagtgctagtcagagtaaccacagctgtacatccatgccatcttctccagccaccccagccagtggaaccaaggttatcccatcatcaggtagcaagttgaaacgaccaacaccaacttttcattctagtcggacatcccttgctggtgataccagcaatagttcttccccggcctccacaggtgccaaaactaatcgggcagaccctaaaaagtctgccagtcgccctgggagtcgggctgggagtcgagccgggagtcgagccagcagccggcgaggaagtgacgcttctgactttgacctcttagagacgcagtctgcttgttccgacacttcagaaagcagcgctgcagggggccaaggcaactccaggagagggctaaacaaaccttccaaaatcccaaccatgtctaagaagaccaccactgcctcccccaggactccaggtcccaagcgataacactgtctaagcacccccaagccactatccactttgaatcctgctccatacattgggtgtatatttattctgaacgggagaagttatattgttaaaagtgtaaaagaataattgtgttatgaagctgccttattttttttctttttgtaagttactattttcatgtgaatatttatgtagataaaatttgcctcctggtaaccctgtaatggatggggcccagaaatgaaatatttgagaaaaacaagtgaaaaggtcaagatacaaatgtgtattaaaaaaaaaaaagcctattaatagggtttctgcgcggtgcagggttgtaaacctgctttatcttttaggattattcctaaatgcatcttctttataaacttgacttgctatctcagcaagataaattatattaaaaaaataagaatcctgcagtgtttaaggaactctttttttgtaaatcacggacacctcaattagcaagaactgaggggagggctttttccattgtttaatgttttgtgatttttagctaaagagagggaacctcatctaagtaacatttgcacatgatacagcaaaaggagttcattgcaatactgtctttggatattgtttcagtactgggtgtttaaaggacaaatagctgctagaattcaggggtaaatgtaagtgttcagaaaacgtcagaacatttggggttttaaactgatttgttgctccctatccagcctagacaccagtaactcttgtgttcaccaggacccagacccttggcaagggataggctcgttggtgacattgtgaatttcagatttgttttatccactttttttgctatttatttaaatggtcgatcaacttcccacaaactgaggaatgaattccacgagcctgttctgaaaatgtggacgtaagacaaacacgtgctcgtcctttaatggagttcaccagcacacttgttaaccagtcctgtttgctttcgtctttttttgtgcgtaataaagtcaactgaccaagtgaccatgaaaaggggctgtctggggctcctgttttttagctgctgttcttcagctccgaccatgttgctgtgtgattatctcaattggttttaattgaggcagaaactgaagctctaccaatgaactgtttagaaacaagacacacttttgtattaaaattgcttgcagtaacaaat

SEQ ID NO: 2719 - protein, 4462 aa, Homo sapiens
MQKGLLDQDTGLVLLESQVIMSGLIAPETGENLSLEEGIARNLINPQMYQQLRELQDALALISRLTESRGPLSVVEAIEKRIISETVGLKILEAHLATGGFSLSPSENCINLEEAFHQGLISAWLHSVLESYLRTSKNLIDPNTAEKIGLLDLMQRCIVHQESGFKLLPVKQLAGGMVSLKSGRKVSIFRAVQEGLIDRQVTVRLLEAQLFAGGIVDPRTGHRLTVEEAVRHNLIDQDMACAILIRQLQTGGIIDTVTGQRLTIDEAVSNDLVAAKIALVILESLWSFMGLLWPESGEILPITDALEQGIVSTELAHKILSNRQHIKALFLPATTEILSWKKAIESGILDRDLANNLKSICIPDVMPHMQLADSAEQNINPGAAVLPCSKSHPKATASQSENLLFQLMTHSYINVQNGQRLLLLDKELMETLTSRDEYQTSPPKVVEIGHQRQKTPEGLQESANVKISGTFSSGWTVRLPEFQFSSQNKEYPDREDCTTEKGKKTTVETEDSSVENPEQDLFVEQKERNPNIDALKVINKVKLEVQRQLIGTQREDQTAVSVRENASRGHLLTIPPAEAEGVPLVVDKDVFSVETPKKEHQPLRNTSFTCQNEQAHTLETEYIHDETGGSHIKPQSKKLQVQVKKTLGIKLELKSETDGNVHPLDKKEMLKKTFLAKDDHKESQEAQNIAGGSMMMSEKTDEEDSGREIFLSCSHPLELLEEATLNVLSAQLLDGGIFHEQTGQKLLLNEAISRGIVPSHTAVKLMEKLNMFQGFFDSQTCESLTTEEVINEGLMDEKLLHNVLMADKAISGVLDPRTQTLCSVKDAVTVGLLDKETATRILERQVVTGGIIDLKRGKKVSVTLASTLGLVDVADQPELINLEKASKGRDAEKTVRERLISLQMETTGLIDPDSKAPLTVVQSIDRGLLEREEAVRLLTKQVVDGGIIHHISGMRLSVDNAFRHGLIGEDLAEKLKRVENLNIHQIFNPETKENISLPKAIKLDLITSDLKREIQEVQAFTGNFVDLISGQRLTLAEAKKEGLLTNEAVLSPGMMHGIVDPENCRIVPYSELVKKCKIDIESGQRYLEVIPFSDIKDGVSDKVLTLSQAIQLGKVDFASTLKVLEAQANTGGIIDTATGKRLTLASALEEKLVDENMVRIIASHQVLNGGIVDIFSDQRVTLVEAIEKRLISPELANMIQIDSSEFSDHRAQIEKQEGIEVCALQNEFLGKDMLIACNQTAEMSCNKVEESERLFQVENQSAQEKVKVRVSDGEQAKKSREISLKEFGCKDQRKPRMSSDAKEFISIINPHNLKGKSLGQVSLTHPYSECDFKLKEVARNNMGNDTNEEQEKAVTKIEIISHMKQSTSCLDSEEIRENQGEVILEVQETYCETSGKLPSEQVLQQPMNARVKSKREKREVIVEESIRTCKPAFLSEEKLYQETAIRDEHDSHIKSQPREMTSSEKGKEADTEMGFSITFKIEESSSQVVPQGISVKHLDALTLFSSKQANEGKVNNLSLCLTLKPEENLSREIACGAQSEPFPCMTPRPEGLHYQESDGKAQVTGPSQISKTDKSFQGTTRQETNYQDSWVTSKTKETKHQISSSNECKEKSYQEVSFDPARGLKLEEITVSRPDSKEVRYLEFSDRKDLHHQGSKSDDKLCGTLKSEIATQELTGEKFLEMANPNVAGLEAGSIEDIVTQRGSRVLGSFLPEKLFKGVSQKENTGQQNAIISPTVLETSEEKTVSLTVCSAVKTEKTPQEKLRESPGSEQTPFMTAPEGKGNGGVNPEPFRATQNVFTRQLCLEHDEKLVSYLSLLRNIEMRTKQIQPLELNLAELQDLLCQAKVLERELKDLTTLVSQELECVNQIIISQPQEVPAQLLKALEKDAKNLQKSLSSVSDTWNSRLLHFQNAVEIEKTKVLNQHTQLEGRLQDLRAWVGNKNLILNSKGSNSEIDVDSLNLCLQQYEDLKQPMAERKAQLDALAFDIQFFISEHAQDLSPQQNRQMLRLLNELQRSFQDILEQTAAQVDALQGHLQQMEQEALVKTLQKQQNTCHQQLEDLCSWVGQAERALAGHQGRTTQQDLSALQKNQSDLKDLQDDIQNRATSFATVVKDIEGFMEENQTKLSPRELTALREKLHQAKEQYEALQEETRVAQKELEEAVTSALQQETEKSKAAKELAENKKKIDALLDWVTSVGSSGGQLLTNLPGMEQLSGASLEKGALDTTDGYMGVNQAPEKLDKQCEMMKARHQELLSQQQNFILATQSAQAFLDQHGHNLTPEEQQMLQQKLGELKEQYSTSLAQSEAELKQVQTLQDELQKFLQDHKEFESWLERSEKELENMHKGGSSPETLPSLLKRQGSFSEDVISHKGDLRFVTISGQKVLDMENSFKEGKEPSEIGNLVKDKLKDATERYTALHSKCTRLGSHLNMLLGQYHQFQNSADSLQAWMQACEANVEKLLSDTVASDPGVLQEQLATTKQLQEELAEHQVPVEKLQKVARDIMEIEGEPAPDHRHVQETTDSILSHFQSLSYSLAERSSLLQKAIAQSQSVQESLESLLQSIGEVEQNLEGKQVSSLSSGVIQEALATNMKLKQDIARQKSSLEATREMVTRFMETADSTTAAVLQGKLAEVSQRFEQLCLQQQEKESSLKKLLPQAEMFEHLSGKLQQFMENKSRMLASGNQPDQDITHFFQQIQELNLEMEDQQENLDTLEHLVTELSSCGFALDLCQHQDRVQNLRKDFTELQKTVKEREKDASSCQEQLDEFRKLVRTFQKWLKETEGSIPPTETSMSAKELEKQIEHLKSLLDDWASKGTLVEEINCKGTSLENLIMEITAPDSQGKTGSILPSVGSSVGSVNGYHTCKDLTEIQCDMSDVNLKYEKLGGVLHERQESLQAILNRMEEVHKEANSVLQWLESKEEVLKSMDAMSSPTKTETVKAQAESNKAFLAELEQNSPKIQKVKEALAGLLVTYPNSQEAENWKKIQEELNSRWERATEVTVARQRQLEESASHLACFQAAESQLRPWLMEKELMMGVLGPLSIDPNMLNAQKQQVQFMLKEFEARRQQHEQLNEAAQGILTGPGDVSLSTSQVQKELQSINQKWVELTDKLNSRSSQIDQAIVKSTQYQELLQDLSEKVRAVGQRLSVQSAISTQPEAVKQQLEETSEIRSDLEQLDHEVKEAQTLCDELSVLIGEQYLKDELKKRLETVALPLQGLEDLAADRINRLQAALASTQQFQQMFDELRTWLDDKQSQQAKNCPISAKLERLQSQLQENEEFQKSLNQHSGSYEVIVAEGESLLLSVPPGEEKRTLQNQLVELKNHWEELSKKTADRQSRLKDCMQKAQKYQWHVEDLVPWIEDCKAKMSELRVTLDPVQLESSLLRSKAMLNEVEKRRSLLEILNSAADILINSSEADEDGIRDEKAGINQNMDAVTEELQAKTGSLEEMTQRLREFQESFKNIEKKVEGAKHQLEIFDALGSQACSNKNLEKLRAQQEVLQALEPQVDYLRNFTQGLVEDAPDGSDASQLLHQAEVAQQEFLEVKQRVNSGCVMMENKLEGIGQFHCRVREMFSQLADLDDELDGMGAIGRDTDSLQSQIEDVRLFLNKIHVLKLDIEASEAECRHMLEEEGTLDLLGLKRELEALNKQCGKLTERGKARQEQLELTLGRVEDFYRKLKGLNDATTAAEEAEALQWVVGTEVEIINQQLADFKMFQKEQVDPLQMKLQQVNGLGQGLIQSAGKDCDVQGLEHDMEEINARWNTLNKKVAQRIAQLQEALLHCGKFQDALEPLLSWLADTEELIANQKPPSAEYKVVKAQIQEQKLLQRLLDDRKATVDMLQAEGGRIAQSAELADREKITGQLESLESRWTELLSKAAARQKQLEDILVLAKQFHETAEPISDFLSVTEKKLANSEPVGTQTAKIQQQIIRHKALEEDIENHATDVHQAVKIGQSLSSLTSPAEQGVLSEKIDSLQARYSEIQDRCCRKAALLDQALSNARLFGEDEVEVLNWLAEVEDKLSSVFVKDFKQDVLHRQHADHLALNEEIVNRKKNVDQAIKNGQALLKQTTGEEVLLIQEKLDGIKTRYADITVTSSKALRTLEQARQLATKFQSTYEELTGWLREVEEELATSGGQSPTGEQIPQFQQRQKELKKEVMEHRLVLDTVNEVSRALLELVPWRAREGLDKLVSDANEQYKLVSDTIGQRVDEIDAAIQRSQQYEQAADAELAWVAETKRKLMALGPIRLEQDQTTAQLQVQKAFSIDIIRHKDSMDELFSHRSEIFGTCGEEQKTVLQEKTESLIQQYEAISLLNSERYARLERAQVLVNQFWETYEELSPWIEETRALIAQLPSPAIDHEQLRQQQEEMRQLRESIAEHKPHIDKLLKIGPQLKELNPEEGEMVEEKYQKAENMYAQIKEEVRQRALALDEAVSQSTQVCVFMIKLSLCWRHWRIFPLACVCHH

SEQ ID NO: 2720 - DNA, 19257 bp, Homo sapiens
ggctctgattcagttttctttttcttctcttttccttttttttttttttttttttttttttttaggaatgcagagcagttgctggggtgattgacctaggcacagtggagatatttcccatcttcaaagccatgcaaaagggcctccttgaccaagacacaggcctagtgcttctggaatctcaggttatcatgtctggcctcattgcccctgagacgggtgaaaacctctctttggaggagggcatagccagaaacctcattaatccccagatgtaccagcagctccgggagctacaggatgccctggccttaataagcaggcttactgagagcagaggccctctttctgtggtggaagcaattgaaaagagaataatcagtgagacagttggactgaaaatcttagaagctcacctggcaactggaggtttcagtctttcccctagtgagaactgtattaacctggaagaggcttttcatcaaggcctcatttctgcatggcttcattcagtattagagtcttatcttagaacatccaagaatttgatagaccctaacacagctgagaaaattggtttgctggatctgatgcagcgatgtattgtccaccaggaatcaggattcaaattactgcctgtcaaacaattggcaggggggatggtgagcttgaaatcaggccggaaggttagcattttccgtgcagttcaggaagggctaatagataggcaggtcactgtccggttgctggaagctcagctttttgctggtggcatagtagatccaagaacaggacacagacttacagtggaagaggctgtaagacataatctgattgaccaagatatggcctgtgctatcctcataaggcagcttcagacaggaggcatcatagacactgtcacggggcaaaggctaacaatagatgaagcagtgagcaatgatctagtagctgctaagatcgcccttgtgattctggagtccctctggtcattcatggggttgctgtggcctgaatctggagagatcctcccaattacagatgccctagaacaaggtattgtgtctactgaactagcacataaaatccttagtaaccgacagcatattaaggctctgtttctaccagcaaccacagagattttgtcctggaagaaagcaatagaaagtggtatcctggatagagatcttgccaataacttaaaatcgatttgtatacctgatgtgatgccccacatgcaactagcagactctgcagaacaaaatattaatcctggagcagcagttctaccgtgcagcaagagccaccctaaggccacagcaagccagagtgagaatctgttgttccagctgatgactcacagctatattaatgtgcaaaatggacagaggctgcttctgttagataaagagctgatggagacactaacatccagagatgagtatcaaacaagtcctccaaaagtggttgaaattgggcatcaaaggcaaaaaactcctgagggattgcaagaatcagctaatgtgaaaatctcaggaactttcagcagtgggtggactgtgaggctgcctgagttccagttttcttctcagaacaaagaatatcccgatcgggaagattgcactacagaaaaaggcaaaaagaccactgtagaaacagaagattcttctgtagagaaccctgaacaggatctgtttgtagaacaaaaagagagaaatccaaacattgatgctttgaaggtaataaataaagtcaaattagaggtacaaaggcagttgataggtacccaaagggaagaccaaacagcagtgtctgtcagagaaaatgccagcaggggacacctcctgaccatacctcctgctgaggcggaaggtgtgccgttggtggttgacaaagatgttttttctgttgaaacaccaaagaaagaacatcaacctctaagaaacacttcctttacatgtcagaatgaacaagcacacactcttgagactgaatatattcatgatgaaactggaggatctcacataaaaccccaaagcaaaaagttacaagttcaggtaaagaaaactctaggtataaagttagaactaaagtctgaaactgatgggaatgttcatcctctggacaaaaaggaaatgttaaagaaaacatttctggctaaggatgaccataaagaaagtcaagaagcacagaacatcgcaggtggtagtatgatgatgtcagaaaagaccgatgaggaagatagtggcagggaaatttttctgtcatgcagtcatccattagaattgcttgaagaagctaccttaaatgtattatctgcacagttactagatggtggtatctttcatgaacaaacaggtcaaaagctcttactaaatgaagcaatatcccgaggcattgtgccaagtcacactgccgtgaagcttatggagaagctgaacatgtttcaggggttctttgactctcagacttgtgagtctttgacaactgaagaagtcattaatgaaggtctgatggatgagaaattattacataatgtcctcatggcagacaaagctataagtggtgtcttagacccccgtacccagacactgtgctctgtaaaggatgcagttacagttggacttcttgacaaggaaacagccaccagaattttagagaggcaggtggtgactggtggaattattgatctgaaacgaggcaaaaaagtttcagtaactttggcctcaactcttggcttggtggacgttgctgaccagccagaacttataaatctggagaaagcttccaaaggtagagatgctgaaaaaacagttagggagagattaattagtttacaaatggaaacaacaggacttatagaccctgatagtaaagcacctttaacagttgtgcagtccattgacagaggtcttttggagagagaggaggccgttcgtttgttgactaagcaagtggtagatggaggtatcattcaccatatatctgggatgagactttctgttgataatgccttcagacatggcttaattggtgaagatttagccgagaaactcaaaagagttgagaacttaaacatccatcagatttttaatcctgaaacgaaggaaaatatttccctccctaaagccataaaattagatcttattacctcagacctgaaaagagaaatccaggaggttcaggcctttactggaaactttgtggatctcatttctggtcagagattgaccttggcagaagctaaaaaagaaggactgttaactaatgaagcagtattgtctccaggaatgatgcatggcattgtagatcccgagaactgcagaattgtcccctactcagaattagtcaagaaatgtaagattgatattgaatctggacagagatatctagaagtaattcccttctcagacattaaagatggggtgagcgacaaagtgcttacattgtctcaagcaattcagcttggaaaagtagactttgcatctacgctgaaggttctagaagcccaggcaaatactggtggaatcatagatactgctactggaaaaagactgacattggcatcagctttggaagagaaactggtggatgaaaacatggtcagaattattgcatctcatcaggtgttaaatggaggaattgttgacatatttagtgatcagagagtgactttagtagaagctattgagaaaagactgatcagccctgaactggcaaatatgatccaaatagatagttcagagttcagcgatcacagggctcagattgaaaagcaagaagggattgaagtgtgtgcattacaaaatgaatttctaggaaaggatatgttaattgcttgtaatcagactgctgaaatgagttgtaataaagtagaagagagtgagagattatttcaagttgaaaatcagtctgcacaagaaaaggttaaagtgagagtttctgatggggagcaggcaaaaaagagcagggaaatttccttaaaggaatttgggtgcaaggatcaacgtaagccaagaatgtcttcagatgctaaagaatttatcagtatcataaatcctcataatcttaaaggtaaatccttgggccaagtgtcattgacacacccttactctgaatgtgattttaaacttaaagaagtggctagaaataacatgggaaatgatacaaatgaagagcaggaaaaagcagtgacaaaaatagaaattatttctcatatgaagcagtctacctcatgtctagattctgaagaaataagagaaaatcaaggggaagtgattttggaagtacaagaaacatattgtgaaacgtcaggcaaattgccgagtgagcaggttttgcagcaaccaatgaatgctcgggtgaaaagtaagagagagaagagggaggtgattgtagaagaaagtatcagaacatgcaaaccagcatttctttctgaagaaaagttgtatcaggaaactgccattagagatgagcatgactcccatataaagagccaacctagggaaatgacctcaagtgaaaaagggaaagaagctgatacagaaatgggattttctattacttttaaaattgaagagtcctcttcccaagtggtacctcaaggaatttctgtaaaacatttagatgctttaacactcttcagctctaaacaggccaatgaaggaaaagtaaacaatttaagtctctgcttgactttaaaaccagaagaaaacttatctcgagaaattgcctgtggggcccagagtgaaccattcccttgtatgaccccaagacctgaaggattgcactaccaggaatcagatggaaaagcccaagtgacaggcccatcccaaatttccaaaacagacaagtctttccaaggaaccaccagacaggagaccaactatcaagattcctgggttacttcgaaaactaaggaaaccaaacatcaaatttcctcatctaatgaatgtaaagaaaagtcataccaagaagtatcttttgacccagcaagaggtcttaaattggaagaaatcacagtttctagaccagattcaaaagaagtcaggtatctagaattctcagacagaaaagaccttcatcatcagggcagcaaaagtgatgataaactttgtggaactctcaaatctgaaatagcaacacaggaactaactggagagaaatttctagaaatggcaaaccctaatgttgcaggtctagaagcaggatccattgaggacatagtgactcagagaggttccagagtcttgggatcctttcttccagagaaactgttcaaaggagtgtctcaaaaagagaatacagggcaacagaatgccatcattagtcctactgttctagagaccagtgaagaaaagacagtgtccctaacagtatgctctgcagtgaagacagagaagacaccacaggaaaagctcagagaaagccctggcagtgaacaaactcccttcatgactgcacctgaaggaaagggaaatggaggtgtaaacccagagcccttcagagcaactcagaatgtatttacccggcaactctgtttagaacatgatgaaaagctagtatcctatctgtctctgttacggaacattgaaatgaggaccaaacagattcaacctttggagctaaacctggcagaactacaggatctgctgtgtcaggccaaggtattagaaagggagttaaaggatctgaccaccttggtcagtcaggagctggagtgtgtgaatcagattatcatcagccagcctcaagaagttcctgctcaactgttgaaggctctagagaaagatgccaagaatcttcagaagtctctcagctctgtgagtgacacttggaattccaggctactccacttccagaatgctgtggaaatagaaaagactaaagtgttaaatcagcacacacagctagaaggccgacttcaagatctgagagcctgggttggcaataaaaatcttattctgaacagcaagggatctaacagtgaaatagatgttgacagcctgaacctctgcctccaacagtatgaggatttgaaacagcccatggctgaaaggaaagctcagctggatgctcttgcttttgatattcagttctttatctcagaacatgcccaggacttgtcccctcagcagaatcgacagatgctgaggcttctgaatgaactgcagaggtccttccaggacattttggaacagactgccgctcaggtggatgccttgcagggccatcttcaacaaatggagcaggaagccctggtgaagaccctgcagaaacaacaaaatacctgtcaccagcaactggaggatctttgcagttgggtaggacaggcagaaagagcactggcaggccaccaaggcagaaccacccagcaggatctctctgctttgcagaagaaccaaagtgacttgaaggatttacaggatgacattcagaatcgtgccacctcatttgccactgttgtcaaggacattgaggggttcatggaagagaatcagaccaagctgagcccacgtgagttgacagctcttcgggaaaagcttcatcaggctaaggagcaatatgaggcgctccaggaagagacacgtgtggcccagaaggaactggaggaagcagtgacctccgccttacagcaggagactgaaaagagtaaagcagcaaaggaactggcagagaacaagaagaagatcgatgctctcctggattgggtaacttcagtaggatcatctggtggacagctgctgaccaaccttccaggaatggagcagctctcgggagctagcttggagaaaggagccttggacaccactgatggttacatgggggtgaatcaagccccagagaaactggacaagcaatgtgagatgatgaaggcccgtcaccaagaattgctgtcccagcagcaaaatttcattctggccacccagtcagctcaggccttcttggatcagcatggccacaatctcacacctgaggagcaacagatgctgcaacagaagctgggagagctaaaggaacaatactctacttccctggcccaatcagaggcagaactgaagcaggtgcagacacttcaggatgagttgcagaaatttctgcaggatcataaagagtttgaaagctggttggaacgatccgagaaagagctggagaacatgcataagggaggcagcagccccgagacccttccctccctgctaaagcggcaaggaagcttctcagaggatgtcatttcccacaaaggagacttgagatttgtgactatctcaggacagaaagtcttggacatggaaaacagttttaaggaaggcaaagaaccatcagaaattggaaacttagtaaaggacaagttgaaggatgcaacagaaagatacactgctctccactcaaagtgtacacgattaggatctcacctgaatatgctgttaggccagtatcatcaattccaaaacagtgctgacagcctgcaggcctggatgcaggcttgtgaggccaacgtggagaagctcctctcagatactgttgcctctgaccctggagttctccaggagcagcttgcaacaacaaagcagttgcaggaggaattggctgagcaccaagtacctgtggaaaaactccaaaaagtagctcgtgacataatggaaattgaaggggagccagccccagaccacaggcatgttcaagaaactacagattccatactcagccacttccaaagcctctcctatagcctggctgagcgatcttctctgctgcagaaagcaattgcccaatctcagagtgtccaggaaagcctggagagcctgttgcagtctattggggaagttgaacaaaacctggaagggaagcaggtgtcatcactctcatcaggagtcatccaggaagccttagccacaaatatgaaattgaagcaggacattgctcggcaaaagagcagcttggaggccacccgtgagatggtgacccgattcatggagacagcagacagtactacagcagcagtgctgcagggcaaactggcagaggtgagccagcggttcgaacagctctgtctacagcagcaagaaaaggagagctccctaaagaagcttctaccccaggcagagatgtttgaacacctctctggtaagctgcagcagttcatggaaaacaaaagtcggatgctggcctctggaaatcagccagatcaagatattacacatttcttccaacagatccaggagctcaatttggaaatggaagaccaacaggagaacctagatactcttgagcacctggtcactgaactgagctcttgtggctttgcgctggacttgtgccagcatcaggacagggtacagaatctaagaaaagacttcacagagctacagaagacagttaaagagagagagaaagatgcatcatcttgccaggaacagttggatgaattccggaagctggtcaggaccttccagaaatggttgaaagaaactgaagggagtattccacctacggaaacttctatgagtgctaaagagttagaaaagcagattgaacacctgaagagtctactagatgactgggcaagtaagggaactctggtggaagaaatcaattgcaaaggtacttctttagaaaatctcatcatggaaatcacagcacctgattcccaaggcaagacaggttccatactgccctctgtaggaagctctgtaggcagtgtaaacggataccacacctgcaaagatctgacggagatccagtgtgacatgtcagatgtaaacttgaagtatgagaaactagggggagtacttcatgaacgccaggaaagccttcaggctatcctcaacagaatggaggaggttcacaaggaggcaaactctgtgctgcagtggctggaatcaaaagaggaagtcctgaaatccatggatgccatgtcatctccaaccaagacagaaacagtgaaagcccaagctgaatctaacaaggccttcctggctgagttggaacagaattctccaaaaattcaaaaagtaaaggaagccctggctggattactggtgacatatcccaactcacaggaagcagaaaattggaagaaaattcaggaagaactcaattcccgatgggaaagggccactgaggttactgtggctcggcaaaggcagctagaggaatctgcaagtcatctggcctgcttccaggctgcagaatcccagctccggccgtggctgatggagaaagaactgatgatgggagtgctggggcccctgtctattgaccccaacatgttgaatgcacaaaagcaacaggtccagtttatgctaaaggaatttgaagcacgcaggcaacagcatgagcaactgaatgaggcagctcagggcatcctaacaggccctggagatgtctctctgtccaccagccaagtacagaaagaactccagagcatcaatcagaaatgggttgagctgactgacaaactcaactcccgttccagccaaattgaccaagctattgttaagagcacccagtaccaggaactgctccaggacttatcagagaaggtgagggcagttggacaacggctgagtgtccagtcagctatcagcacccaaccagaggctgtaaagcagcaattggaagagaccagtgaaattcgatctgacttggagcagttagaccacgaggttaaggaggctcagacactgtgcgatgaactctcagtgctcattggtgagcagtacctcaaggatgaactgaagaagcgtttggagacagttgccctgcctctccaaggtttagaagaccttgcagccgatcgcattaacagactccaggcagctcttgccagcacccagcagttccagcaaatgtttgatgagttgaggacctggttggatgataaacaaagccagcaagcaaaaaactgcccaatttctgcaaaattggagcggctacagtctcagctacaggagaatgaagagtttcagaaaagtcttaatcaacacagtggctcctatgaggtgattgtggctgaaggggaatctctacttctttctgtacctcctggagaagagaaaaggactctacaaaaccagttggttgagctcaaaaaccattgggaagagcttagtaaaaaaactgcagacagacaatccaggctcaaggattgtatgcagaaagctcagaaatatcagtggcatgtggaagaccttgtgccatggatagaagattgtaaagctaagatgtctgagttgcgagtcactctggatccagtgcagctagagtccagtctcctaagatcaaaggctatgctgaatgaggtggagaagcgccgctccctgctggaaatattgaatagtgctgctgacattctgatcaattcttcagaagcagatgaggatggaatccgggatgagaaggctgggatcaaccagaacatggatgctgttacagaagagctgcaggccaaaacagggtcactcgaagaaatgactcagaggctcagggagttccaggaaagctttaagaatattgaaaagaaggttgaaggagccaaacaccaacttgagatctttgatgctctgggttctcaagcctgtagcaacaagaacctggagaagctaagagctcaacaggaagtgctgcaggccctagagcctcaggtagactatctgaggaactttactcagggtctggtagaagatgccccagatggatctgatgcttctcaacttctccaccaagctgaggtcgcccagcaagagttcctcgaagttaagcaaagagtgaacagtggttgtgtgatgatggaaaacaagctggaggggattggccagtttcactgccgggtccgagagatgttctctcaattggcagacctggatgatgagctagatggcatgggtgctattggcagagacactgatagcctccagtcccaaatcgaggatgtccggctattccttaacaaaattcacgtcctcaaattagacatagaggcctctgaagcagagtgtcgacatatgctagaagaagaggggactctggatttgttaggtctcaaaagggagctagaagccctgaacaaacagtgtggcaaactgacagagagggggaaagctcgtcaggaacagctggaactgacactaggccgtgtagaggacttctacaggaaattgaaaggactcaatgacgcgaccacagcagcagaggaggcagaggccctccagtgggtagtggggaccgaagtggaaatcatcaaccaacaattagcagattttaaaatgtttcagaaagaacaagtggatcctcttcagatgaaattgcagcaggtgaatggacttggccagggattaattcagagtgcaggaaaagactgtgatgtacagggtttagaacatgacatggaagagatcaatgctcgatggaatacattgaataaaaaggtcgcacaaagaattgcacagctacaggaagctttgttgcattgtgggaagtttcaagatgccttggagccattgctcagctggttggcagataccgaggagctcatagccaatcagaaacctccatctgctgagtataaagtggtgaaagcacagatccaagaacagaagttgctccagcggctcctagatgatcgaaaggccacagtagacatgcttcaagcagaaggaggcagaatagcccagtcagcagagctggctgatagagagaaaatcactggacagctggagagtcttgaaagtagatggactgaactactcagtaaggcagcagccaggcaaaaacagctggaagacatcctggttctggccaaacagttccatgagacagctgagcctatttctgacttcttatctgtcacagagaaaaagcttgctaactcagaacctgttggcactcagactgccaaaatacagcagcagatcattcggcacaaggctctggaagaagacatagaaaaccatgcaacagatgtgcaccaggcagtcaaaattgggcagtccctctcctccctgacatctcctgcagaacagggtgtgctgtcagaaaagatagactcattgcaggcccgatacagtgaaattcaagaccgctgttgtcggaaggcagccctacttgaccaagctctgtctaatgctaggctgtttggggaggatgaggtggaggtgctcaactggctggctgaggttgaggacaagctcagttcagtgttcgtaaaggatttcaaacaggatgtcctgcacaggcagcatgctgaccacctggctttaaatgaagaaattgttaatagaaagaagaatgtagatcaagctattaaaaatggtcaggctcttctaaaacaaaccacaggtgaggaggtgttacttatccaggaaaaactagatggtataaagactcgttacgcagacatcacagttactagctccaaggccctcagaactttagagcaagcccggcagctggccaccaagttccagtctacttatgaggaactgaccgggtggctgagggaggtggaggaggagctggcaaccagtggaggacagtctcccacaggggaacagataccccagtttcagcagagacagaaggaattaaagaaggaggtcatggagcacaggctggtgttggacacagtgaatgaggtgagccgtgctctcttagagctggtgccctggagagccagagaagggctggataaacttgtgtccgatgctaacgagcagtacaaactagtcagtgacactattggacaaagggtggatgaaattgatgctgctattcagagatcacaacagtatgagcaagctgccgatgcagaactagcttgggttgctgaaacaaaacggaaactgatggctctgggtccaattcgcctggaacaggaccagaccacagctcagcttcaggtacagaaggctttctccattgacattattcgacacaaagattcaatggatgaactcttcagtcaccgtagtgaaatctttggcacatgtggggaggagcaaaaaactgtattacaggaaaagacagagtctctaatacagcaatatgaagccattagcctactcaattcagagcgttatgcccgcctagagcgggcccaggtcttagtaaaccagttttgggaaacttatgaagagctcagcccctggattgaggaaactcgggcactaatagcacagttaccctctccagccattgatcatgagcagctcaggcagcaacaagaggaaatgaggcaattaagggaatctattgctgaacacaaacctcatattgacaaactactaaagataggcccacaactaaaggaattaaaccctgaggaaggggaaatggtggaagaaaaataccagaaagcagaaaacatgtatgcccaaataaaggaggaggtgcgccagcgagccctggctctggatgaagccgtgtcccagtccacacaggtatgtgttttcatgataaaattgagcctatgttggagacactggagaatctttcctctcgcctgcgtatgccaccactgatccctgctgaagtagacaagatcagagagtgcatcagtgacaataagagtgccaccgtggagctagaaaaactgcagccatcctttgaggccttgaagcgccgtggagaggagcttattggacgatctcagggagcagacaaggatctggctgcaaaagaaatccaggataaattggatcaaatggtattcttctgggaggacatcaaagctcgggctgaagaacgagaaatcaaatttcttgatgtccttgaattagcagagaagttctggtatgacatggcagctctcctgaccaccatcaaagacacccaggatattgtccatgacttggaaagcccaggcattgatccttccatcatcaaacaacaggttgaagctgctgagactattaaggaagagacagatggtctgcatgaagagctggagtttattcggatccttggagcagatttgatttttgcctgtggagaaactgagaagcctgaagtgaggaagagcattgatgagatgaataatgcttgggagaacttaaacaaaacatggaaagagaggctagaaaaacttgaggatgctatgcaagctgctgtgcagtatcaggacactcttcaggctatgtttgactggctagataacactgtgattaaactctgcaccatgccccctgttggcactgacctcaatactgttaaagatcagttaaatgaaatgaaggagttcaaagtagaagtttaccaacagcaaattgagatggagaagcttaatcaccagggtgaactgatgttaaagaaagctactgatgagacggacagagacattatacgagaaccactgacagaactcaaacacctctgggagaacctgggtgagaaaattgcccaccgacagcacaaactagaaggggctctgttggcccttggtcagttccagcatgccttagaggaactaatgagttggctgactcataccgaagagttgttagatgctcagagaccaataagtggagacccaaaagtcattgaagttgagctcgcaaagcaccatgtcctaaaaaatgatgttttggctcatcaagccacagtggaaacagtcaacaaagctggcaatgagcttcttgaatccagtgctggagatgatgccagcagcttaaggagccgtttggaagccatgaaccaatgctgggagtcagtgttacagaaaacagaggagagggagcagcagcttcagtcaactctgcagcaggcccagggcttccacagtgaaattgaagatttcctcttggaacttactagaatggagagccagctttctgcatctaagcccacaggaggacttcctgaaactgctagggaacagcttgatacacatatggaactctattcccagctgaaagccaaggaagagacttataatcaactacttgacaagggcagactcatgcttctaagccgtgacgactctgggtctggctccaagacagaacagagtgtagcacttttggagcagaagtggcatgtggtcagcagtaagatggaagaaagaaagtcaaagctggaagaggccctcaacttggcaacagaattccagaattccctacaagaatttatcaactggctcactctagcagagcagagtttaaacatcgcttctccaccaagcctgattctaaatactgtcctttcccagatagaagagcacaaggtttttgctaatgaagtaaatgctcatcgagaccagatcattgagctggatcaaactgggaatcaattaaagttccttagccaaaagcaggatgttgttctgatcaagaatttgttggtgagcgtgcagtctcgatgggagaaggttgtccagcgatctattgaaagagggcgatcactagatgatgccaggaagcgggcaaaacaattccatgaagcttggaaaaaactgattgactggctagaagatgcagagagtcacctggactcagaactagagatatccaatgacccagacaaaattaaacttcagctttctaagcataaggagtttcagaagactcttggtggcaagcagcctgtgtatgataccacaattagaactggcagagcactgaaagaaaagactttgcttcccgaagatagtcagaaacttgacaatttcctaggagaagtcagagacaaatgggatactgtttgtggcaagtctgtggagcggcagcacaagttggaggaagccctgctcttttcgggtcagttcatggatgctttgcaggcattggttgactggttatacaaggtggagccacagctggctgaggaccagcccgtgcacggggaccttgacctcgtcatgaacctcatggatgcacacaaggttttccagaaggaactgggaaagcgaacaggaaccgttcaggtcctgaagcggtcaggccgagagctgattgagaatagtcgagatgacaccacttgggtaaaaggacagctccaggaactgagcactcgctgggacactgtctgtaaactctctgtttccaaacaaagccggcttgagcaggccttaaaacaagcggaagtgtttcgagacacagtccacatgctgttggagtggctttctgaagcagagcaaacgcttcgctttcggggagcacttcctgatgacacagaggccctgcagtctctcattgacacccataaggaattcatgaagaaagtagaagaaaagcgagtggacgttaactcagcagtagccatgggagaagtcatcctggctgtctgccaccccgattgcatcacaaccatcaaacactggatcaccatcatccgagctcgcttcgaggaggtcctgacatgggctaagcagcaccagcagcgtcttgaaacggccttgtcagaactggtggctaatgctgagctcctggaagaacttctggcatggatccagtgggctgagaccaccctcattcagcgggatcaggagccaatcccgcagaacattgaccgagttaaagcccttatcgctgagcatcagacatttatggaggagatgactcgcaaacagcctgacgtggaccgggtcaccaagacatacaaaaggaaaaacatagagcctactcacgcgcctttcatagagaaatcccgcagcggaggcaggaaatccctaagtcagccaacccctcctcccatgccaatcctttcacagtctgaagcaaaaaacccacggatcaaccagctttctgcccgctggcagcaggtgtggctgttagcactggagcggcaaaggaaactgaatgatgccttggatcggctggaggagttgaaagaatttgccaactttgactttgatgtctggaggaaaaagtatatgcgttggatgaatcacaaaaagtctcgagtgatggatttcttccggcgcattgataaggaccaggatgggaagataacacgtcaggagtttatcgatggcattttagcatccaagttccccaccaccaagttagagatgactgctgtggctgacattttcgaccgagatggggatggttacattgattattatgaatttgtggctgctcttcatcccaacaaggatgcgtatcgaccaacaaccgatgcagataaaatcgaagatgaggttacaagacaagtggctcagtgcaaatgtgcaaaaaggtttcaggtggagcagatcggagagaataaataccggtttggggattctcagcagttgcggctggtccgtattctgcgcagcaccgtgatggttcgcgttggtggaggatggatggccttggatgaatttttagtgaaaaatgatccctgccgagcacgaggtagaactaacattgaacttagagagaaattcatcctaccagagggagcatcccagggaatgacccccttccgctcacggggtcgaaggtccaaaccatcttcccgggcagcttcccctactcgttccagctccagtgctagtcagagtaaccacagctgtacatccatgccatcttctccagccaccccagccagtggaaccaaggttatcccatcatcaggtagcaagttgaaacgaccaacaccaacttttcattctagtcggacatcccttgctggtgataccagcaatagttcttccccggcctccacaggtgccaaaactaatcgggcagaccctaaaaagtctgccagtcgccctgggagtcgggctgggagtcgagccgggagtcgagccagcagccggcgaggaagtgacgcttctgactttgacctcttagagacgcagtctgcttgttccgacacttcagaaagcagcgctgcagggggccaaggcaactccaggagagggctaaacaaaccttccaaaatcccaaccatgtctaagaagaccaccactgcctcccccaggactccaggtcccaagcgataacactgtctaagcacccccaagccactatccactttgaatcctgctccatacattgggtgtatatttattctgaacgggagaagttatattgttaaaagtgtaaaagaataattgtgttatgaagctgccttattttttttctttttgtaagttactattttcatgtgaatatttatgtagataaaatttgcctcctggtaaccctgtaatggatggggcccagaaatgaaatatttgagaaaaacaagtgaaaaggtcaagatacaaatgtgtattaaaaaaaaaaaagcctattaatagggtttctgcgcggtgcagggttgtaaacctgctttatcttttaggattattcctaaatgcatcttctttataaacttgacttgctatctcagcaagataaattatattaaaaaaataagaatcctgcagtgtttaaggaactctttttttgtaaatcacggacacctcaattagcaagaactgaggggagggctttttccattgtttaatgttttgtgatttttagctaaagagagggaacctcatctaagtaacatttgcacatgatacagcaaaaggagttcattgcaatactgtctttggatattgtttcagtactgggtgtttaaaggacaaatagctgctagaattcaggggtaaatgtaagtgttcagaaaacgtcagaacatttggggttttaaactgatttgttgctccctatccagcctagacaccagtaactcttgtgttcaccaggacccagacccttggcaagggataggctcgttggtgacattgtgaatttcagatttgttttatccactttttttgctatttatttaaatggtcgatcaacttcccacaaactgaggaatgaattccacgagcctgttctgaaaatgtggacgtaagacaaacacgtgctcgtcctttaatggagttcaccagcacacttgttaaccagtcctgtttgctttcgtctttttttgtgcgtaataaagtcaactgaccaagtgaccatgaaaaggggctgtctggggctcctgttttttagctgctgttcttcagctccgaccatgttgctgtgtgattatctcaattggttttaattgaggcagaaactgaagctctaccaatgaactgtttagaaacaagacacacttttgtattaaaattgcttgcagtaacaaatattttgtatttcctgattttcttttcaactattaccttatctataaatgttaccctggggtataatcatgttgtaggtacttaaatgcattccgcaaatcaaaatatcttgatggataaattatagagcttaatag

SEQ ID NO: 2721 - protein, 4462 aa, Homo sapiens; identical to SEQ ID NO: 2719

SEQ ID NO: 2722 - DNA, 2062 bp, Homo sapiens
agtatcaactaatttgcccaaggccacacagcaagttgcagcaaacaagatttaaacctgggaatttgctatctggtcccctaagggctttataaacatgggctgagcctgccctttgcttggacccttccctcccaacccaccttccgccaaggccatcgcgactccacaagaacacagaatttgcaggcccaggaaaagaaggcagacgcctcaaacacaaaacatcttgttatgcaccaggaacaaaaactgtgcccaagaagtcaccttgcattttgtaatcagtgtaataaactccaacccacattccccaaacatgtcaggaagggctgcggaaaaaagatgtccctttaataaaacgttatcaacatatatcgtacacaaactacaatgtatcataattacttttttttcctctcttaattcagaaccagactacaaggtaagaaaaaacacagaaacagctacaatgttcccaataatccgcacaaagtcttttttcaggcagatgatatctcacataatatgatatacatggatcagaaagggagggagtaaaacaaagaccagctacaggggagggaggaaggagaagggcatgtcaatgtacaaagaattcgggtgtcttccagggcaagacacaaaggtttccgtggggtgatgaggtgagtggggccatgagcaccctcccgggaggggacaggctccactgtcgggcttgttggtttttgaaagtaaaaacaggactggagccagcacgtctgtttggttgtcggtgtccccccaccccccacagctgctccaaagtctttccatccagtcccaagcatatacagagcaattctgatcagtatcccatctttgagaaaggacgaataaagagaaaaaacaaagaaaaccggaactccagccccccaagccggtgcacacgatgacgctgatgcgaggatctcgggaccagaacgcggaggtcactgtttccatgtcccaggtcatagccatcctgtcagtggcagcctctcccactctgcgccaggccaccacccagctggcaggattctcactgggaagactggggtgggggcagaggaggggctggagaggcagggaggccaggacggaagggaggtccaggagaggaggagggtgtcctgggaacagtgcatgccaccgggtcacggtgacggtctgggctgtggtggaatcctgaaaggggtcagtggtccggcccctctggccacaggatgagggtgctgggttctggggtccaagcgtgccgctgctgttgccatggaaatcaagctagaacaaacgcgtccccactcctcccctgcctgttgcacaaaccaaaaccccaagtggaaaacggtgactgccttttcttctttccaaaaaaggccttttgaaagaaaccaacgattgtaaactgtccagtttattattattatttttgatggctacagacaatgtgggctctcacacctagactagcttttctggtggaagggcttgggcacagacagacagcagggcttctggttttccttttttttttttcctttttcctttttttttttttttaagaagaaagcatagaggttgattggggtggggggcttgctagaagcttccatttaaaaaaattttcccccaaaaaacccccctgaaaacaaataaaaaaatcccaacaatggtaaaaccccaaacaaaaaacaacaaaaaagtgtcatgtacagaaaaggtcctttggggaaagggcaaggggtgggatttttctggtcactgacttgaaatacatttttgagagttttgtccttcttgttttatggaataaaaagtttggcctttttattgcatgaaactaaaattgggaaaggtagggggcgtggatggggtgggagggggttgaggggagcagggagatgccctccccaccagctcctggataatgacacctcacttcttgcataatttctggcatcttcccgcctgcaatgcctgctctctcagcgtctcggagaaggggggatcacacactcatcgtcatgcttggagaata

SEQ ID NO: 2723 - protein, 92 aa, Homo sapiens [sequence omitted]

SEQ ID NO: 2724 - DNA, 1697 bp, Homo sapiens
tattctccaagcatgacgatgagtgtgtgatccccccttctccgagacgctgagagagcaggcattgcaggcgggaagatgccagaaattatgcaagaagtgaggtgtcattatccaggagctggtggggagggcatctccctgctcccctcaaccccctcccaccccatccacgccccctacctttcccaattttagtttcatgcaataaaaaggccaaactttttattccataaaacaagaaggacaaaactctcaaaaatgtatttcaagtcagtgaccagaaaaatcccaccccccaatcaacctctatgctttcttcttaaaaaaaaaaaaaaaggaaaaaggaaaaaaaaaaaaggaaaaccagaagccctgctgtctgtctgtgcccaagcccttccaccagaaaagctagtctaggtgtgagagcccacattgtctgtagccatcaaaaataataataataaactggacagtttacaatcgttggtttctttcaaaaggccttttttggaaagaagaaaaggcagtcaccgttttccacttggggttttggtttgtgcaacaggcaggggaggagtggggacgcgtttgttctagcttgatttccatggcaacagcagcggcacgcttggaccccagaacccagcaccctcatcctgtggccagaggggccggaccactgacccctttcaggattccaccacagcccagaccgtcaccgtgacccggtggcatgcactgttcccaggacaccctcctcctctcctggacctcccttccgtcctggcctccctgcctctccagcccctcctctgcccccaccccagtcttcccagtgagaatcctgccagctgggtggtggcctggcgcagagtgggagaggctgccactgacaggatggctatgacctgggacatggaaacagtgacctccgcgttctggtcccgagatcctcgcatcagcgtcatcgtgtgcaccggcttggggggctggagttccggttttctttgttttttctctttattcgtcctttctcaaagatgggatactgatcagaattgctctgtatatgcttgggactggatggaaagactttggagcagctgtggggggtggggggacaccgacaaccaaacagacgtgctggctccagtcctgtttttactttcaaaaaccaacaagcccgacagtggagcctgtcccctcccgggagggtgctcatggccccactcacctcatcaccccacggaaacctttgtgtcttgccctggaagacacccgaattctttgtacattgacatgcccttctccttcctccctcccctgtagctggtctttgttttactccctccctttctgatccatgtatatcatattatgtgagatatcatctgcctgaaaaaagactttgtgcggattattgggaacattgtagctgtttctgtgttttttcttaccttgtagtctggttctgaattaagagaggaaaaaaaagtaattatgatacattgtagtttgtgtacgatatatgttgataacgttttattaaagggacatcttttttccgcagcccttcctgacatgtttggggaatgtgggttggagtttattacactgattacaaaatgcaaggtgacttcttgggcacagtttttgttcctggtgcataacaagatgttttgtgtttgagg

SEQ ID NO: 2725 - protein, 53 aa, Homo sapiens
MYFKSVTRKIPPPNQPLCFLLKKKKKGKRKKKKGKPEALLSVCAQALPPEKLV

SEQ ID NO: 2726 - DNA, 2034 bp, Homo sapiens
aaaagttaaaatattttttattaaaagtttttttaaattttttaaaaaataaaaaaagttttattgttttttattctttattttatttttttgagggtttacttctagcctaggcaacagagcaagacgctatctcaacaaacaaaacaaaaaaaaactcacacacacatagtgatgatccctgagtgcagaaatggagttttctccggcttcccagcatcatgtctgtggagggcctctgatgctgacacatgggtggggtaggactaccacctggacctggggcaggttggcgtgtctgtatgtgccaggcctgggcctgcaccagcctcgggcaggcttctcaggagtgcctgctcccatccacattgacactcacccctcgcctccctgcctcctcacctcagagcctctcaatgggttccaagaccaagtccatcccctcttacccgcctgagcccagggggaaggtacaggatgacatcatgggagcccagagagggcagcggcttgctggatagccacatgtttttgagaacttcatcttgaaagctcctgaaaatgcactgaatgttgtgactgtccctctgtgctggcttgtcattgtggtccctgtgacttggttcccacccgccccaatcaacctctatgctttcttcttaaaaaaaaaaaaaaaggaaaaaggaaaaaaaaaaaaggaaaaccagaagccctgctgtctgtctgtgcccaagcccttccaccagaaaagctagtctaggtgtgagagcccacattgtctgtagccatcaaaaataataataataaactggacagtttacaatcgttggtttctttcaaaaggccttttttggaaagaagaaaaggcagtcaccgttttccacttggggttttggtttgtgcaacaggcaggggaggagtggggacgcgtttgttctagcttgatttccatggcaacagcagcggcacgcttggaccccagaacccagcaccctcatcctgtggccagaggggccggaccactgacccctttcaggattccaccacagcccagaccgtcaccgtgacccggtggcatgcactgttcccaggacaccctcctcctctcctggacctcccttccgtcctggcctccctgcctctccagcccctcctctgcccccaccccagtcttcccagtgagaatcctgccagctgggtggtggcctggcgcagagtgggagaggctgccactgacaggatggctatgacctgggacatggaaacagtgacctccgcgttctggtcccgagatcctcgcatcagcgtcatcgtgtgcaccggcttggggggctggagttccggttttctttgttttttctctttattcgtcctttctcaaagatgggatactgatcagaattgctctgtatatgcttgggactggatggaaagactttggagcagctgtggggggtggggggacaccgacaaccaaacagacgtgctggctccagtcctgtttttactttcaaaaaccaacaagcccgacagtggagcctgtcccctcccgggagggtgctcatggccccactcacctcatcaccccacggaaacctttgtgtcttgccctggaagacacccgaattctttgtacattgacatgcccttctccttcctccctcccctgtagctggtctttgttttactccctccctttctgatccatgtatatcatattatgtgagatatcatctgcctgaaaaaagactttgtgcggattattgggaacattgtagctgtttctgtgttttttcttaccttgtagtctggttctgaattaagagaggaaaaaaaagtaattatgatacattgtagtttgtgtacgatatatgttgataacgttttattaaagggacatcttttttccgcagcccttcctgacatgtttggggaatgtgggttggagtttattacactgattacaaaatgcaaggtgacttcttgggcacagtttttgttcctggtgcataacaagatgttttgtgtttgagg

SEQ ID NO: 2727 - protein, 143 aa, Homo sapiens
MAMTWDMETVTSAFWSRDPRISVIVCTGLGGWSSGFLCFFSLFVLSQRWDTDQNCSVYAWDWMERLWSSCGGWGDTDNQTDVLAPVLFLLSKTNKPDSGACPLPGGCSWPHSPHHPTETFVSCPGRHPNSLYIDMPFSFLPPL

SEQ ID NO: 2728 - DNA, 3035 bp, Homo sapiens
acttcctgaaatggagagaaggcgagtggacacccgatgacttgtagatatgtgggtagaatgctggagggagaagcggctcctggggcacccgtgcttggccccctttggatgtcggctccctttgcagctcctaagctctgtgtttggggtgggagcggctgcgaggcggtggggggcttgtttggcagacggcgcccatcagacaactggaaagtgccagtgcctgcgtggccatctgtccccgccgcctagctcccggccgccttctgcttcccacagaagggcccgcgctgttctgtagcacaagggcacggggcctggccgggaggggcaggcacagttccattttgccattgtttattcccatctcctttgcagctcctgcgcttgggagttgccagagtgcagcagctgccccgagccccgtgcttggcaacattccccccaacgatgggatgccgggaggccccatcccgccaggtttctttcagccttttatgtcaccgcgatacgcaggcggccccaggcccccgatcagaatgggaaaccagcctccgggaggagttcctgggacacagccattgctgcccaattctatggatcccacacgacaacaaggccaccccaacatgggaggatcaatgcagagaatgaaccctccccgaggcatggggcccatgggtcccggcccacagaattacggcagcggcatgagaccaccacccaactccctcggccccgccatgcccgggattaacatgggcccgggagctggcagaccctggcccaatcctaacagtgctaactcaattccatactcctcctcatcacctggtacctatgtgggaccccctggtggtggcggtcctccaggaacacccattatgcccagtcccgcagattcaacaaattccagtgacaacatctacacaatgattaatccagtgccgcctggaggcagccggtccaacttcccgatgggtcccggctcggacggtccgatgggcggcatgggtggcatggagccacaccacatgaatggatcattagggtcaggcgacatagacggacttccaaaaaattctcctaacaacataagtggcattagcaatcctccaggcacccctcgagatgacggcgagctaggagggaacttcctccactcctttcagaacgacaattattctccaagcatgacgatgagtgtgtgatccccccttctccgagacgctgagagagcaggcattgcaggcgggaagatgccagaaattatgcaagaagtgaggtgtcattatccaggagctggtggggagggcatctccctgctcccctcaaccccctcccaccccatccacgccccctacctttcccaattttagtttcatgcaataaaaaggccaaactttttattccataaaacaagaaggacaaaactctcaaaaatgtatttcaagtcagtgaccagaaaaatcccaccccttgccctttccccaaaggaccttttctgtacatgacacttttttgttgttttttgtttggggttttaccattgttgggatttttttatttgttttcaggggggttttttgggggaaaatttttttaaatggaagcttctagcaagccccccaccccaatcaacctctatgctttcttcttaaaaaaaaaaaaaaaggaaaaaggaaaaaaaaaaaaggaaaaccagaagccctgctgtctgtctgtgcccaagcccttccaccagaaaagctagtctaggtgtgagagcccacattgtctgtagccatcaaaaataataataataaactggacagtttacaatcgttggtttctttcaaaaggccttttttggaaagaagaaaaggcagtcaccgttttccacttggggttttggtttgtgcaacaggcaggggaggagtggggacgcgtttgttctagcttgatttccatggcaacagcagcggcacgcttggaccccagaacccagcaccctcatcctgtggccagaggggccggaccactgacccctttcaggattccaccacagcccagaccgtcaccgtgacccggtggcatgcactgttcccaggacaccctcctcctctcctggacctcccttccgtcctggcctccctgcctctccagcccctcctctgcccccaccccagtcttcccagtgagaatcctgccagctgggtggtggcctggcgcagagtgggagaggctgccactgacaggatggctatgacctgggacatggaaacagtgacctccgcgttctggtcccgagatcctcgcatcagcgtcatcgtgtgcaccggcttggggggctggagttccggttttctttgttttttctctttattcgtcctttctcaaagatgggatactgatcagaattgctctgtatatgcttgggactggatggaaagactttggagcagctgtggggggtggggggacaccgacaaccaaacagacgtgctggctccagtcctgtttttactttcaaaaaccaacaagcccgacagtggagcctgtcccctcccgggagggtgctcatggccccactcacctcatcaccccacggaaacctttgtgtcttgccctggaagacacccgaattctttgtacattgacatgcccttctccttcctccctcccctgtagctggtctttgttttactccctccctttctgatccatgtatatcatattatgtgagatatcatctgcctgaaaaaagactttgtgcggattattgggaacattgtagctgtttctgtgttttttcttaccttgtagtctggttctgaattaagagaggaaaaaaaagtaattatgatacattgtagtttgtgtacgatatatgttgataacgttttattaaagggacatcttttttccgcagcccttcctgacatgtttggggaatgtgggttggagtttattacactgattacaaaatgcaaggtgacttcttgggcacagtttttgttcctggtgcataacaagatgttttgtgtttgagg

SEQ ID NO: 2729 - protein, 251 aa, Homo sapiens
MPGGPIPPGFFQPFMSPRYAGGPRPPIRMGNQPPGGVPGTQPLLPNSMDPTRQQGHPNMGGSMQRMNPPRGMGPMGPGPQNYGSGMRPPPNSLGPAMPGINMGPGAGRPWPNPNSANSIPYSSSSPGTYVGPPGGGGPPGTPIMPSPADSTNSSDNIYTMINPVPPGGSRSNFPMGPGSDGPMGGMGGMEPHHMNGSLGSGDIDGLPKNSPNNISGISNPPGTPRDDGELGGNFLHSFQNDNYSPSMTMSV

SEQ ID NO: 2730 - DNA, 3360 bp, Homo sapiens
ggcggcggcggcggcggcagcggtgctggaggcgcagagggcggcgcaggcggagccgggcgggcgcgcgagcgagcggagagcgggcggccgtgcgggcggcggcggcggcacccccaggccgagccggcgcggaaggagttccagggcgatggggccgcggccggggctgacgctttgacagctggaaagagcgcggagccagcgcctgggggggagggaggggagcgcggcgaggagagcgccagcgagcgagagagcgagcgagcgccggggagggggccgggagcgaggggcagctcgggagagccggagcggtagcggcggcggcggcggcggcggcgaggctcggcgccctcttccctgcaaaccatgtttgccaaaggcaaaggctcggcggtgccctcggatgggcaggctcgggaaaagttagctttatacgtctacgaatatttactgcacgtaggagcacagaaatctgcacagaccttcttatcggagattcgatgggaaaaaaacatcacgttgggagaaccgcctgggtttttgcactcgtggtggtgtgtattttgggacctttactgtgcagctcctgaaaggagagacacttgtgaacattcaagtgaagcaaaagcctttcatgattatagtgcagcagctgccccgagccccgtgcttggcaacattccccccaacgatgggatgccgggaggccccatcccgccaggtttctttcagggtcctccggggtcacagccctcgccgcacgcacagcctccacctcacaatcctagcagcatgatgggaccccacagtcagccttttatgtcaccgcgatacgcaggcggccccaggcccccgatcagaatgggaaaccagcctccgggaggagttcctgggacacagccattgctgcccaattctatggatcccacacgacaacaaggccaccccaacatgggaggatcaatgcagagaatgaaccctccccgaggcatggggcccatgggtcccggcccacagaattacggcagcggcatgagaccaccacccaactccctcggccccgccatgcccgggattaacatgggcccgggagctggcagaccctggcccaatcctaacagtgctaactcaattccatactcctcctcatcacctggtacctatgtgggaccccctggtggtggcggtcctccaggaacacccattatgcccagtcccgcagattcaacaaattccagtgacaacatctacacaatgattaatccagtgccgcctggaggcagccggtccaacttcccgatgggtcccggctcggacggtccgatgggcggcatgggtggcatggagccacaccacatgaatggatcattagggtcaggcgacatagacggacttccaaaaaattctcctaacaacataagtggcattagcaatcctccaggcacccctcgagatgacggcgagctaggagggaacttcctccactcctttcagaacgacaattattctccaagcatgacgatgagtgtgtgatccccccttctccgagacgctgagagagcaggcattgcaggcgggaagatgccagaaattatgcaagaagtgaggtgtcattatccaggagctggtggggagggcatctccctgctcccctcaaccccctcccaccccatccacgccccctacctttcccaattttagtttcatgcaataaaaaggccaaactttttattccataaaacaagaaggacaaaactctcaaaaatgtatttcaagtcagtgaccagaaaaatcccaccccttgccctttccccaaaggaccttttctgtacatgacacttttttgttgttttttgtttggggttttaccattgttgggatttttttatttgttttcaggggggttttttgggggaaaatttttttaaatggaagcttctagcaagccccccaccccaatcaacctctatgctttcttcttaaaaaaaaaaaaaaaggaaaaaggaaaaaaaaaaaaggaaaaccagaagccctgctgtctgtctgtgcccaagcccttccaccagaaaagctagtctaggtgtgagagcccacattgtctgtagccatcaaaaataataataataaactggacagtttacaatcgttggtttctttcaaaaggccttttttggaaagaagaaaaggcagtcaccgttttccacttggggttttggtttgtgcaacaggcaggggaggagtggggacgcgtttgttctagcttgatttccatggcaacagcagcggcacgcttggaccccagaacccagcaccctcatcctgtggccagaggggccggaccactgacccctttcaggattccaccacagcccagaccgtcaccgtgacccggtggcatgcactgttcccaggacaccctcctcctctcctggacctcccttccgtcctggcctccctgcctctccagcccctcctctgcccccaccccagtcttcccagtgagaatcctgccagctgggtggtggcctggcgcagagtgggagaggctgccactgacaggatggctatgacctgggacatggaaacagtgacctccgcgttctggtcccgagatcctcgcatcagcgtcatcgtgtgcaccggcttggggggctggagttccggttttctttgttttttctctttattcgtcctttctcaaagatgggatactgatcagaattgctctgtatatgcttgggactggatggaaagactttggagcagctgtggggggtggggggacaccgacaaccaaacagacgtgctggctccagtcctgtttttactttcaaaaaccaacaagcccgacagtggagcctgtcccctcccgggagggtgctcatggccccactcacctcatcaccccacggaaacctttgtgtcttgccctggaagacacccgaattctttgtacattgacatgcccttctccttcctccctcccctgtagctggtctttgttttactccctccctttctgatccatgtatatcatattatgtgagatatcatctgcctgaaaaaagactttgtgcggattattgggaacattgtagctgtttctgtgttttttcttaccttgtagtctggttctgaattaagagaggaaaaaaaagtaattatgatacattgtagtttgtgtacgatatatgttgataacgttttattaaagggacatcttttttccgcagcccttcctgacatgtttggggaatgtgggttggagtttattacactgattacaaaatgcaaggtgacttcttgggcacagtttttgttcctggtgcataacaagatgttttgtgtttgagg

SEQ ID NO: 2731 - protein, 388 aa, Homo sapiens; identical to SEQ ID NO: 83

SEQ ID NO: 2732 - DNA, 1576 bp, Homo sapiens
tattctccaagcatgacgatgagtgtgtgatccccccttctccgagacgctgagagagcaggcattgcaggcgggaagatgccagaaattatgcaagaagtgaggtgtcattatccaggagctggtggggagggcatctccctgctcccctcaaccccctcccaccccatccacgccccctacctttcccaattttagtttcatgcaataaaaaggccaaactttttattccataaaacaagaaggacaaaactctcaaaaatgtatttcaagtcagtgaccagaaaaatcccaccccccaatcaacctctatgctttcttcttaaaaaaaaaaaaaaaggaaaaaggaaaaaaaaaaaaggaaaaccagaagccctgctgtctgtctgtgcccaagcccttccaccagaaaagctagtctaggtgtgagagcccacattgtctgtagccatcaaaaataataataataaactggacagtttacaatcgttggtttctttcaaaaggccttttttggaaagaagaaaaggcagtcaccgttttccacttggggttttggtttgtgcaacaggcaggggaggagtggggacgcgtttgttctagcttgatttccatggcaacagcagcggcacgcttggaccccagaacccagcaccctcatcctgtggccagaggggccggaccactgacccctttcaggattccaccacagcccagaccgtcaccgtgacccggtggcatgcactgttcccaggacaccctcctcctctcctggacctcccttccgtcctggcctccctgcctctccagcccctcctctgcccccaccccagtcttcccagtgagaatcctgccagctgggtggtggcctggcgcagagtgggagaggctgccactgacaggatggctatgacctgggacatggaaacagtgacctccgcgttctggtcccgagatcctcgcatcagcgtcatcgtgtgcaccggcttggggggctggagttccggttttctttgttttttctctttattcgtcctttctcaaagatgggatactgatcagaattgctctgtatatgcttgggactggatggaaagactttggagcagctgtggggggtggggggacaccgacaaccaaacagacgtgctggctccagtcctgtttttactttcaaaaaccaacaagcccgacagtggagcctgtcccctcccgggagggtgctcatggccccactcacctcatcaccccacggaaacctttgtgtcttgccctggaagacacccgaattctttgtacattgacatgcccttctccttcctccctcccctgtagctggtctttgttttactccctccctttctgatccatgtatatcatattatgtgagatatcatctgcctgaaaaaagactttgtgcggattattgggaacattgtagctgtttctgtgttttttcttaccttgtagtctggttctgaattaagagaggaaaaaaaagtaattatgatacattgtagtttgtgtacgatatatgttgataacgttttattaaagggacatcttttttccgcag

SEQ ID NO: 2733 - protein, 53 aa, Homo sapiens; identical to SEQ ID NO: 2725

SEQ ID NO: 2734 - DNA, 1913 bp, Homo sapiens
aaaagttaaaatattttttattaaaagtttttttaaattttttaaaaaataaaaaaagttttattgttttttattctttattttatttttttgagggtttacttctagcctaggcaacagagcaagacgctatctcaacaaacaaaacaaaaaaaaactcacacacacatagtgatgatccctgagtgcagaaatggagttttctccggcttcccagcatcatgtctgtggagggcctctgatgctgacacatgggtggggtaggactaccacctggacctggggcaggttggcgtgtctgtatgtgccaggcctgggcctgcaccagcctcgggcaggcttctcaggagtgcctgctcccatccacattgacactcacccctcgcctccctgcctcctcacctcagagcctctcaatgggttccaagaccaagtccatcccctcttacccgcctgagcccagggggaaggtacaggatgacatcatgggagcccagagagggcagcggcttgctggatagccacatgtttttgagaacttcatcttgaaagctcctgaaaatgcactgaatgttgtgactgtccctctgtgctggcttgtcattgtggtccctgtgacttggttcccacccgccccaatcaacctctatgctttcttcttaaaaaaaaaaaaaaaggaaaaaggaaaaaaaaaaaaggaaaaccagaagccctgctgtctgtctgtgcccaagcccttccaccagaaaagctagtctaggtgtgagagcccacattgtctgtagccatcaaaaataataataataaactggacagtttacaatcgttggtttctttcaaaaggccttttttggaaagaagaaaaggcagtcaccgttttccacttggggttttggtttgtgcaacaggcaggggaggagtggggacgcgtttgttctagcttgatttccatggcaacagcagcggcacgcttggaccccagaacccagcaccctcatcctgtggccagaggggccggaccactgacccctttcaggattccaccacagcccagaccgtcaccgtgacccggtggcatgcactgttcccaggacaccctcctcctctcctggacctcccttccgtcctggcctccctgcctctccagcccctcctctgcccccaccccagtcttcccagtgagaatcctgccagctgggtggtggcctggcgcagagtgggagaggctgccactgacaggatggctatgacctgggacatggaaacagtgacctccgcgttctggtcccgagatcctcgcatcagcgtcatcgtgtgcaccggcttggggggctggagttccggttttctttgttttttctctttattcgtcctttctcaaagatgggatactgatcagaattgctctgtatatgcttgggactggatggaaagactttggagcagctgtggggggtggggggacaccgacaaccaaacagacgtgctggctccagtcctgtttttactttcaaaaaccaacaagcccgacagtggagcctgtcccctcccgggagggtgctcatggccccactcacctcatcaccccacggaaacctttgtgtcttgccctggaagacacccgaattctttgtacattgacatgcccttctccttcctccctcccctgtagctggtctttgttttactccctccctttctgatccatgtatatcatattatgtgagatatcatctgcctgaaaaaagactttgtgcggattattgggaacattgtagctgtttctgtgttttttcttaccttgtagtctggttctgaattaagagaggaaaaaaaagtaattatgatacattgtagtttgtgtacgatatatgttgataacgttttattaaagggacatcttttttccgcag

SEQ ID NO: 2735 - protein, 143 aa, Homo sapiens; identical to SEQ ID NO: 2727

SEQ ID NO: 2736 - DNA, 2914 bp, Homo sapiens
acttcctgaaatggagagaaggcgagtggacacccgatgacttgtagatatgtgggtagaatgctggagggagaagcggctcctggggcacccgtgcttggccccctttggatgtcggctccctttgcagctcctaagctctgtgtttggggtgggagcggctgcgaggcggtggggggcttgtttggcagacggcgcccatcagacaactggaaagtgccagtgcctgcgtggccatctgtccccgccgcctagctcccggccgccttctgcttcccacagaagggcccgcgctgttctgtagcacaagggcacggggcctggccgggaggggcaggcacagttccattttgccattgtttattcccatctcctttgcagctcctgcgcttgggagttgccagagtgcagcagctgccccgagccccgtgcttggcaacattccccccaacgatgggatgccgggaggccccatcccgccaggtttctttcagccttttatgtcaccgcgatacgcaggcggccccaggcccccgatcagaatgggaaaccagcctccgggaggagttcctgggacacagccattgctgcccaattctatggatcccacacgacaacaaggccaccccaacatgggaggatcaatgcagagaatgaaccctccccgaggcatggggcccatgggtcccggcccacagaattacggcagcggcatgagaccaccacccaactccctcggccccgccatgcccgggattaacatgggcccgggagctggcagaccctggcccaatcctaacagtgctaactcaattccatactcctcctcatcacctggtacctatgtgggaccccctggtggtggcggtcctccaggaacacccattatgcccagtcccgcagattcaacaaattccagtgacaacatctacacaatgattaatccagtgccgcctggaggcagccggtccaacttcccgatgggtcccggctcggacggtccgatgggcggcatgggtggcatggagccacaccacatgaatggatcattagggtcaggcgacatagacggacttccaaaaaattctcctaacaacataagtggcattagcaatcctccaggcacccctcgagatgacggcgagctaggagggaacttcctccactcctttcagaacgacaattattctccaagcatgacgatgagtgtgtgatccccccttctccgagacgctgagagagcaggcattgcaggcgggaagatgccagaaattatgcaagaagtgaggtgtcattatccaggagctggtggggagggcatctccctgctcccctcaaccccctcccaccccatccacgccccctacctttcccaattttagtttcatgcaataaaaaggccaaactttttattccataaaacaagaaggacaaaactctcaaaaatgtatttcaagtcagtgaccagaaaaatcccaccccttgccctttccccaaaggaccttttctgtacatgacacttttttgttgttttttgtttggggttttaccattgttgggatttttttatttgttttcaggggggttttttgggggaaaatttttttaaatggaagcttctagcaagccccccaccccaatcaacctctatgctttcttcttaaaaaaaaaaaaaaaggaaaaaggaaaaaaaaaaaaggaaaaccagaagccctgctgtctgtctgtgcccaagcccttccaccagaaaagctagtctaggtgtgagagcccacattgtctgtagccatcaaaaataataataataaactggacagtttacaatcgttggtttctttcaaaaggccttttttggaaagaagaaaaggcagtcaccgttttccacttggggttttggtttgtgcaacaggcaggggaggagtggggacgcgtttgttctagcttgatttccatggcaacagcagcggcacgcttggaccccagaacccagcaccctcatcctgtggccagaggggccggaccactgacccctttcaggattccaccacagcccagaccgtcaccgtgacccggtggcatgcactgttcccaggacaccctcctcctctcctggacctcccttccgtcctggcctccctgcctctccagcccctcctctgcccccaccccagtcttcccagtgagaatcctgccagctgggtggtggcctggcgcagagtgggagaggctgccactgacaggatggctatgacctgggacatggaaacagtgacctccgcgttctggtcccgagatcctcgcatcagcgtcatcgtgtgcaccggcttggggggctggagttccggttttctttgttttttctctttattcgtcctttctcaaagatgggatactgatcagaattgctctgtatatgcttgggactggatggaaagactttggagcagctgtggggggtggggggacaccgacaaccaaacagacgtgctggctccagtcctgtttttactttcaaaaaccaacaagcccgacagtggagcctgtcccctcccgggagggtgctcatggccccactcacctcatcaccccacggaaacctttgtgtcttgccctggaagacacccgaattctttgtacattgacatgcccttctccttcctccctcccctgtagctggtctttgttttactccctccctttctgatccatgtatatcatattatgtgagatatcatctgcctgaaaaaagactttgtgcggattattgggaacattgtagctgtttctgtgttttttcttaccttgtagtctggttctgaattaagagaggaaaaaaaagtaattatgatacattgtagtttgtgtacgatatatgttgataacgttttattaaagggacatcttttttccgcag

SEQ ID NO: 2737 - protein, 251 aa, Homo sapiens; identical to SEQ ID NO: 2729

SEQ ID NO: 2738 - DNA, 3239 bp, Homo sapiens
ggcggcggcggcggcggcagcggtgctggaggcgcagagggcggcgcaggcggagccgggcgggcgcgcgagcgagcggagagcgggcggccgtgcgggcggcggcggcggcacccccaggccgagccggcgcggaaggagttccagggcgatggggccgcggccggggctgacgctttgacagctggaaagagcgcggagccagcgcctgggggggagggaggggagcgcggcgaggagagcgccagcgagcgagagagcgagcgagcgccggggagggggccgggagcgaggggcagctcgggagagccggagcggtagcggcggcggcggcggcggcggcgaggctcggcgccctcttccctgcaaaccatgtttgccaaaggcaaaggctcggcggtgccctcggatgggcaggctcgggaaaagttagctttatacgtctacgaatatttactgcacgtaggagcacagaaatctgcacagaccttcttatcggagattcgatgggaaaaaaacatcacgttgggagaaccgcctgggtttttgcactcgtggtggtgtgtattttgggacctttactgtgcagctcctgaaaggagagacacttgtgaacattcaagtgaagcaaaagcctttcatgattatagtgcagcagctgccccgagccccgtgcttggcaacattccccccaacgatgggatgccgggaggccccatcccgccaggtttctttcagggtcctccggggtcacagccctcgccgcacgcacagcctccacctcacaatcctagcagcatgatgggaccccacagtcagccttttatgtcaccgcgatacgcaggcggccccaggcccccgatcagaatgggaaaccagcctccgggaggagttcctgggacacagccattgctgcccaattctatggatcccacacgacaacaaggccaccccaacatgggaggatcaatgcagagaatgaaccctccccgaggcatggggcccatgggtcccggcccacagaattacggcagcggcatgagaccaccacccaactccctcggccccgccatgcccgggattaacatgggcccgggagctggcagaccctggcccaatcctaacagtgctaactcaattccatactcctcctcatcacctggtacctatgtgggaccccctggtggtggcggtcctccaggaacacccattatgcccagtcccgcagattcaacaaattccagtgacaacatctacacaatgattaatccagtgccgcctggaggcagccggtccaacttcccgatgggtcccggctcggacggtccgatgggcggcatgggtggcatggagccacaccacatgaatggatcattagggtcaggcgacatagacggacttccaaaaaattctcctaacaacataagtggcattagcaatcctccaggcacccctcgagatgacggcgagctaggagggaacttcctccactcctttcagaacgacaattattctccaagcatgacgatgagtgtgtgatccccccttctccgagacgctgagagagcaggcattgcaggcgggaagatgccagaaattatgcaagaagtgaggtgtcattatccaggagctggtggggagggcatctccctgctcccctcaaccccctcccaccccatccacgccccctacctttcccaattttagtttcatgcaataaaaaggccaaactttttattccataaaacaagaaggacaaaactctcaaaaatgtatttcaagtcagtgaccagaaaaatcccaccccttgccctttccccaaaggaccttttctgtacatgacacttttttgttgttttttgtttggggttttaccattgttgggatttttttatttgttttcaggggggttttttgggggaaaatttttttaaatggaagcttctagcaagccccccaccccaatcaacctctatgctttcttcttaaaaaaaaaaaaaaaggaaaaaggaaaaaaaaaaaaggaaaaccagaagccctgctgtctgtctgtgcccaagcccttccaccagaaaagctagtctaggtgtgagagcccacattgtctgtagccatcaaaaataataataataaactggacagtttacaatcgttggtttctttcaaaaggccttttttggaaagaagaaaaggcagtcaccgttttccacttggggttttggtttgtgcaacaggcaggggaggagtggggacgcgtttgttctagcttgatttccatggcaacagcagcggcacgcttggaccccagaacccagcaccctcatcctgtggccagaggggccggaccactgacccctttcaggattccaccacagcccagaccgtcaccgtgacccggtggcatgcactgttcccaggacaccctcctcctctcctggacctcccttccgtcctggcctccctgcctctccagcccctcctctgcccccaccccagtcttcccagtgagaatcctgccagctgggtggtggcctggcgcagagtgggagaggctgccactgacaggatggctatgacctgggacatggaaacagtgacctccgcgttctggtcccgagatcctcgcatcagcgtcatcgtgtgcaccggcttggggggctggagttccggttttctttgttttttctctttattcgtcctttctcaaagatgggatactgatcagaattgctctgtatatgcttgggactggatggaaagactttggagcagctgtggggggtggggggacaccgacaaccaaacagacgtgctggctccagtcctgtttttactttcaaaaaccaacaagcccgacagtggagcctgtcccctcccgggagggtgctcatggccccactcacctcatcaccccacggaaacctttgtgtcttgccctggaagacacccgaattctttgtacattgacatgcccttctccttcctccctcccctgtagctggtctttgttttactccctccctttctgatccatgtatatcatattatgtgagatatcatctgcctgaaaaaagactttgtgcggattattgggaacattgtagctgtttctgtgttttttcttaccttgtagtctggttctgaattaagagaggaaaaaaaagtaattatgatacattgtagtttgtgtacgatatatgttgataacgttttattaaagggacatcttttttccgcag

SEQ ID NO: 2739 - protein, 388 aa, Homo sapiens; identical to SEQ ID NO: 83

SEQ ID NO: 2740 - DNA, 1431 bp, Homo sapiens
tattctccaagcatgacgatgagtgtgtgatccccccttctccgagacgctgagagagcaggcattgcaggcgggaagatgccagaaattatgcaagaagtgaggtgtcattatccaggagctggtggggagggcatctccctgctcccctcaaccccctcccaccccatccacgccccctacctttcccaattttagtttcatgcaataaaaaggccaaactttttattccataaaacaagaaggacaaaactctcaaaaatgtatttcaagtcagtgaccagaaaaatcccaccccccaatcaacctctatgctttcttcttaaaaaaaaaaaaaaaggaaaaaggaaaaaaaaaaaaggaaaaccagaagccctgctgtctgtctgtgcccaagcccttccaccagaaaagctagtctaggtgtgagagcccacattgtctgtagccatcaaaaataataataataaactggacagtttacaatcgttggtttctttcaaaaggccttttttggaaagaagaaaaggcagtcaccgttttccacttggggttttggtttgtgcaacaggcaggggaggagtggggacgcgtttgttctagcttgatttccatggcaacagcagcggcacgcttggaccccagaacccagcaccctcatcctgtggccagaggggccggaccactgacccctttcaggattccaccacagcccagaccgtcaccgtgacccggtggcatgcactgttcccaggacaccctcctcctctcctggacctcccttccgtcctggcctccctgcctctccagcccctcctctgcccccaccccagtcttcccagtgagaatcctgccagctgggtggtggcctggcgcagagtgggagaggctgccactgacaggatggctatgacctgggacatggaaacagtgacctccgcgttctggtcccgagatcctcgcatcagcgtcatcgtgtgcaccggcttggggggctggagttccggttttctttgttttttctctttattcgtcctttctcaaagatgggatactgatcagaattgctctgtatatgcttgggactggatggaaagactttggagcagctgtggggggtggggggacaccgacaaccaaacagacgtgctggctccagtcctgtttttactttcaaaaaccaacaagcccgacagtggagcctgtcccctcccgggagggtgctcatggccccactcacctcatcaccccacggaaacctttgtgtcttgccctggaagacacccgaattctttgtacattgacatgcccttctccttcctccctcccctgtagctggtctttgttttactccctccctttctgatccatgtatatcatattatgtgagatatcatctgcctgaaaaaagactttgtgcggattattggg

SEQ ID NO: 2741 - protein, 53 aa, Homo sapiens; identical to SEQ ID NO: 2725

SEQ ID NO: 2742 - DNA, 1768 bp, Homo sapiens
aaaagttaaaatattttttattaaaagtttttttaaattttttaaaaaataaaaaaagttttattgttttttattctttattttatttttttgagggtttacttctagcctaggcaacagagcaagacgctatctcaacaaacaaaacaaaaaaaaactcacacacacatagtgatgatccctgagtgcagaaatggagttttctccggcttcccagcatcatgtctgtggagggcctctgatgctgacacatgggtggggtaggactaccacctggacctggggcaggttggcgtgtctgtatgtgccaggcctgggcctgcaccagcctcgggcaggcttctcaggagtgcctgctcccatccacattgacactcacccctcgcctccctgcctcctcacctcagagcctctcaatgggttccaagaccaagtccatcccctcttacccgcctgagcccagggggaaggtacaggatgacatcatgggagcccagagagggcagcggcttgctggatagccacatgtttttgagaacttcatcttgaaagctcctgaaaatgcactgaatgttgtgactgtccctctgtgctggcttgtcattgtggtccctgtgacttggttcccacccgccccaatcaacctctatgctttcttcttaaaaaaaaaaaaaaaggaaaaaggaaaaaaaaaaaaggaaaaccagaagccctgctgtctgtctgtgcccaagcccttccaccagaaaagctagtctaggtgtgagagcccacattgtctgtagccatcaaaaataataataataaactggacagtttacaatcgttggtttctttcaaaaggccttttttggaaagaagaaaaggcagtcaccgttttccacttggggttttggtttgtgcaacaggcaggggaggagtggggacgcgtttgttctagcttgatttccatggcaacagcagcggcacgcttggaccccagaacccagcaccctcatcctgtggccagaggggccggaccactgacccctttcaggattccaccacagcccagaccgtcaccgtgacccggtggcatgcactgttcccaggacaccctcctcctctcctggacctcccttccgtcctggcctccctgcctctccagcccctcctctgcccccaccccagtcttcccagtgagaatcctgccagctgggtggtggcctggcgcagagtgggagaggctgccactgacaggatggctatgacctgggacatggaaacagtgacctccgcgttctggtcccgagatcctcgcatcagcgtcatcgtgtgcaccggcttggggggctggagttccggttttctttgttttttctctttattcgtcctttctcaaagatgggatactgatcagaattgctctgtatatgcttgggactggatggaaagactttggagcagctgtggggggtggggggacaccgacaaccaaacagacgtgctggctccagtcctgtttttactttcaaaaaccaacaagcccgacagtggagcctgtcccctcccgggagggtgctcatggccccactcacctcatcaccccacggaaacctttgtgtcttgccctggaagacacccgaattctttgtacattgacatgcccttctccttcctccctcccctgtagctggtctttgttttactccctccctttctgatccatgtatatcatattatgtgagatatcatctgcctgaaaaaagactttgtgcggattattggg

SEQ ID NO: 2743 - protein, 143 aa, Homo sapiens; identical to SEQ ID NO: 2727

SEQ ID NO: 2744 - DNA, 2769 bp, Homo sapiens
acttcctgaaatggagagaaggcgagtggacacccgatgacttgtagatatgtgggtagaatgctggagggagaagcggctcctggggcacccgtgcttggccccctttggatgtcggctccctttgcagctcctaagctctgtgtttggggtgggagcggctgcgaggcggtggggggcttgtttggcagacggcgcccatcagacaactggaaagtgccagtgcctgcgtggccatctgtccccgccgcctagctcccggccgccttctgcttcccacagaagggcccgcgctgttctgtagcacaagggcacggggcctggccgggaggggcaggcacagttccattttgccattgtttattcccatctcctttgcagctcctgcgcttgggagttgccagagtgcagcagctgccccgagccccgtgcttggcaacattccccccaacgatgggatgccgggaggccccatcccgccaggtttctttcagccttttatgtcaccgcgatacgcaggcggccccaggcccccgatcagaatgggaaaccagcctccgggaggagttcctgggacacagccattgctgcccaattctatggatcccacacgacaacaaggccaccccaacatgggaggatcaatgcagagaatgaaccctccccgaggcatggggcccatgggtcccggcccacagaattacggcagcggcatgagaccaccacccaactccctcggccccgccatgcccgggattaacatgggcccgggagctggcagaccctggcccaatcctaacagtgctaactcaattccatactcctcctcatcacctggtacctatgtgggaccccctggtggtggcggtcctccaggaacacccattatgcccagtcccgcagattcaacaaattccagtgacaacatctacacaatgattaatccagtgccgcctggaggcagccggtccaacttcccgatgggtcccggctcggacggtccgatgggcggcatgggtggcatggagccacaccacatgaatggatcattagggtcaggcgacatagacggacttccaaaaaattctcctaacaacataagtggcattagcaatcctccaggcacccctcgagatgacggcgagctaggagggaacttcctccactcctttcagaacgacaattattctccaagcatgacgatgagtgtgtgatccccccttctccgagacgctgagagagcaggcattgcaggcgggaagatgccagaaattatgcaagaagtgaggtgtcattatccaggagctggtggggagggcatctccctgctcccctcaaccccctcccaccccatccacgccccctacctttcccaattttagtttcatgcaataaaaaggccaaactttttattccataaaacaagaaggacaaaactctcaaaaatgtatttcaagtcagtgaccagaaaaatcccaccccttgccctttccccaaaggaccttttctgtacatgacacttttttgttgttttttgtttggggttttaccattgttgggatttttttatttgttttcaggggggttttttgggggaaaatttttttaaatggaagcttctagcaagccccccaccccaatcaacctctatgctttcttcttaaaaaaaaaaaaaaaggaaaaaggaaaaaaaaaaaaggaaaaccagaagccctgctgtctgtctgtgcccaagcccttccaccagaaaagctagtctaggtgtgagagcccacattgtctgtagccatcaaaaataataataataaactggacagtttacaatcgttggtttctttcaaaaggccttttttggaaagaagaaaaggcagtcaccgttttccacttggggttttggtttgtgcaacaggcaggggaggagtggggacgcgtttgttctagcttgatttccatggcaacagcagcggcacgcttggaccccagaacccagcaccctcatcctgtggccagaggggccggaccactgacccctttcaggattccaccacagcccagaccgtcaccgtgacccggtggcatgcactgttcccaggacaccctcctcctctcctggacctcccttccgtcctggcctccctgcctctccagcccctcctctgcccccaccccagtcttcccagtgagaatcctgccagctgggtggtggcctggcgcagagtgggagaggctgccactgacaggatggctatgacctgggacatggaaacagtgacctccgcgttctggtcccgagatcctcgcatcagcgtcatcgtgtgcaccggcttggggggctggagttccggttttctttgttttttctctttattcgtcctttctcaaagatgggatactgatcagaattgctctgtatatgcttgggactggatggaaagactttggagcagctgtggggggtggggggacaccgacaaccaaacagacgtgctggctccagtcctgtttttactttcaaaaaccaacaagcccgacagtggagcctgtcccctcccgggagggtgctcatggccccactcacctcatcaccccacggaaacctttgtgtcttgccctggaagacacccgaattctttgtacattgacatgcccttctccttcctccctcccctgtagctggtctttgttttactccctccctttctgatccatgtatatcatattatgtgagatatcatctgcctgaaaaaagactttgtgcggattattggg

SEQ ID NO: 2745 - protein, 251 aa, Homo sapiens; identical to SEQ ID NO: 2729

SEQ ID NO: 2746 - DNA, 3094 bp, Homo sapiens
ggcggcggcggcggcggcagcggtgctggaggcgcagagggcggcgcaggcggagccgggcgggcgcgcgagcgagcggagagcgggcggccgtgcgggcggcggcggcggcacccccaggccgagccggcgcggaaggagttccagggcgatggggccgcggccggggctgacgctttgacagctggaaagagcgcggagccagcgcctgggggggagggaggggagcgcggcgaggagagcgccagcgagcgagagagcgagcgagcgccggggagggggccgggagcgaggggcagctcgggagagccggagcggtagcggcggcggcggcggcggcggcgaggctcggcgccctcttccctgcaaaccatgtttgccaaaggcaaaggctcggcggtgccctcggatgggcaggctcgggaaaagttagctttatacgtctacgaatatttactgcacgtaggagcacagaaatctgcacagaccttcttatcggagattcgatgggaaaaaaacatcacgttgggagaaccgcctgggtttttgcactcgtggtggtgtgtattttgggacctttactgtgcagctcctgaaaggagagacacttgtgaacattcaagtgaagcaaaagcctttcatgattatagtgcagcagctgccccgagccccgtgcttggcaacattccccccaacgatgggatgccgggaggccccatcccgccaggtttctttcagggtcctccggggtcacagccctcgccgcacgcacagcctccacctcacaatcctagcagcatgatgggaccccacagtcagccttttatgtcaccgcgatacgcaggcggccccaggcccccgatcagaatgggaaaccagcctccgggaggagttcctgggacacagccattgctgcccaattctatggatcccacacgacaacaaggccaccccaacatgggaggatcaatgcagagaatgaaccctccccgaggcatggggcccatgggtcccggcccacagaattacggcagcggcatgagaccaccacccaactccctcggccccgccatgcccgggattaacatgggcccgggagctggcagaccctggcccaatcctaacagtgctaactcaattccatactcctcctcatcacctggtacctatgtgggaccccctggtggtggcggtcctccaggaacacccattatgcccagtcccgcagattcaacaaattccagtgacaacatctacacaatgattaatccagtgccgcctggaggcagccggtccaacttcccgatgggtcccggctcggacggtccgatgggcggcatgggtggcatggagccacaccacatgaatggatcattagggtcaggcgacatagacggacttccaaaaaattctcctaacaacataagtggcattagcaatcctccaggcacccctcgagatgacggcgagctaggagggaacttcctccactcctttcagaacgacaattattctccaagcatgacgatgagtgtgtgatccccccttctccgagacgctgagagagcaggcattgcaggcgggaagatgccagaaattatgcaagaagtgaggtgtcattatccaggagctggtggggagggcatctccctgctcccctcaaccccctcccaccccatccacgccccctacctttcccaattttagtttcatgcaataaaaaggccaaactttttattccataaaacaagaaggacaaaactctcaaaaatgtatttcaagtcagtgaccagaaaaatcccaccccttgccctttccccaaaggaccttttctgtacatgacacttttttgttgttttttgtttggggttttaccattgttgggatttttttatttgttttcaggggggttttttgggggaaaatttttttaaatggaagcttctagcaagccccccaccccaatcaacctctatgctttcttcttaaaaaaaaaaaaaaaggaaaaaggaaaaaaaaaaaaggaaaaccagaagccctgctgtctgtctgtgcccaagcccttccaccagaaaagctagtctaggtgtgagagcccacattgtctgtagccatcaaaaataataataataaactggacagtttacaatcgttggtttctttcaaaaggccttttttggaaagaagaaaaggcagtcaccgttttccacttggggttttggtttgtgcaacaggcaggggaggagtggggacgcgtttgttctagcttgatttccatggcaacagcagcggcacgcttggaccccagaacccagcaccctcatcctgtggccagaggggccggaccactgacccctttcaggattccaccacagcccagaccgtcaccgtgacccggtggcatgcactgttcccaggacaccctcctcctctcctggacctcccttccgtcctggcctccctgcctctccagcccctcctctgcccccaccccagtcttcccagtgagaatcctgccagctgggtggtggcctggcgcagagtgggagaggctgccactgacaggatggctatgacctgggacatggaaacagtgacctccgcgttctggtcccgagatcctcgcatcagcgtcatcgtgtgcaccggcttggggggctggagttccggttttctttgttttttctctttattcgtcctttctcaaagatgggatactgatcagaattgctctgtatatgcttgggactggatggaaagactttggagcagctgtggggggtggggggacaccgacaaccaaacagacgtgctggctccagtcctgtttttactttcaaaaaccaacaagcccgacagtggagcctgtcccctcccgggagggtgctcatggccccactcacctcatcaccccacggaaacctttgtgtcttgccctggaagacacccgaattctttgtacattgacatgcccttctccttcctccctcccctgtagctggtctttgttttactccctccctttctgatccatgtatatcatattatgtgagatatcatctgcctgaaaaaagactttgtgcggattattggg

SEQ ID NO: 2747 - protein, 388 aa, Homo sapiens; identical to SEQ ID NO: 83

SEQ ID NO: 2748 - DNA, 1826 bp, Homo sapiens
acttcctgaaatggagagaaggcgagtggacacccgatgacttgtagatatgtgggtagaatgctggagggagaagcggctcctggggcacccgtgcttggccccctttggatgtcggctccctttgcagctcctaagctctgtgtttggggtgggagcggctgcgaggcggtggggggcttgtttggcagacggcgcccatcagacaactggaaagtgccagtgcctgcgtggccatctgtccccgccgcctagctcccggccgccttctgcttcccacagaagggcccgcgctgttctgtagcacaagggcacggggcctggccgggaggggcaggcacagttccattttgccattgtttattcccatctcctttgcagctcctgcgcttgggagttgccagagtgcagcagctgccccgagccccgtgcttggcaacattccccccaacgatgggatgccgggaggccccatcccgccaggtttctttcagccttttatgtcaccgcgatacgcaggcggccccaggcccccgatcagaatgggaaaccagcctccgggaggagttcctgggacacagccattgctgcccaattctatggatcccacacgacaacaaggccaccccaacatgggaggatcaatgcagagaatgaaccctccccgaggcatggggcccatgggtcccggcccacagaattacggcagcggcatgagaccaccacccaactccctcggccccgccatgcccgggattaacatgggcccgggagctggcagaccctggcccaatcctaacagtgctaactcaattccatactcctcctcatcacctggtacctatgtgggaccccctggtggtggcggtcctccaggaacacccattatgcccagtcccgcagattcaacaaattccagtgacaacatctacacaatgattaatccagtgccgcctggaggcagccggtccaacttcccgatgggtcccggctcggacggtccgatgggcggcatgggtggcatggagccacaccacatgaatggatcattagggtcaggcgacatagacggacttccaaaaaattctcctaacaacataagtggcattagcaatcctccaggcacccctcgagatgacggcgagctaggagggaacttcctccactcctttcagaacgacaattattctccaagcatgacgatgagtgtgtgatccccccttctccgagacgctgagagagcaggcattgcaggcgggaagatgccagaaattatgcaagaagtgaggtgtcattatccaggagctggtggggagggcatctccctgctcccctcaaccccctcccaccccatccacgccccctacctttcccaattttagtttcatgcaataaaaaggccaaactttttattccataaaacaagaaggacaaaactctcaaaaatgtatttcaagtcagtgaccagaaaaatcccaccccttgccctttccccaaaggaccttttctgtacatgacacttttttgttgttttttgtttggggttttaccattgttgggatttttttatttgttttcaggggggttttttgggggaaaatttttttaaatggaagcttctagcaagccccccaccccaatcaacctctatgctttcttcttaaaaaaaaaaaaaaaggaaaaaggaaaaaaaaaaaaggaaaaccagaagccctgctgtctgtctgtgcccaagcccttccaccagaaaagctagtctaggtgtgagagcccacattgtctgtagccatcaaaaataataataataaactggacagtttacaatc

SEQ ID NO: 2749 - protein, 251 aa, Homo sapiens; identical to SEQ ID NO: 2729

SEQ ID NO: 2750 - DNA, 2151 bp, Homo sapiens
ggcggcggcggcggcggcagcggtgctggaggcgcagagggcggcgcaggcggagccgggcgggcgcgcgagcgagcggagagcgggcggccgtgcgggcggcggcggcggcacccccaggccgagccggcgcggaaggagttccagggcgatggggccgcggccggggctgacgctttgacagctggaaagagcgcggagccagcgcctgggggggagggaggggagcgcggcgaggagagcgccagcgagcgagagagcgagcgagcgccggggagggggccgggagcgaggggcagctcgggagagccggagcggtagcggcggcggcggcggcggcggcgaggctcggcgccctcttccctgcaaaccatgtttgccaaaggcaaaggctcggcggtgccctcggatgggcaggctcgggaaaagttagctttatacgtctacgaatatttactgcacgtaggagcacagaaatctgcacagaccttcttatcggagattcgatgggaaaaaaacatcacgttgggagaaccgcctgggtttttgcactcgtggtggtgtgtattttgggacctttactgtgcagctcctgaaaggagagacacttgtgaacattcaagtgaagcaaaagcctttcatgattatagtgcagcagctgccccgagccccgtgcttggcaacattccccccaacgatgggatgccgggaggccccatcccgccaggtttctttcagggtcctccggggtcacagccctcgccgcacgcacagcctccacctcacaatcctagcagcatgatgggaccccacagtcagccttttatgtcaccgcgatacgcaggcggccccaggcccccgatcagaatgggaaaccagcctccgggaggagttcctgggacacagccattgctgcccaattctatggatcccacacgacaacaaggccaccccaacatgggaggatcaatgcagagaatgaaccctccccgaggcatggggcccatgggtcccggcccacagaattacggcagcggcatgagaccaccacccaactccctcggccccgccatgcccgggattaacatgggcccgggagctggcagaccctggcccaatcctaacagtgctaactcaattccatactcctcctcatcacctggtacctatgtgggaccccctggtggtggcggtcctccaggaacacccattatgcccagtcccgcagattcaacaaattccagtgacaacatctacacaatgattaatccagtgccgcctggaggcagccggtccaacttcccgatgggtcccggctcggacggtccgatgggcggcatgggtggcatggagccacaccacatgaatggatcattagggtcaggcgacatagacggacttccaaaaaattctcctaacaacataagtggcattagcaatcctccaggcacccctcgagatgacggcgagctaggagggaacttcctccactcctttcagaacgacaattattctccaagcatgacgatgagtgtgtgatccccccttctccgagacgctgagagagcaggcattgcaggcgggaagatgccagaaattatgcaagaagtgaggtgtcattatccaggagctggtggggagggcatctccctgctcccctcaaccccctcccaccccatccacgccccctacctttcccaattttagtttcatgcaataaaaaggccaaactttttattccataaaacaagaaggacaaaactctcaaaaatgtatttcaagtcagtgaccagaaaaatcccaccccttgccctttccccaaaggaccttttctgtacatgacacttttttgttgttttttgtttggggttttaccattgttgggatttttttatttgttttcaggggggttttttgggggaaaatttttttaaatggaagcttctagcaagccccccaccccaatcaacctctatgctttcttcttaaaaaaaaaaaaaaaggaaaaaggaaaaaaaaaaaaggaaaaccagaagccctgctgtctgtctgtgcccaagcccttccaccagaaaagctagtctaggtgtgagagcccacattgtctgtagccatcaaaaataataataataaactggacagtttacaatc

SEQ ID NO: 2751 - protein, 388 aa, Homo sapiens; identical to SEQ ID NO: 83

SEQ ID NO: 2752 - DNA, 1683 bp, Homo sapiens
ggcggcggcggcggcggcagcggtgctggaggcgcagagggcggcgcaggcggagccgggcgggcgcgcgagcgagcggagagcgggcggccgtgcgggcggcggcggcggcacccccaggccgagccggcgcggaaggagttccagggcgatggggccgcggccggggctgacgctttgacagctggaaagagcgcggagccagcgcctgggggggagggaggggagcgcggcgaggagagcgccagcgagcgagagagcgagcgagcgccggggagggggccgggagcgaggggcagctcgggagagccggagcggtagcggcggcggcggcggcggcggcgaggctcggcgccctcttccctgcaaaccatgtttgccaaaggcaaaggctcggcggtgccctcggatgggcaggctcgggaaaagttagctttatacgtctacgaatatttactgcacgtaggagcacagaaatctgcacagaccttcttatcggagattcgatgggaaaaaaacatcacgttgggagaaccgcctgggtttttgcactcgtggtggtgtgtattttgggacctttactgtgcagctcctgaaaggagagacacttgtgaacattcaagtgaagcaaaagcctttcatgattatagtgcagcagctgccccgagccccgtgcttggcaacattccccccaacgatgggatgccgggaggccccatcccgccaggtttctttcagggtcctccggggtcacagccctcgccgcacgcacagcctccacctcacaatcctagcagcatgatgggaccccacagtcagcctccgggaggagttcctgggacacagccattgctgcccaattctatggatcccacacgacaacaaggccaccccaacatgggaggatcaatgcagagaatgaaccctccccgaggcatggggcccatgggtcccggcccacagaattacggcagcggcatgagaccaccacccaactccctcggccccgccatgcccgggattaacatgggcccgggagctggcagaccctggcccaatcctaacagtgctaactcaattccatactcctcctcatcacctggtacctatgtgggaccccctggtggtggcggtcctccaggaacacccattatgcccagtcccgcagattcaacaaattccagtgacaacatctacacaatgattaatccagtgccgcctggaggcagccggtccaacttcccgatgggtcccggctcggacggtccgatgggcggcatgggtggcatggagccacaccacatgaatggatcattagggtcaggcgacatagacggacttccaaaaaattctcctaacaacataagtggcattagcaatcctccaggcacccctcgagatgacggcgagctaggagggaacttcctccactcctttcagaacgacaattattctccaagcatgacgatgagtgtgtgatccccccttctccgagacgctgagagagcaggcattgcaggcgggaagatgccagaaattatgcaagaagtgaggtgtcattatccaggagctggtggggagggcatctccctgctcccctcaaccccctcccaccccatccacgccccctacctttcccaattttagtttcatgcaataaaaaggccaaactttttattccat

SEQ ID NO: 2753 - protein, 368 aa, Homo sapiens; identical to SEQ ID NO: 81

SEQ ID NO: 2754 - DNA, 2753 bp, Homo sapiens
ggggctgtttctcctgtctctgagacccagcacaacgtgaggcatacagcaggtgtattagcaggatctagaatacggcaaacaggccttaaacagggtgatgaggcccattccagccaggtgcctcctctaaacctacagtcaacttgaaaagcccgaagtgctttcccagagcactgcctgaagtttgccgttcacagccagggagacttgtgaagaggactgatcccacagctccatctctaaagagcagggtttcttgatgatcccaggatgggtacacagccatggggctcagggactacccctgcctctgccctatccatgctccaacgggacagacacatgccactgcaaccagagatcctcagcaatcccactccgtaaggacacctgaaaacctcaccaccagtcccaccctaggagatggatattccccctctaacctccagggtggagaagcagggttcaaacagggggcctcagagcggtgcttccaagagaaagcgccttggaagccaggctaaggaatggaactttctgctctgggcaatggcggagcggggggacatctactgccccacctcaccctgtgccgggcatagggacctttcatgctcactcaacaaatcccaataccaccagagtaccccaaattccaggagcaagtggacttgacgagtccccacattcccagaggcctctcatcccaccctgagagagaagcatctcagagtaggcaacagtgttgatgcttttccttcaagaagcaatggtccaggggcattccctgcaagatactatcttctggcctcatttcaagaaccccagctatcctcactcacaaactagcctgagacccccgctccaaccctctctttaaaattagttctaggcacaggaagctcctggaaaactgaataaaaacaaatgctcagagggaaatgtgggactcctgccaggtcggccaacccctcctgactgatttacaaggctgcaaaatggtactttgttctgcaaatcccctcccctccttgccccgccctaatactcaggccttggcgtgcagcagcttgggggccacatgcagaaccgcatgtgcagacgacttccttgactgaaactcaacacaggctgcgtggcccagggcccaaaacaccagggggtgggaggtgtgtgctgagggtggagccatgtgctcaaagctgggaaatggaggtcactcaagggagcttggggcactcctgtgatgactacatacagagggcaagtgagacaggaagcctccaagtgacgcctgtctggtggcctggggaaggagggagggagggatgctggcactggtttcagcaagacaggggcttctgtgcaaactatggagtaacccgggtccctctggggccaggtttcccagagggaatttcagcagcaacaacaaactaaagatataaatcaggaatggaagcgaccgggggaatgtcatcacccagatggaaaggccaagacagacagaactggggttcaaagaagggaaggggacaggaagaggattcctggtttcatatgcagaccacagaacagaatcagttttggagaacaggggctctaattgtgcagtttagagaaaacagagctgttgctacgtgaagaggcagaaccagctgacgttaaaaataggtttggatgacacacaggagtgacacaagatccctgccttcaaatagtcagggggccatcgtgtgggaggagggatggatgtgtctcccggcaccaatggacggccctgggtccaacagtagatgccccaagctacaaaaagcttcttggctgcctcagaagggggcgggctgtgataatttggggtcgctcccagcggagacatggcacaaaccatattaaaaaaggattgccataggacccaccaccgcctgggcctggggattattaagacaaaagagtcctgcactgagggtcccaggatcaggattccagctctggcggcaaaccacctactgtgtgatctgatcaggccttcctgccccgggccctggactccacacaaggcagctgatgtcctgctgctccagtgacactgtggatgtccaaggagctcttcagcaagcgacctgaaaagggccacgtatagacaacaaaagcctcaacctgtcagggccaggccatcagacccaaatgagggtggtcttgatacctgagcttattttactaagtcccagctcatgtctgccacctgggtatgaccctggaatgcaagaggggctggagaagtgcctgccttttcattttgatcccatacatcagcaggggtggggggggggagggtagtatttattccccaacatcgctgggaagatgtcatttctgttttcctggtaaggaaactgaggcacagagagctgtactatctcaaggtcaggcagctaagtggctctaacattagtccctctgtgcctccaccttttatcttgggttcaaaaaacaaaaccacagtccactctgggaggccaaggtgggcggatcacaaggtcaggagatcgagaccatcctggctaacacgtgaaaccaagtctctactaaaaataccaaaaaaaatcagctgggtgtggtggcgggtgcctgtagtgccagctactcaggaggctgaggcaggagactcgcgtgaacccgggaggtggagcttgcagtgagccgagatcgtgccactgcactccagcctgggcgacagagctagactc

SEQ ID NO: 2755 - protein, 83 aa, Homo sapiens [sequence omitted]

SEQ ID NO: 2756 - DNA, 2126 bp, Homo sapiens
ctgtggcatctcctgtcacattgggaaaatgaagaattccaggacatgggcttggagggcgccggtggagctatttcttctctgtgctgccctgggctgtctcagtttgcctggctccagaggtgaaaggccacattcctttgggtcaaatgcagtcaacaagagctttgctaagagcagacagatgcggagtgtggatgttaccctgatgcccattgattgtgagctgtctagttggtcctcttggaccacatgtgacccctgtcagaagaaaaggtacaggtatgcctacttgctccagccctctcagttccatggggaaccgtgcaacttctctgacaaggaagtcgaagactgtgttaccaacagaccatgcggaagtcaagtgcgatgtgaaggctttgtgtgtgcacagacaggaaggtgtgtaaaccgcagacttctttgcaatggggacaatgactgtggagaccagtcagatgaagcaaactgtagaaggatttataaaaaatgtcagcatgaaatggaccaatactggggaattggcagtctggccagtgggataaatttgttcacaaacagttttgagggcccagttcttgatcacaggtattatgcaggtggatgctccccgcattacatcctgaacacgaggtttaggaagccctacaatgtggaaagctacacgccacagacccaaggcaaatacgaattcatattaaaagagtatgaatcatactcagattttgaacgcaatgtcacagagaaaatggcaagcaagtctggtttcagttttggttttaaaatacctggaatatttgaacttggcatcagtagtcaaagtgatcgaggcaaacactatattaggagaaccaaacgattctctcatactaaaagcgtatttctgcatgcacgctctgaccttgaagtagcacattacaagctgaaacccagaagcctcatgctccattacgagttccttcagagagttaagcggctgcccctggagtacagctacggggaatacagagatctcttccgtgattttgggacccactacatcacagaggctgtgcttgggggcatttatgaatacaccctcgttatgaacaaagaggccatggagagaggagattatactcttaacaacgtccatgcctgtgccaaaaatgattttaaaattggtggtgccattgaagaggtctacgtcagtctgggtgtgtctgtaggcaaatgcagaggtattctgaatgaaataaaagacagaaacaagagggacaccatggtggaggacttggtggtcctggtacgaggaggggcaagtgagcacatcaccaccctggcataccaggagctgccgacggcggacctgatgcaggagtggggagacgctgtgcagtacaacccagccatcatcaaagttaaggtggagcctctgtatgaactagtgacagccacagattttgcctattccagcacagtgaggcagaacatgaagcaggcactggaggagttccagaaggaagttagttcctgccactgtgctccctgccaaggaaatggagtccctgtcctgaaaggatcacgctgtgactgcatctgtcctgttggatcccaaggcctagcctgtgaggtctcctatcggaagaatacccccattgatgggaagtggaattgctggtcaaattggtcttcatgctctggaagacgtaagacaagacaaaggcagtgtaacaatccacctcctcaaaatgggggtagcccctgttcaggccctgcttcagaaacacttgactgctcctagcagatgatacagcagtgggctacatacaatgagagccctgagccctcaagaactcatgccagctcagccctacaccagtttccacctggagttcatgcaagggcaaaaggcagtgccatgcaagctgtttaaaataaagatgttaccttgtaaaatgcaagttgatttaaataaatactgagttaaaggcttaagcatctttgtaatcctcaccttactcactctacaattttatttcactcatattgactaccagccaggaattgtgttggaagttgttcacatttcagttccactctctagccctctagccgtgactggt

SEQ ID NO: 2757 - protein, 591 aa, Homo sapiens; identical to SEQ ID NO: 87

SEQ ID NO: 2758 - DNA, 1996 bp, Homo sapiens
ctgtggcatctcctgtcacattgggaaaatgaagaattccaggacatgggcttggagggcgccggtggagctatttcttctctgtgctgccctgggctgtctcagtttgcctggctccagaggtgaaaggccacattcctttgggtcaaatgcagtcaacaagagctttgctaagagcagacagatgcggagtgtggatgttaccctgatgcccattgattgtgagctgtctagttggtcctcttggaccacatgtgacccctgtcagaagaaaaggtacaggtatgcctacttgctccagccctctcagttccatggggaaccgtgcaacttctctgacaaggaagtcgaagactgtgttaccaacagaccatgcggaagtcaagtgcgatgtgaaggctttgtgtgtgcacagacaggaaggtgtgtaaaccgcagacttctttgcaatggggacaatgactgtggagaccagtcagatgaagcaaactgtagaaggatttataaaaaatgtcagcatgaaatggaccaatactggggaattggcagtctggccagtgggataaatttgttcacaaacagttttgagggcccagttcttgatcacaggtattatgcaggtggatgctccccgcattacatcctgaacacgaggtttaggaagccctacaatgtggaaagctacacgccacagacccaaggcaaatacgaattcatattaaaagagtatgaatcatactcagattttgaacgcaatgtcacagagaaaatggcaagcaagtctggtttcagttttggttttaaaatacctggaatatttgaacttggcatcagtagtcaaagtgatcgaggcaaacactatattaggagaaccaaacgattctctcatactaaaagcgtatttctgcatgcacgctctgaccttgaagtagcacattacaagctgaaacccagaagcctcatgctccattacgagttccttcagagagttaagcggctgcccctggagtacagctacggggaatacagagatctcttccgtgattttgggacccactacatcacagaggctgtgcttgggggcatttatgaatacaccctcgttatgaacaaagaggccatggagagaggagattatactcttaacaacgtccatgcctgtgccaaaaatgattttaaaattggtggtgccattgaagaggtctacgtcagtctgggtgtgtctgtaggcaaatgcagaggtattctgaatgaaataaaagacagaaacaagagggacaccatggtggaggacttggtggtcctggtacgaggaggggcaagtgagcacatcaccaccctggcataccaggagctgccgacggcggacctgatgcaggagtggggagacgctgtgcagtacaacccagccatcatcaaagttaaggtggagcctctgtatgaactagtgacagccacagattttgcctattccagcacagtgaggcagaacatgaagcaggcactggaggagttccagaaggaagttagttcctgccactgtgctccctgccaaggaaatggagtccctgtcctgaaaggatcacgctgtgactgcatctgtcctgttggatcccaaggcctagcctgtgaggtctcctatcggaagaatacccccattgatgggaagtggaattgctggtcaaattggtcttcatgctctggaagacgtaagacaagacaaaggcagtgtaacaatccacctcctcaaaatgggggtagcccctgttcaggccctgcttcagaaacacttgactgctcctagcagatgatacagcagtgggctacatacaatgagagccctgagccctcaagaactcatgccagctcagccctacaccagtttccacctggagttcatgcaagggcaaaaggcagtgccatgcaagctgtttaaaataaagatgttaccttgtaaaatgcaagttgatttaaataaatactgagttaaaggctt

SEQ ID NO: 2759 - protein, 591 aa, Homo sapiens; identical to SEQ ID NO: 87

SEQ ID NO: 2760 - DNA, 1204 bp, Homo sapiens
ggcactcacagcacaggcttgttatgggtctagcagcctctgtggcatctcctgtcacattgggaaaatgaagaattccaggacatgggcttggagggcgccggtggagctatttcttctctgtgctgccctgggctgtctcagtttgcctggctccagaggtgaaaggccacattcctttgggtcaaatgcagtcaacaagagctttgctaagagcagacagatgcggagtgtggatgttaccctgatgcccattgattgtgagctgtctagttggtcctcttggaccacatgtgacccctgtcagaagaaaaggtacaggtatgcctacttgctccagccctctcagttccatggggaaccgtgcaacttctctgacaaggaagtcgaagactgtgttaccaacagaccatgcggaagtcaagtgcgatgtgaaggctttgtgtgtgcacagacaggaaggtgtgtaaaccgcagacttctttgcaatggggacaatgactgtggagaccagtcagatgaagcaaactgtagaaggatttataaaaaatgtcagcatgaaatggaccaatactggggaattggcagtctggccagtgggataaatttgttcacaaacagttttgagggcccagttcttgatcacaggtattatgcaggtggatgctccccgcattacatcctgaacacgaggtttaggaagccctacaatgtggaaagctacacgccacagacccaaggcaaatacgaattcatattaaaagagtatgaatcatactcagattttgaacgcaatgtcacagagaaaatggcaagcaagtctggtttcagttttggttttaaaatacctggaatatttgaacttggcatcagtagtcaaagtgatcgaggcaaacactatattaggagaaccaaacgattctctcatactaaaagcgtatttctgcatgcacgctctgaccttgaagtagcacattacaagctgaaacccagaagcctcatgctccattacgagttccttcagagagttaagcggctgcccctggagtacagctacggggaatacagagatctcttccgtgattttgggacccactacatcacagaggctgtgcttgggggcatttatgaatacaccctcgttatgaacaaagaggccatggagagaggagattatactcttaacaacgtccatgcctgtgcc

SEQ ID NO: 2761 - protein, 378 aa, Homo sapiens
MKNSRTWAWRAPVELFLLCAALGCLSLPGSRGERPHSFGSNAVNKSFAKSRQMRSVDVTLMPIDCELSSWSSWTTCDPCQKKRYRYAYLLQPSQFHGEPCNFSDKEVEDCVTNRPCGSQVRCEGFVCAQTGRCVNRRLLCNGDNDCGDQSDEANCRRIYKKCQHEMDQYWGIGSLASGINLFTNSFEGPVLDHRYYAGGCSPHYILNTRFRKPYNVESYTPQTQGKYEFILKEYESYSDFERNVTEKMASKSGFSFGFKIPGIFELGISSQSDRGKHYIRRTKRFSHTKSVFLHARSDLEVAHYKLKPRSLMLHYEFLQRVKRLPLEYSYGEYRDLFRDFGTHYITEAVLGGIYEYTLVMNKEAMERGDYTLNNVHAC

SEQ ID NO: 2762 - DNA, 610 bp, Homo sapiens
agagtaagtaagaacaaaaaactcttttggccaatacgaaggtggtctcagcattttctgttccagaaccaaagactattcttctactcgcagatggaattcaaatacctgtcgtgttcaagacagccccatggggattataggtggatgtcagaactatacccagattcagacatgtgacactttcgggctgaagcacttaagagccagtgtgccctgtccatttctgtcttctgtcctgtggatttggaagcatgtgttgacagaacaatgtcttatggtgaaggaagcctaaacccctgagtcattggatggaggagagcccatgttgacccataaaggacttcatggtctcgctctgtcacccaggctggagtgcaggcgtgctatcttggctcactgcaacttctgcttcccgagttcaagagatcctcatacctcagcctcctgagtagccgggactacaggcatgcgccaccacacccagggtggggactctcgtggaaaggctagatgatggagtcacgtgctcccttcccgttcactagctgctgattggccaactgctcctgccagctgtccctgcactccagcttcctaccatatgctc

SEQ ID NO: 2763 - protein, 54 aa, Homo sapiens
MGIIGGCQNYTQIQTCDTFGLKHLRASVPCPFLSSVLWIWKHVLTEQCLMVKEA

SEQ ID NO: 2764 - DNA, 791 bp, Homo sapiens
gaaaagacaagccccagtgcacaagtgctttccaaacttctgcttgcctgatgtttcttaatgtctccttggctgaagcaatggccaagcccacattcaagagctagagacagagcttatacctgttgatgggaggaagagcagagtcacattgcaaaggggtatgcctacaattttggaaggaattcgtggacattcggcaatttcttacagacatgtgacactttcgggctgaagcacttaagagccagtgtgccctgtccatttctgtcttctgtcctgtggatttggaagcatgtgttgacagaacaatgtcttatggtgaaggaagcctaaacccctgagtcattggatggaggagagcccatgttgacccataaaggacttcatatttgtccacgtctctgccctgcttcaaatccttcagaggctccccatcacccacagggatgatctttctgaaatggatttggccatgccagtctcctgcctgaaacagccctcctggctccttgtcactcaaaggaaaaggcaaactcctcaagactgcacataatgcccaccttcccaaccagcctctcctactgccactctctctcctacaccctaccttccaaaccctacttggggttcaccctcacatgctggagttttcccatctctgagacttcattcaggcagttccttctggcttcggaggcttctttgttcctaaagttcatactttaagacctagctgaaatatcaaggcttcctggactctgcaggtgacacgagccactgtgctcctg

SEQ ID NO: 2765 - protein, 57 aa, Homo sapiens
MPTFPTSLSYCHSLSYTLPSKPYLGFTLTCWSFPISETSFRQFLLASEASLFLKFIL

SEQ ID NO: 2766 - DNA, 1930 bp, Homo sapiens
gtgtgctccacttaaatgagaaaagcaacgaacaataagcccagggtgaagatttggttacataccctgcttctcaggttttgcttaagtttagcgcccaccaggaagaaagaaaacgattatctgcctccttgacttttgcatcatttgtctttcttctgatgaaagtgggactaatcactgagttagggtttccttatttttagtctacaccatgttgctttatcctaaaaggataaatatgggctgtgtgatggttgaccacctttcttcttccttctatgaaggtctgaaagggcacaagacaggtaaaaaggaaacagcttttctttagtaactaagttgctagatttttgatctcatggccctgagctacacgtgaatgactttgacctgtaatctgaaataagatagacttcagagttcacctctcccaccatttcactccaaaggtgagataaggtagagttgctaaaggtacagtatgaagggcatgtggcattttagtgttgacagtatgccagctctaagacctgcttcttccatctccaaccgcttcctggactctgcaggtgacacgagccactgtgctcctggatgcttcagaacctgtgcagatctctgtcttcactcctactatggcatctcctagcatgttctacactgagctccactgggccttgcatgtcagtatcccgaattctgaatgaagcttggaacatgggaggtgcatccactaacaacatgaagaatgaagacatgtattgactacctttgacaaaagtatgtcaaaagcaatacatcttactagtggagcgaagacactgcatgctgacaaaggtgatctcagatgtgaggtcgatggtgcgccatgcaatcagcttgctgagtgagcctacttatgccccatcccgggggcctagggtaagaaaagtgccaagcgaagctgaggatcagactaaagctggaaggtgtcaaggcacaggctgagtcatcagaacaccttccctgaattgtgtcaaacaagtgtacatgtgctcaagtgtatctggattctgatttggctgcacagtcactgttttccagatgtttgcagaagaaatatgagctggaggagactcactgaaagctggaactagaaggatgcacactgctcatccaagccaattcacttattttaccaatgataaaactgagtctcagagaagtcatacgcttgcccaaagacacagcttgtggtggaggagtcaacaccagaactctggtccaggactgcaaaaaaacacttaacatgtgctaataatgaggataaaagatacttcaaattctgggagttctataatgtttgagcacatataccattgaatccttttaataacccatcgcttacacagatgaggaaaccaaggctcatagaaataaagtgctttgccaaaaggcacaaaactggtcagtaataaatctgatctccaggttcccagtccagaactttctgcagcactatctttttgttccctttaactaccagaagctttaacccaaaatgaggcttcaactataaaagctatttaagaccttatggctgcgtatctctgccctaagttttctcttgatccttattttatattctaatgtttaaaacttgttccccaaatttttaaagtttgcattcattttatttcaataagccacgccaaaatctgtgtgtcataagctatctatacgtaaataaatgaacgaatgaatgagcaaacaaacaaaatcttaagaggcagagtaacatggtggaaaaataccaggcttacattcaattcaataccactttgtctattgtcttcatctttgagcctcactttcattatctgtcaaacaggtctaacaaaatttatcattaagcattattataagtctaaaaataaacatggaacat

SEQ ID NO: 2767 - protein, 56 aa, Homo sapiens
MLQNLCRSLSSLLLWHLLACSTLSSTGPCMSVSRILNEAWNMGGASTNNMKNEDMY

SEQ ID NO: 2768 - DNA, 4569 bp, Homo sapiens
agtctttgtttcagcatcactttccatgttgcagacccaactacccaggttttacattttaggaactgcatgacagggacagagggacaggtttcctctccccgccagcaggctgctggctgcggcgccgcctctctctactccctcctcccaccgccccccttccccgcggttgggcccactctgcggcctctgcccgcctcgccctcgcccgggcctcctcccgctttctctctccgcttcccctggagcctccgaggagtccgcagccgctgggcgcccgggaagatggcggcggcggcgggagacggcggcggcgaggggggcgcgggcctgggcagcgcggcggggctggggccggggccggggctgcgcgggcagggcccctcagccgaagcgcacgagggcgccccggacccgatgcccgccgcgctgcaccctgaggaggtcgccgcgcgactgcagcggatgcagcgggagctgagcaaccgcaggaaaatcctggtgaaaaacctgccccaggacagcaactgccaggaagttcatgatttgttaaaagactatgacttaaaatattgttatgtggacagaaataaacgaacagcttttgttaccttattgaatggggaacaagcccagaacgcaattcagatgtttcatcaatattcttttagaggaaaagacttaatagtccagcttcagccaacagatgctttgttgtgtattaccaacgtgcccatttcttttacatcagaagagtttgaagaacttgttcgtgcttatggaaatattgagagatgttttctggtctatagtgaagttactggccattccaaaggctatggatttgtggaatacatgaaaaaggactttgctgcaaaggctagactggagctattgggtagacagttgggagcatcagcactctttgcacaatggatggatgttaatctattggcttcagagctcattcattctaagtgcctttgtattgataaactccccagtgactacagggattcagaagagctgttgcaaattttttccagtgtccataaacctgtgttttgccagcttgcacaggatgaaggtagttacgttggtggctttgcagtggttgaatatagcactgcggagcaggctgaagaggtccagcaggcagcagacggtatgaccatcaagggcagcaaagtccaggtttccttctgtgctcctggagcgccagggcgaagtacattagcagcattgatagcggctcaacgtgtgatgcacagtaatcaaaagggcttacttccagagccaaatccagtacaaattatgaaaagtttaaacaaccctgccatgttgcaagttcttctacagccccagttatgtggacgagctgttaaaccagccgttcttggaacacctcacagcttgccacatctgatgaatccatccatctctcctgcatttttacatttgaataaagcacatcagaatctttctcatataccactggcacaacaacaattaatgaagtttgagaatattcatactaataataaacccggcttacttggagagcccccagctgtggtacttcagactgcactagggatagggtcagtgcttccattgaaaaaggagttgggacatcatcatggagaagcacataaaacatctagcctgattccaactcaaacaacgataacagctggaatgggcatgttaccattctttccaaatcagcacattgctggacaggctgggccagggcacagtaatactcaggagaaacagccagccacggtgggaatggcagaaggaaatttctcagggtcgcagccttatcttcagagctttccaaaccttgctgctggaagcttgctggtgggacaccataagcagcagcaaagccagccaaaaggcacagagataagttcaggggctgcctctaagaatcaaacttcactcttgggagaaccaccaaaagaaattcggctcagtaaaaatccatacttgaatttggcaagtgtgttgcccagtgtgtgcttatcatcccctgcaagtaaaaccactcttcataagactggaattgcaagcagcattctggatgcaatctctcagggaagtgaatcacaacacgcattggaaaagtgcattgcttattctccaccttttggtgattatgcacaggtgtcatctttaagaaatgaaaagcgaggctcatcatatctcatctctgccccagaaggtggttcagtggaatgtgttgaccagcattctcagggcacaggagcatattacatggaaacttacttaaaaaagaagcgagtatactgagttaagctctctcctaataaccccctaaggttctctgcagtatctctgctgttcatcgctgccttaacttcattcaaactagccatatcctttaaatacgggtttatagtttcccagaaggaactgtgttgtgcagcaggcagaaatgccaaataaaaaatagcaataagaagagacatcaattgaggacattttccactagagtcagatgcatcttaatcagtgtgctaacttacaatccattggagaaactaacaatgttccaatattccttgatttaggactgggaataattctgacaccatatataaaagaagtttgaagcaataaatgggaaacagtgttgtttcctgagccttagaagaatgagtttcttataagccaatgtgcatttcaatttactttccctagaagtaattgcatttatagatttttaggacttttcctagaactacaagggtgcaagtaccaaatgtgctgatggtaatattataaagatgctctacatgcacactcaattacgcccacaccagccatgcaaaattaaacccggtaagagagtgacagtgatatccaaggtatccactactaccgatgctttaagatgttgtttaccatttataccttctgtgaaaaatagaaggtattttaagaaaagtaactttggtgatctaataaaagggtttggcaaactacaccctgggtccacatttggtctaccacccgcttttgtgctgcctgcaagctaagactaatgtttacatttttaaatggttggaggaaaaaagaaaacttatgacatgaaatttatatgaaattcagatttcagtgtccataaataaacttttattgggacgttgccatgctcattcatttacgtgttgtctgtggcactcttacgctacaagggcagaactgattagcttcaacagagactgtatggcctacaaagaccatatggcctaaaatttcaagtatctggccatttatatatagtttgctgatccctgatctaatagcactaattctaatagcaactattcctttcaattcacctaaagacagacctttagcctttagacagacttgtaagtggaaaggaacatgggtttctgtgctcatttcatagcgtagactagtaatgatctaatgactagaatggggcctattttgatcactaaatgccctattatttccacaatatagtatagtaaagcagtcaatactgcactttctgatggagtcttaaggagtcacagtatttataaccattttgagctaataagctatacctcactctctgctttctctctcactctttttgatagtgtgttagggtgaaaaatcagttatttaacccaatttacttgtgaaagaagttttatctttatggactatgatgacttttgacatcaccatttcttgaagaccttggtattaaatgcatgagaaaccttttgccatctagaaatttctaagtttgtttatgttataagactgtaattaattgatagggaatttgggatctcaatccggggctttttgaaatcagatcattaaatatctcgtcactttggggacttgttatttttaactatgatgtggatatcctgttttaattatgaagtctagaattggtacatatgttgtatgctttgtaaagaatttcacttggtctaatttattgcatatactagcttctgttggaaaatgactgacagctagaaagtttaaggtaatttctaagtatactacctataagtaactgataagaattaggcatcattcagtgatatagcagatgactaatgggtttttcaggccctgcacttctctttcccattttcctgttgcattcagcctcttcaatgcttagtcacacctccactatagtacaaacaaacaaacaaacagaagaaaggaaagatggtgaattttgcaacagagctgcaaaaagtcagtcagtcaaagcaggaagaggttgaaggaactaaaacaaacaaacaaaggtgtctggactacagcacagtggacatgccatccatactggcctgtgccccgttatcaatcactgggcacaacagtgaagaagtgcaaatcaagtggtgtttgtttgtttgttagtagtaaggaccgtaacccaccccttcctccccccaaaactatactgttatttttctatgtaagcaaattgtttgaaatgctttgaaaatgaaatcttaatattaaaaggcatatgcatgt

SEQ ID NO: 2769 - protein, 751 aa, Homo sapiens
MTGTEGQVSSPRQQAAGCGAASLYSLLPPPPFPAVGPTLRPLPASPSPGPPPAFSLRFPWSLRGVRSRWAPGKMAAAAGDGGGEGGAGLGSAAGLGPGPGLRGQGPSAEAHEGAPDPMPAALHPEEVAARLQRMQRELSNRRKILVKNLPQDSNCQEVHDLLKDYDLKYCYVDRNKRTAFVTLLNGEQAQNAIQMFHQYSFRGKDLIVQLQPTDALLCITNVPISFTSEEFEELVRAYGNIERCFLVYSEVTGHSKGYGFVEYMKKDFAAKARLELLGRQLGASALFAQWMDVNLLASELIHSKCLCIDKLPSDYRDSEELLQIFSSVHKPVFCQLAQDEGSYVGGFAVVEYSTAEQAEEVQQAADGMTIKGSKVQVSFCAPGAPGRSTLAALIAAQRVMHSNQKGLLPEPNPVQIMKSLNNPAMLQVLLQPQLCGRAVKPAVLGTPHSLPHLMNPSISPAFLHLNKAHQNLSHIPLAQQQLMKFENIHTNNKPGLLGEPPAVVLQTALGIGSVLPLKKELGHHHGEAHKTSSLIPTQTTITAGMGMLPFFPNQHIAGQAGPGHSNTQEKQPATVGMAEGNFSGSQPYLQSFPNLAAGSLLVGHHKQQQSQPKGTEISSGAASKNQTSLLGEPPKEIRLSKNPYLNLASVLPSVCLSSPASKTTLHKTGIASSILDAISQGSESQHALEKCIAYSPPFGDYAQVSSLRNEKRGSSYLISAPEGGSVECVDQHSQGTGAYYMETYLKKKRVY

SEQ ID NO: 2770 - DNA, 5999 bp, Homo sapiens
agtctttgtttcagcatcactttccatgttgcagacccaactacccaggttttacattttaggaactgcatgacagggacagagggacaggtttcctctccccgccagcaggctgctggctgcggcgccgcctctctctactccctcctcccaccgccccccttccccgcggttgggcccactctgcggcctctgcccgcctcgccctcgcccgggcctcctcccgctttctctctccgcttcccctggagcctccgaggagtccgcagccgctgggcgcccgggaagatggcggcggcggcgggagacggcggcggcgaggggggcgcgggcctgggcagcgcggcggggctggggccggggccggggctgcgcgggcagggcccctcagccgaagcgcacgagggcgccccggacccgatgcccgccgcgctgcaccctgaggaggtcgccgcgcgactgcagcggatgcagcgggagctgagcaaccgcaggaaaatcctggtgaaaaacctgccccaggacagcaactgccaggaagttcatgatttgttaaaagactatgacttaaaatattgttatgtggacagaaataaacgaacagcttttgttaccttattgaatggggaacaagcccagaacgcaattcagatgtttcatcaatattcttttagaggaaaagacttaatagtccagcttcagccaacagatgctttgttgtgtattaccaacgtgcccatttcttttacatcagaagagtttgaagaacttgttcgtgcttatggaaatattgagagatgttttctggtctatagtgaagttactggccattccaaaggctatggatttgtggaatacatgaaaaaggactttgctgcaaaggctagactggagctattgggtagacagttgggagcatcagcactctttgcacaatggatggatgttaatctattggcttcagagctcattcattctaagtgcctttgtattgataaactccccagtgactacagggattcagaagagctgttgcaaattttttccagtgtccataaacctgtgttttgccagcttgcacaggatgaaggtagttacgttggtggctttgcagtggttgaatatagcactgcggagcaggctgaagaggtccagcaggcagcagacggtatgaccatcaagggcagcaaagtccaggtttccttctgtgctcctggagcgccagggcgaagtacattagcagcattgatagcggctcaacgtgtgatgcacagtaatcaaaagggcttacttccagagccaaatccagtacaaattatgaaaagtttaaacaaccctgccatgttgcaagttcttctacagccccagttatgtggacgagctgttaaaccagccgttcttggaacacctcacagcttgccacatctgatgaatccatccatctctcctgcatttttacatttgaataaagcacatcagaatctttctcatataccactggcacaacaacaattaatgaagtttgagaatattcatactaataataaacccggcttacttggagagcccccagctgtggtacttcagactgcactagggatagggtcagtgcttccattgaaaaaggagttgggacatcatcatggagaagcacataaaacatctagcctgattccaactcaaacaacgataacagctggaatgggcatgttaccattctttccaaatcagcacattgctggacaggctgggccagggcacagtaatactcaggagaaacagccagccacggtgggaatggcagaaggaaatttctcagggtcgcagccttatcttcagagctttccaaaccttgctgctggaagcttgctggtgggacaccataagcagcagcaaagccagccaaaaggcacagagataagttcaggggctgcctctaagaatcaaacttcactcttgggagaaccaccaaaagaaattcggctcagtaaaaatccatacttgaatttggcaagtgtgttgcccagtgtgtgcttatcatcccctgcaagtaaaaccactcttcataagactggaattgcaagcagcattctggatgcaatctctcagggaagtgaatcacaacacgcattggaaaagtgcattgcttattctccaccttttggtgattatgcacaggtgtcatctttaagaaatgaaaagcgaggctcatcatatctcatctctgccccagaaggtggttcagtggaatgtgttgaccagcattctcagggcacaggagcatattacatggaaacttacttaaaaaagaagcgagtatactgagttaagctctctcctaataaccccctaaggttctctgcagtatctctgctgttcatcgctgccttaacttcattcaaactagccatatcctttaaatacgggtttatagtttcccagaaggaactgtgttgtgcagcaggcagaaatgccaaataaaaaatagcaataagaagagacatcaattgaggacattttccactagagtcagatgcatcttaatcagtgtgctaacttacaatccattggagaaactaacaatgttccaatattccttgatttaggactgggaataattctgacaccatatataaaagaagtttgaagcaataaatgggaaacagtgttgtttcctgagccttagaagaatgagtttcttataagccaatgtgcatttcaatttactttccctagaagtaattgcatttatagatttttaggacttttcctagaactacaagggtgcaagtaccaaatgtgctgatggtaatattataaagatgctctacatgcacactcaattacgcccacaccagccatgcaaaattaaacccggtaagagagtgacagtgatatccaaggtatccactactaccgatgctttaagatgttgtttaccatttataccttctgtgaaaaatagaaggtattttaagaaaagtaactttggtgatctaataaaagggtttggcaaactacaccctgggtccacatttggtctaccacccgcttttgtgctgcctgcaagctaagactaatgtttacatttttaaatggttggaggaaaaaagaaaacttatgacatgaaatttatatgaaattcagatttcagtgtccataaataaacttttattgggacgttgccatgctcattcatttacgtgttgtctgtggcactcttacgctacaagggcagaactgattagcttcaacagagactgtatggcctacaaagaccatatggcctaaaatttcaagtatctggccatttatatatagtttgctgatccctgatctaatagcactaattctaatagcaactattcctttcaattcacctaaagacagacctttagcctttagacagacttgtaagtggaaaggaacatgggtttctgtgctcatttcatagcgtagactagtaatgatctaatgactagaatggggcctattttgatcactaaatgccctattatttccacaatatagtatagtaaagcagtcaatactgcactttctgatggagtcttaaggagtcacagtatttataaccattttgagctaataagctatacctcactctctgctttctctctcactctttttgatagtgtgttagggtgaaaaatcagttatttaacccaatttacttgtgaaagaagttttatctttatggactatgatgacttttgacatcaccatttcttgaagaccttggtattaaatgcatgagaaaccttttgccatctagaaatttctaagtttgtttatgttataagactgtaattaattgatagggaatttgggatctcaatccggggctttttgaaatcagatcattaaatatctcgtcactttggggacttgttatttttaactatgatgtggatatcctgttttaattatgaagtctagaattggtacatatgttgtatgctttgtaaagaatttcacttggtctaatttattgcatatactagcttctgttggaaaatgactgacagctagaaagtttaaggtaatttctaagtatactacctataagtaactgataagaattaggcatcattcagtgatatagcagatgactaatgggtttttcaggccctgcacttctctttcccattttcctgttgcattcagcctcttcaatgcttagtcacacctccactatagtacaaacaaacaaacaaacagaagaaaggaaagatggtgaattttgcaacagagctgcaaaaagtcagtcagtcaaagcaggaagaggttgaaggaactaaaacaaacaaacaaaggtgtctggactacagcacagtggacatgccatccatactggcctgtgccccgttatcaatcactgggcacaacagtgaagaagtgcaaatcaagtggtgtttgtttgtttgttagtagtaaggaccgtaacccaccccttcctccccccaaaactatactgttatttttctatgtaagcaaattgtttgaaatgctttgaaaatgaaatcttaatattaaaaggcatatgcatgtaaagtctttagtatatttatttgtataaagagtaaacaaagtgcatatagagtggccacaggtttgacacagagaccttggtgatgtaggctatgaacaaatttaaatggcaacttcattgctgccactgaaccaatcctgaatttgggctcaacaggtgaaaagtaacaatatcaaacgaatactaaacagcataacaaaaagattttcagactcttggtcataaagaccgtaatcgttcacattgaatcaatgactaaacatttttgattacccagctacctccaagcaaactgaaaactgtctagtggatcctgaagtccatagtgcctctagccgggtctttcaagtgttgcaccacagggtgatgattgatggtaaaaacagggatcaacccttgtagatcggtggtaagtatggaaaccctctaagaacagtgcagcgtatgtggtattcagactggttgcatacagcattcaaaaccagtgctggaatagcttgccccaaagtggtagagttataaaaggatatacattgacgtttcttaaaagcatgtgtaatagcatccaggttctgggaatgagttctgattaaaggtatactgcttaggaaagcactggcacaggcttagttcttgagaattaacatgcagcaaattatctattccacagctatccccccatgtagaaccagctttctcaaaaatgggtgctagtgatcacccaaaggaacaggagctaagccactggagaaacaaagtttaagtcctactggtgagagaatacagtcatttttgtacagaaacaatatatactacctggtatctaatattttaagaatgcatggtctagtactgtatagatactgaaatttgagggctaagtccatcaatctttctttatctatgattaatgtgccagcaaaacatttcagatcagctggcagcagggaaaagcaatcatcttcagatattattttggtcaactcctcgttttcaaaaatccccttttggtaatgcagttgtgatggtgaactagccagatgaaatggtggtatattctttccacaaggaggagtgcttaagtgctttcaaatattttggttgtcattatgtgtcactaagttactggtaccaaatttaaagaggaagtccttacacatattaagcactacagtgtgccttatacatgtatatgtactgaagtatgagttcagtgactttttggacagaacacaaacttctttcattagaaatttttaaaaaatgacttgggcatttgttgcaggagaaggacttgataatctgtggaatttaaatgttattcatgcttcttattttaaaagtgcttcaaatccttcaataaggttctgaaagcttgtccgattggatggttggaattcccagcatttcctcataagttgataaacct

SEQ ID NO: 2771 - protein, 751 aa, Homo sapiens; identical to SEQ ID NO: 2769

SEQ ID NO: 2772 - DNA, 2988 bp, Homo sapiens
cagcttttgttaccttattgaatggggaacaagcccagaacgcaattcagatgtttcatcaatattcttttagaggaaaagacttaatagtccagcttcagccaacagatgctttgttgtgtattaccaacgtgcccatttcttttacatcagaagagtttgaagaacttgttcgtgcttatggaaatattgagagatgttttctggtctatagtgaagttactggccattccaaaggctatggatttgtggaatacatgaaaaaggactttgctgcaaaggctagactggagctattgggtagacagttgggagcatcagcactctttgcacaatggatggatgttaatctattggcttcagagctcattcattctaagtgcctttgtattgataaactccccagtgactacagggattcagaagagctgttgcaaattttttccagtgtccataaacctgtgttttgccagcttgcacaggatgaaggtagttacgttggtggctttgcagtggttgaatatagcactgcggagcaggctgaagaggtccagcaggcagcagacggtatgaccatcaagggcagcaaagtccaggtttccttctgtgctcctggagcgccagggcgaagtacattagcagcattgatagcggctcaacgtgtgatgcacagtaatcaaaagggcttacttccagagccaaatccagtacaaattatgaaaagtttaaacaaccctgccatgttgcaagttcttctacagccccagttatgtggacgagctgttaaaccagccgttcttggaacacctcacagcttgccacatctgatgaatccatccatctctcctgcatttttacatttgaataaagcacatcagaatctttctcatataccactggcacaacaacaattaatgaagtttgagaatattcatactaataataaacccggcttacttggagagcccccagctgtggtacttcagactgcactagggatagggtcagtgcttccattgaaaaaggagttgggacatcatcatggagaagcacataaaagctgcctctaagaatcaaacttcactcttgggagaaccaccaaaagaaattcggctcagtaaaaatccatacttgaatttggcaagtgtgttgcccagtgtgtgcttatcatcccctgcaagtaaaaccactcttcataagactggaattgcaagcagcattctggatgcaatctctcagggaagtgaatcacaacacgcattggaaaagtgcattgcttattctccaccttttggtgattatgcacaggtaaataattcccaggttctgatgatactcagaaaaattggttcaactatatattgagttcactgaatatgaaattgtgatttctatattattaacgtaggcaaatcaaattgcactgatctatgtatttcttactcatcatttgaaatttgggaatgtgttcaagacattatttagtatcattttgcactagatatttacctctcactgtttacctagtggttggcaaactacagcccatagaacaaatctagcccaccacctggttttgtaaataaatttgtattgtaatacagccatgtccattcattaacatattgtctatggtgctgtcatgctataataaaagagttgagtgatgacagtagagactatgtggcctgcaagattaaatatttactatctggttctttatagaaaaatgctgctaacctctggtttgcactagtgtagacctaagaaacccaagggaatgcctctgttcttctccactgattgtagatggagaaagatgatcatatttacagacactactgtgctaacttctaaaccagccaatcaataacataaaaatattatgttcataagatgtcctgtgtcattacttaaatatttcagttttgctttggcccttcttcagcttactcttagtggtgtaagctgaatatatatcatgttagccctgtgtgattatggaatcataagagtccacaagagtcttataattatcagttctgactcttactttcctagaacagccagcttcttctcagatctatcctgttcgttggagtcttgtctccactttgatttccctggagcagctttgtgtttgcctgacccatccctaataaacttagaaaagaaaaccacttagaacaattgacgcctgattataagagtactagaaacagcccaagttctgtaaaaatggtgcagctggatattagtgaaatatttgccatctcttatatacctgggacaagacggaaaaatatgggttgggtagatgatgtaattaggtgacagtatatctatatttagagaacagtgatcacaaattgctgcagtctgaaggcattctcttatattgattcataagagtcatcttcagtcctttattagataacatttgaagtaatgacttagataaagacattaattgtaaaatttacaagatatagtcctgtacaattccaatttgtttcttttcaagaaacaaactttttataaacaggagaagcacaataaattttttaaaaattcattaaatacatatttaagctttaaaaattttttgaacttttatttctttttaaatttgcctttttcttagcagttttgcttattagattactgtgatttattgtatacttatatccatggaaagactttctcattcacacatggagaaattctgtgataatgatgccttttgcattactgtatgtcttctgcctccacacttgcttgcccagagatatggtggggaaatgaatcctccctgcactgttcagtgtctcctttgacagtccctgcttctagcgcacgcttgttcataaaatgggatttgttctctctctcgtgttctttcttccttataaacttaattaaatgttactaatggaacattaaagtacatggaattaaactaatggaatactaaaataaccattatag

SEQ ID NO: 2773 - protein, 339 aa, Homo sapiens
MFHQYSFRGKDLIVQLQPTDALLCITNVPISFTSEEFEELVRAYGNIERCFLVYSEVTGHSKGYGFVEYMKKDFAAKARLELLGRQLGASALFAQWMDVNLLASELIHSKCLCIDKLPSDYRDSEELLQIFSSVHKPVFCQLAQDEGSYVGGFAVVEYSTAEQAEEVQQAADGMTIKGSKVQVSFCAPGAPGRSTLAALIAAQRVMHSNQKGLLPEPNPVQIMKSLNNPAMLQVLLQPQLCGRAVKPAVLGTPHSLPHLMNPSISPAFLHLNKAHQNLSHIPLAQQQLMKFENIHTNNKPGLLGEPPAVVLQTALGIGSVLPLKKELGHHHGEAHKSCL

SEQ ID NO: 2774 - DNA, 5108 bp, Homo sapiens
gggaggcggtgcgtcgctgagcgcaggccgcggcggccgcggagtatcctggagctgcagacagtgcgggcctgcgcccagtcccggctgtcctcgccgcgacccctcctcagccctgggcgcgcgcacgctggggccccgcggggctggccgcctagcgagcctgccggtcgaccccagccagcgcagcgacggggcgctgcctggcccaggcgcacacggaagtgcgcttctctgaagtagctttggaaagtagagaagaaaatccagtttgcttcttggagaacactggacagctgaataaatgcagtatctaaatataaaagaggactgcaatgccatggctttctgtgctaaaatgaggagctccaagaagactgaggtgaacctggaggcccctgagccaggggtggaagtgatcttctatctgtcggacagggagcccctccggctgggcagtggagagtacacagcagaggaactgtgcatcagggctgcacaggcatgccgtatctctcctctttgtcacaacctctttgccctgtatgacgagaacaccaagctctggtatgctccaaatcgcaccatcaccgttgatgacaagatgtccctccggctccactaccggatgaggttctatttcaccaattggcatggaaccaacgacaatgagcagtcagtgtggcgtcattctccaaagaagcagaaaaatggctacgagaaaaaaaagattccagatgcaacccctctccttgatgccagctcactggagtatctgtttgctcagggacagtatgatttggtgaaatgcctggctcctattcgagaccccaagaccgagcaggatggacatgatattgagaacgagtgtctagggatggctgtcctggccatctcacactatgccatgatgaagaagatgcagttgccagaactgcccaaggacatcagctacaagcgatatattccagaaacattgaataagtccatcagacagaggaaccttctcaccaggatgcggataaataatgttttcaaggatttcctaaaggaatttaacaacaagaccatttgtgacagcagcgtgtccacgcatgacctgaaggtgaaatacttggctaccttggaaactttgacaaaacattacggtgctgaaatatttgagacttccatgttactgatttcatcagaaaatgagatgaattggtttcattcgaatgacggtggaaacgttctctactacgaagtgatggtgactgggaatcttggaatccagtggaggcataaaccaaatgttgtttctgttgaaaaggaaaaaaataaactgaagcggaaaaaactggaaaataaacacaagaaggatgaggagaaaaacaagatccgggaagagtggaacaatttttcttacttccctgaaatcactcacattgtaataaaggagtctgtggtcagcattaacaagcaggacaacaagaaaatggaactgaagctctcttcccacgaggaggccttgtcctttgtgtccctggtagatggctacttccggctcacagcagatgcccatcattacctctgcaccgacgtggcccccccgttgatcgtccacaacatacagaatggctgtcatggtccaatctgtacagaatacgccatcaataaattgcggcaagaaggaagcgaggaggggatgtacgtgctgaggtggagctgcaccgactttgacaacatcctcatgaccgtcacctgctttgagaagtctgagcaggtgcagggtgcccagaagcagttcaagaactttcagatcgaggtgcagaagggccgctacagtctgcacggttcggaccgcagcttccccagcttgggagacctcatgagccacctcaagaagcagatcctgcgcacggataacatcagcttcatgctaaaacgctgctgccagcccaagccccgagaaatctccaacctgctggtggctactaagaaagcccaggagtggcagcccgtctaccccatgagccagctgagtttcgatcggatcctcaagaaggatctggtgcagggcgagcaccttgggagaggcacgagaacacacatctattctgggaccctgatggattacaaggatgacgaaggaacttctgaagagaagaagataaaagtgatcctcaaagtcttagaccccagccacagggatatttccctggccttcttcgaggcagccagcatgatgagacaggtctcccacaaacacatcgtgtacctctatggcgtctgtgtccgcgacgtggagaatatcatggtggaagagtttgtggaagggggtcctctggatctcttcatgcaccggaaaagcgatgtccttaccacaccatggaaattcaaagttgccaaacagctggccagtgccctgagctacttggaggataaagacctggtccatggaaatgtgtgtactaaaaacctcctcctggcccgtgagggcatcgacagtgagtgtggcccattcatcaagctcagtgaccccggcatccccattacggtgctgtctaggcaagaatgcattgaacgaatcccatggattgctcctgagtgtgttgaggactccaagaacctgagtgtggctgctgacaagtggagctttggaaccacgctctgggaaatctgctacaatggcgagatccccttgaaagacaagacgctgattgagaaagagagattctatgaaagccggtgcaggccagtgacaccatcatgtaaggagctggctgacctcatgacccgctgcatgaactatgaccccaatcagaggcctttcttccgagccatcatgagagacattaataagcttgaagagcagaatccagatattgtttcagaaaaaaaaccagcaactgaagtggaccccacacattttgaaaagcgcttcctaaagaggatccgtgacttgggagagggccactttgggaaggttgagctctgcaggtatgaccccgaaggggacaatacaggggagcaggtggctgttaaatctctgaagcctgagagtggaggtaaccacatagctgatctgaaaaaggaaatcgagatcttaaggaacctctatcatgagaacattgtgaagtacaaaggaatctgcacagaagacggaggaaatggtattaagctcatcatggaatttctgccttcgggaagccttaaggaatatcttccaaagaataagaacaaaataaacctcaaacagcagctaaaatatgccgttcagatttgtaaggggatggactatttgggttctcggcaatacgttcaccgggacttggcagcaagaaatgtccttgttgagagtgaacaccaagtgaaaattggagacttcggtttaaccaaagcaattgaaaccgataaggagtattacaccgtcaaggatgaccgggacagccctgtgttttggtatgctccagaatgtttaatgcaatctaaattttatattgcctctgacgtctggtcttttggagtcactctgcatgagctgctgacttactgtgattcagattctagtcccatggctttgttcctgaaaatgataggcccaacccatggccagatgacagtcacaagacttgtgaatacgttaaaagaaggaaaacgcctgccgtgcccacctaactgtccagatgaggtttatcaacttatgaggaaatgctgggaattccaaccatccaatcggacaagctttcagaaccttattgaaggatttgaagcacttttaaaataagaagcatgaataacatttaaattccacagattatcaagtccttctcctgcaacaaatgcccaagtcattttttaaaaatttctaatgaaagaagtttgtgttctgtccaaaaagtcactgaactcatacttcagtacatatacatgtataaggcacactgtagtgcttaatatgtgtaaggacttcctctttaaatttggtaccagtaacttagtgacacataatgacaaccaaaatatttgaaagcacttaagcactcctccttgtggaaagaatataccaccatttcatctggctagttcaccatcacaactgcattaccaaaaggggatttttgaaaacgaggagttgaccaaaataatatctgaagatgattgcttttccctgctgccagctgatctgaaatgttttgctggcacattaatcatagataaagaaagattgatggacttagccctcaaatttcagtatctatacagtactagaccatgcattcttaaaatattagataccaggtagtatatattgtttctgtacaaaaatgactgtattctctcaccagtaggacttaaactttgtttctccagtggcttagctcctgttcctttgggtgatcactagcacccatttttgagaaagctggttctacatggggggatagctgtggaatagataatttgctgcatgttaattctcaagaactaagcctgtgccagtgctttcctaagcagtatacctttaatcagaactcattcccagaacctggatgctattacacatgcttttaagaaacgtcaatgtatatccttttataactctaccactttggggcaagctattccagcactggttttgaatgctgtatgcaaccagtctgaataccacatacgctgcactgttcttagagggtttccatacttaccaccgatctacaagggttgatccctgtttttaccatcaatcatcaccctgtggtgcaacacttgaaagacccggctagaggcactatggacttcaggatccactagacagttttcagtttgcttggaggtagctgggtaatcaaaaatgtttagtcattgattcaatgtgaacgattacggtctttatgaccaagagtctgaaaatctttttgttatgctgtttagtattcgtttgatattgttacttttcacctgttgagcccaaattcaggattggttcagtggcagcaatgaagttgccatttaaatttgttcatagcctacatcaccaaggtctctgtgtcaaacctgtggccactctatatgcactttgtttactctttatacaaataaatatactaaagactttacatgca

SEQ ID NO: 2775 - protein, 1154 aa, Homo sapiens; identical to SEQ ID NO: 93

SEQ ID NO: 2776 - DNA, 5055 bp, Homo sapiens
agttcagagttaggcaaacagaggtgagcattttgtgccagtccttcacgtacagacaggttaaaaccgatctacacaataatttgcaaataaggtctgctttgctccctctagaaccagggaccccactcccatgccgacagtatgggctgctgtcttcaggaccattgcaagcgcttctctgaagtagctttggaaagtagagaagaaaatccagtttgcttcttggagaacactggacagctgaataaatgcagtatctaaatataaaagaggactgcaatgccatggctttctgtgctaaaatgaggagctccaagaagactgaggtgaacctggaggcccctgagccaggggtggaagtgatcttctatctgtcggacagggagcccctccggctgggcagtggagagtacacagcagaggaactgtgcatcagggctgcacaggcatgccgtatctctcctctttgtcacaacctctttgccctgtatgacgagaacaccaagctctggtatgctccaaatcgcaccatcaccgttgatgacaagatgtccctccggctccactaccggatgaggttctatttcaccaattggcatggaaccaacgacaatgagcagtcagtgtggcgtcattctccaaagaagcagaaaaatggctacgagaaaaaaaagattccagatgcaacccctctccttgatgccagctcactggagtatctgtttgctcagggacagtatgatttggtgaaatgcctggctcctattcgagaccccaagaccgagcaggatggacatgatattgagaacgagtgtctagggatggctgtcctggccatctcacactatgccatgatgaagaagatgcagttgccagaactgcccaaggacatcagctacaagcgatatattccagaaacattgaataagtccatcagacagaggaaccttctcaccaggatgcggataaataatgttttcaaggatttcctaaaggaatttaacaacaagaccatttgtgacagcagcgtgtccacgcatgacctgaaggtgaaatacttggctaccttggaaactttgacaaaacattacggtgctgaaatatttgagacttccatgttactgatttcatcagaaaatgagatgaattggtttcattcgaatgacggtggaaacgttctctactacgaagtgatggtgactgggaatcttggaatccagtggaggcataaaccaaatgttgtttctgttgaaaaggaaaaaaataaactgaagcggaaaaaactggaaaataaacacaagaaggatgaggagaaaaacaagatccgggaagagtggaacaatttttcttacttccctgaaatcactcacattgtaataaaggagtctgtggtcagcattaacaagcaggacaacaagaaaatggaactgaagctctcttcccacgaggaggccttgtcctttgtgtccctggtagatggctacttccggctcacagcagatgcccatcattacctctgcaccgacgtggcccccccgttgatcgtccacaacatacagaatggctgtcatggtccaatctgtacagaatacgccatcaataaattgcggcaagaaggaagcgaggaggggatgtacgtgctgaggtggagctgcaccgactttgacaacatcctcatgaccgtcacctgctttgagaagtctgagcaggtgcagggtgcccagaagcagttcaagaactttcagatcgaggtgcagaagggccgctacagtctgcacggttcggaccgcagcttccccagcttgggagacctcatgagccacctcaagaagcagatcctgcgcacggataacatcagcttcatgctaaaacgctgctgccagcccaagccccgagaaatctccaacctgctggtggctactaagaaagcccaggagtggcagcccgtctaccccatgagccagctgagtttcgatcggatcctcaagaaggatctggtgcagggcgagcaccttgggagaggcacgagaacacacatctattctgggaccctgatggattacaaggatgacgaaggaacttctgaagagaagaagataaaagtgatcctcaaagtcttagaccccagccacagggatatttccctggccttcttcgaggcagccagcatgatgagacaggtctcccacaaacacatcgtgtacctctatggcgtctgtgtccgcgacgtggagaatatcatggtggaagagtttgtggaagggggtcctctggatctcttcatgcaccggaaaagcgatgtccttaccacaccatggaaattcaaagttgccaaacagctggccagtgccctgagctacttggaggataaagacctggtccatggaaatgtgtgtactaaaaacctcctcctggcccgtgagggcatcgacagtgagtgtggcccattcatcaagctcagtgaccccggcatccccattacggtgctgtctaggcaagaatgcattgaacgaatcccatggattgctcctgagtgtgttgaggactccaagaacctgagtgtggctgctgacaagtggagctttggaaccacgctctgggaaatctgctacaatggcgagatccccttgaaagacaagacgctgattgagaaagagagattctatgaaagccggtgcaggccagtgacaccatcatgtaaggagctggctgacctcatgacccgctgcatgaactatgaccccaatcagaggcctttcttccgagccatcatgagagacattaataagcttgaagagcagaatccagatattgtttcagaaaaaaaaccagcaactgaagtggaccccacacattttgaaaagcgcttcctaaagaggatccgtgacttgggagagggccactttgggaaggttgagctctgcaggtatgaccccgaaggggacaatacaggggagcaggtggctgttaaatctctgaagcctgagagtggaggtaaccacatagctgatctgaaaaaggaaatcgagatcttaaggaacctctatcatgagaacattgtgaagtacaaaggaatctgcacagaagacggaggaaatggtattaagctcatcatggaatttctgccttcgggaagccttaaggaatatcttccaaagaataagaacaaaataaacctcaaacagcagctaaaatatgccgttcagatttgtaaggggatggactatttgggttctcggcaatacgttcaccgggacttggcagcaagaaatgtccttgttgagagtgaacaccaagtgaaaattggagacttcggtttaaccaaagcaattgaaaccgataaggagtattacaccgtcaaggatgaccgggacagccctgtgttttggtatgctccagaatgtttaatgcaatctaaattttatattgcctctgacgtctggtcttttggagtcactctgcatgagctgctgacttactgtgattcagattctagtcccatggctttgttcctgaaaatgataggcccaacccatggccagatgacagtcacaagacttgtgaatacgttaaaagaaggaaaacgcctgccgtgcccacctaactgtccagatgaggtttatcaacttatgaggaaatgctgggaattccaaccatccaatcggacaagctttcagaaccttattgaaggatttgaagcacttttaaaataagaagcatgaataacatttaaattccacagattatcaagtccttctcctgcaacaaatgcccaagtcattttttaaaaatttctaatgaaagaagtttgtgttctgtccaaaaagtcactgaactcatacttcagtacatatacatgtataaggcacactgtagtgcttaatatgtgtaaggacttcctctttaaatttggtaccagtaacttagtgacacataatgacaaccaaaatatttgaaagcacttaagcactcctccttgtggaaagaatataccaccatttcatctggctagttcaccatcacaactgcattaccaaaaggggatttttgaaaacgaggagttgaccaaaataatatctgaagatgattgcttttccctgctgccagctgatctgaaatgttttgctggcacattaatcatagataaagaaagattgatggacttagccctcaaatttcagtatctatacagtactagaccatgcattcttaaaatattagataccaggtagtatatattgtttctgtacaaaaatgactgtattctctcaccagtaggacttaaactttgtttctccagtggcttagctcctgttcctttgggtgatcactagcacccatttttgagaaagctggttctacatggggggatagctgtggaatagataatttgctgcatgttaattctcaagaactaagcctgtgccagtgctttcctaagcagtatacctttaatcagaactcattcccagaacctggatgctattacacatgcttttaagaaacgtcaatgtatatccttttataactctaccactttggggcaagctattccagcactggttttgaatgctgtatgcaaccagtctgaataccacatacgctgcactgttcttagagggtttccatacttaccaccgatctacaagggttgatccctgtttttaccatcaatcatcaccctgtggtgcaacacttgaaagacccggctagaggcactatggacttcaggatccactagacagttttcagtttgcttggaggtagctgggtaatcaaaaatgtttagtcattgattcaatgtgaacgattacggtctttatgaccaagagtctgaaaatctttttgttatgctgtttagtattcgtttgatattgttacttttcacctgttgagcccaaattcaggattggttcagtggcagcaatgaagttgccatttaaatttgttcatagcctacatcaccaaggtctctgtgtcaaacctgtggccactctatatgcactttgtttactctttatacaaataaatatactaaagactttacatgca

SEQ ID NO: 2777 - protein, 1154 aa, Homo sapiens; identical to SEQ ID NO: 93

SEQ ID NO: 2778 - DNA, 1333 bp, Homo sapiens
gggaggcggtgcgtcgctgagcgcaggccgcggcggccgcggagtatcctggagctgcagacagtgcgggcctgcgcccagtcccggctgtcctcgccgcgacccctcctcagccctgggcgcgcgcacgctggggccccgcggggctggccgcctagcgagcctgccggtcgaccccagccagcgcagcgacggggcgctgcctggcccaggcgcacacggaagtgcgcttctctgaagtagctttggaaagtagagaagaaaatccagtttgcttcttggagaacactggacagctgaataaatgcagtatctaaatataaaagaggactgcaatgccatggctttctgtgctaaaatgaggagctccaagaagactgaggtgaacctggaggcccctgagccaggggtggaagtgatcttctatctgtcggacagggagcccctccggctgggcagtggagagtacacagcagaggaactgtgcatcagggctgcacaggcatgccgtatctctcctctttgtcacaacctctttgccctgtatgacgagaacaccaagctctggtatgctccaaatcgcaccatcaccgttgatgacaagatgtccctccggctccactaccggatgaggttctatttcaccaattggcatggaaccaacgacaatgagcagtcagtgtggcgtcattctccaaagaagcagaaaaatggctacgagaaaaaaaagattccagatgcaacccctctccttgatgccagctcactggagtatctgtttgctcagggacagtatgatttggtgaaatgcctggctcctattcgagaccccaagaccgagcaggatggacatgatattgagaacgagtgtctagggatggctgtcctggccatctcacactatgccatgatgaagaagatgcagttgccagaactgcccaaggacatcagctacaagcgatatattccagaaacattgaataagtccatcagacagaggaaccttctcaccaggatgcggataaataatgttttcaaggatttcctaaaggaatttaacaacaagaccatttgtgacagcagcgtgtccacgcatgacctgaaggtgaaatacttggctaccttggaaactttgacaaaacattacggtgctgaaatatttgagacttccatgttactgatttcatcagaaaatgagatgaattggtttcattcgaatgacggtggaaacgttctctactacgaagtgatggtgactgggaatcttggaatccagtggaggcataaaccaaatgttgtttctgttgaaaaggaaaaaaataaactgaagcgg

SEQ ID NO: 2779 - protein, 342 aa, Homo sapiens
MQYLNIKEDCNAMAFCAKMRSSKKTEVNLEAPEPGVEVIFYLSDREPLRLGSGEYTAEELCIRAAQACRISPLCHNLFALYDENTKLWYAPNRTITVDDKMSLRLHYRMRFYFTNWHGTNDNEQSVWRHSPKKQKNGYEKKKIPDATPLLDASSLEYLFAQGQYDLVKCLAPIRDPKTEQDGHDIENECLGMAVLAISHYAMMKKMQLPELPKDISYKRYIPETLNKSIRQRNLLTRMRINNVFKDFLKEFNNKTICDSSVSTHDLKVKYLATLETLTKHYGAEIFETSMLLISSENEMNWFHSNDGGNVLYYEVMVTGNLGIQWRHKPNVVSVEKEKNKLK

SEQ ID NO: 2780 - DNA, 4004 bp, Homo sapiens
gtaatccttcagctctggtggtaagggagatgcagtgagctcccggctgggagagagggttattttgcaaaactcccctggtaccgtgcccgcggaatattgcaggaggtctgtgaggtattaaaaagtgtcagcaaactgcattgaataacagacatcctaagaggggatattttccacctctataatgaagaaaagcaggagtgtgatgacggtgatggctgatgataatgttaaagattattttgaatgtagcttgagtaaatcctacagttcttccagtaacacacttgggatcgacctctggagagggagaaggtgttgctcaggaaacttacagttaccaccactgtctcaaagacagagtgaaagggcaaggactcctgagggagatggtatttccaggccgaccacactgcctttgacaacgcttccaagcattgctattacaactgtaagccaggagtgctttgatgtggaaaatggcccttccccaggtcggagtccactggatccccaggccagctcttccgctgggctggtacttcacgccacctttcctgggcacagccagcgcagagagtcatttctctacagatcagacagcgactatgacttgtcaccaaaggcgatgtcgagaaactcttctcttccaagcgagcaacacggcgatgacttgattgtaactccttttgcccaggtccttgccagcttgcgaagtgtgagaaacaacttcactatactgacaaaccttcatggtacatctaacaagaggtccccagctgctagtcagcctcctgtctccagagtcaacccacaagaagaatcttatcaaaaattagcaatggaaacgctggaggaattagactggtgtttagaccagctagagaccatacagacctaccggtctgtcagtgagatggcttctaacaagttcaaaagaatgctgaaccgggagctgacacacctctcagagatgagccgatcagggaaccaggtgtctgaatacatttcaaatactttcttagacaagcagaatgatgtggagatcccatctcctacccagaaagacagggagaaaaagaaaaagcagcagctcatgacccagataagtggagtgaagaaattaatgcatagttcaagcctaaacaatacaagcatctcacgctttggagtcaacactgaaaatgaagatcacctggccaaggagctggaagacctgaacaaatggggtcttaacatctttaatgtggctggatattctcacaatagacccctaacatgcatcatgtatgctatattccaggaaagagacctcctaaagacattcagaatctcatctgacacatttataacctacatgatgactttagaagaccattaccattctgacgtggcatatcacaacagcctgcacgctgctgatgtagcccagtcgacccatgttctcctttctacaccagcattagacgctgtcttcacagatttggagatcctggctgccatttttgcagctgccatccatgacgttgatcatcctggagtctccaatcagtttctcatcaacacaaattcagaacttgctttgatgtataatgatgaatctgtgttggaaaatcatcaccttgctgtgggtttcaaactgctgcaagaagaacactgtgacatcttcatgaatctcaccaagaagcagcgtcagacactcaggaagatggttattgacatggtgttagcaactgatatgtctaaacatatgagcctgctggcagacctgaagacaatggtagaaacgaagaaagttacaagttcaggcgttcttctcctagacaactataccgatcgcattcaggtccttcgcaacatggtacactgtgcagacctgagcaaccccaccaagtccttggaattgtatcggcaatggacagaccgcatcatggaggaatttttccagcagggagacaaagagcgggagaggggaatggaaattagcccaatgtgtgataaacacacagcttctgtggaaaaatcccaggttggtttcatcgactacattgtccatccattgtgggagacatgggcagatttggtacagcctgatgctcaggacattctcgataccttagaagataacaggaactggtatcagagcatgatacctcaaagtccctcaccaccactggacgagcagaacagggactgccagggtctgatggagaagtttcagtttgaactgactctcgatgaggaagattctgaaggacctgagaaggagggagagggacacagctatttcagcagcacaaagacgctttgtgtgattgatccagaaaacagagattccctgggagagactgacatagacattgcaacagaagacaagtcccccgtggatacataatccccctctccctgtggagatgaacattctatccttgatgagcatgccagctatgtggtagggccagcccaccatgggggccaagacctgcacaggacaagggccacctggcctttcagttacttgagtttggagtcagaaagcaagaccaggaagcaaatagcagctcaggaaatcccacggttgacttgccttgatggcaagcttggtggagagggctgaagctgttgctgggggccgattctgatcaagacacatggcttgaaaatggaagacacaaaactgagagatcattctgcactaagtttcgggaacttatccccgacagtgactgaactcactgactaataacttcatttatgaatcttctcacttgtccctttgtctgccaacctgtgtgccttttttgtaaaacattttcatgtctttaaaatgcctgttgaatacctggagtttagtatcaacttctacacagataagctttcaaagttgacaaacttttttgactctttctggaaaagggaaagaaaatagtcttccttctttcttgggcaatatccttcactttactacagttacttttgcaaacagacagaaaggatacacttctaaccacattttacttccttcccctgttgtccagtccaactccacagtcactcttaaaacttctctctgtttgcctgcctccaacagtacttttaactttttgctgtaaacagaataaaattgaacaaattagggggtagaaaggagcagtggtgtcgttcaccgtgagagtctgcatagaactcagcagtgtgccctgctgtgtcttggaccctgccccccacaggagttgtacagtccctggccctgttccctacctcctctcttcaccccgttaggctgttttcaatgtaatgctgccgtccttctcttgcactgccttctgcgctaacacctccattcctgtttataaccgtgtatttattacttaatgtatataatgtaatgttttgtaagttattaatttatatatctaacattgcctgccaatggtggtgttaaatttgtgtagaaaactctgcctaagagttacgactttttcttgtaatgttttgtattgtgtattatataacccaaacgtcacttagtagagacatatggcccccttggcagagaggacaggggtgggcttttgttcaaagggtctgccctttccctgcctgagttgctacttctgcacaacccctttatgaaccagttttggaaacaatattctcacattagatactaaatggtttatactgagcttttacttttgtatagcttgataggggcagggggcaatgggatgtagtttttacccaggttctatccaaatctatgtgggcatgagttgggttataactggatcctactatcattgtggctttggttcaaaaggaaacactacatttgctcacagatgattcttctgaatgctcccgaactactgactttgaagaggtagcctcctgcctgccattaagcaggaatgtcatgttccagttcattacaaaagaaaacaataaaacaatgtgaatttttataataaaatgtgaactgatgtagcaaattacgc

SEQ ID NO: 2781 - protein, 736 aa, Homo sapiens; identical to SEQ ID NO: 99

SEQ ID NO: 2782 - DNA, 3955 bp, Homo sapiens
gcggccgcggcggtgcagcagaggcgcctcgggcaggaggagggcggcttctgcgagggcagcctgaggtattaaaaagtgtcagcaaactgcattgaataacagacatcctaagaggggatattttccacctctataatgaagaaaagcaggagtgtgatgacggtgatggctgatgataatgttaaagattattttgaatgtagcttgagtaaatcctacagttcttccagtaacacacttgggatcgacctctggagagggagaaggtgttgctcaggaaacttacagttaccaccactgtctcaaagacagagtgaaagggcaaggactcctgagggagatggtatttccaggccgaccacactgcctttgacaacgcttccaagcattgctattacaactgtaagccaggagtgctttgatgtggaaaatggcccttccccaggtcggagtccactggatccccaggccagctcttccgctgggctggtacttcacgccacctttcctgggcacagccagcgcagagagtcatttctctacagatcagacagcgactatgacttgtcaccaaaggcgatgtcgagaaactcttctcttccaagcgagcaacacggcgatgacttgattgtaactccttttgcccaggtccttgccagcttgcgaagtgtgagaaacaacttcactatactgacaaaccttcatggtacatctaacaagaggtccccagctgctagtcagcctcctgtctccagagtcaacccacaagaagaatcttatcaaaaattagcaatggaaacgctggaggaattagactggtgtttagaccagctagagaccatacagacctaccggtctgtcagtgagatggcttctaacaagttcaaaagaatgctgaaccgggagctgacacacctctcagagatgagccgatcagggaaccaggtgtctgaatacatttcaaatactttcttagacaagcagaatgatgtggagatcccatctcctacccagaaagacagggagaaaaagaaaaagcagcagctcatgacccagataagtggagtgaagaaattaatgcatagttcaagcctaaacaatacaagcatctcacgctttggagtcaacactgaaaatgaagatcacctggccaaggagctggaagacctgaacaaatggggtcttaacatctttaatgtggctggatattctcacaatagacccctaacatgcatcatgtatgctatattccaggaaagagacctcctaaagacattcagaatctcatctgacacatttataacctacatgatgactttagaagaccattaccattctgacgtggcatatcacaacagcctgcacgctgctgatgtagcccagtcgacccatgttctcctttctacaccagcattagacgctgtcttcacagatttggagatcctggctgccatttttgcagctgccatccatgacgttgatcatcctggagtctccaatcagtttctcatcaacacaaattcagaacttgctttgatgtataatgatgaatctgtgttggaaaatcatcaccttgctgtgggtttcaaactgctgcaagaagaacactgtgacatcttcatgaatctcaccaagaagcagcgtcagacactcaggaagatggttattgacatggtgttagcaactgatatgtctaaacatatgagcctgctggcagacctgaagacaatggtagaaacgaagaaagttacaagttcaggcgttcttctcctagacaactataccgatcgcattcaggtccttcgcaacatggtacactgtgcagacctgagcaaccccaccaagtccttggaattgtatcggcaatggacagaccgcatcatggaggaatttttccagcagggagacaaagagcgggagaggggaatggaaattagcccaatgtgtgataaacacacagcttctgtggaaaaatcccaggttggtttcatcgactacattgtccatccattgtgggagacatgggcagatttggtacagcctgatgctcaggacattctcgataccttagaagataacaggaactggtatcagagcatgatacctcaaagtccctcaccaccactggacgagcagaacagggactgccagggtctgatggagaagtttcagtttgaactgactctcgatgaggaagattctgaaggacctgagaaggagggagagggacacagctatttcagcagcacaaagacgctttgtgtgattgatccagaaaacagagattccctgggagagactgacatagacattgcaacagaagacaagtcccccgtggatacataatccccctctccctgtggagatgaacattctatccttgatgagcatgccagctatgtggtagggccagcccaccatgggggccaagacctgcacaggacaagggccacctggcctttcagttacttgagtttggagtcagaaagcaagaccaggaagcaaatagcagctcaggaaatcccacggttgacttgccttgatggcaagcttggtggagagggctgaagctgttgctgggggccgattctgatcaagacacatggcttgaaaatggaagacacaaaactgagagatcattctgcactaagtttcgggaacttatccccgacagtgactgaactcactgactaataacttcatttatgaatcttctcacttgtccctttgtctgccaacctgtgtgccttttttgtaaaacattttcatgtctttaaaatgcctgttgaatacctggagtttagtatcaacttctacacagataagctttcaaagttgacaaacttttttgactctttctggaaaagggaaagaaaatagtcttccttctttcttgggcaatatccttcactttactacagttacttttgcaaacagacagaaaggatacacttctaaccacattttacttccttcccctgttgtccagtccaactccacagtcactcttaaaacttctctctgtttgcctgcctccaacagtacttttaactttttgctgtaaacagaataaaattgaacaaattagggggtagaaaggagcagtggtgtcgttcaccgtgagagtctgcatagaactcagcagtgtgccctgctgtgtcttggaccctgccccccacaggagttgtacagtccctggccctgttccctacctcctctcttcaccccgttaggctgttttcaatgtaatgctgccgtccttctcttgcactgccttctgcgctaacacctccattcctgtttataaccgtgtatttattacttaatgtatataatgtaatgttttgtaagttattaatttatatatctaacattgcctgccaatggtggtgttaaatttgtgtagaaaactctgcctaagagttacgactttttcttgtaatgttttgtattgtgtattatataacccaaacgtcacttagtagagacatatggcccccttggcagagaggacaggggtgggcttttgttcaaagggtctgccctttccctgcctgagttgctacttctgcacaacccctttatgaaccagttttggaaacaatattctcacattagatactaaatggtttatactgagcttttacttttgtatagcttgataggggcagggggcaatgggatgtagtttttacccaggttctatccaaatctatgtgggcatgagttgggttataactggatcctactatcattgtggctttggttcaaaaggaaacactacatttgctcacagatgattcttctgaatgctcccgaactactgactttgaagaggtagcctcctgcctgccattaagcaggaatgtcatgttccagttcattacaaaagaaaacaataaaacaatgtgaatttttataataaaatgtgaactgatgtagcaaattacgc

SEQ ID NO: 2783 - protein, 736 aa, Homo sapiens; identical to SEQ ID NO: 99

SEQ ID NO: 2784 - DNA, 4249 bp, Homo sapiens
gcggccgcggcggtgcagcagaggcgcctcgggcaggaggagggcggcttctgcgagggcagcctgaggtattaaaaagtgtcagcaaactgcattgaataacagacatcctaagaggggatattttccacctctataatgaagaaaagcaggagtgtgatgacggtgatggctgatgataatgttaaagattattttgaatgtagcttgagtaaatcctacagttcttccagtaacacacttgggatcgacctctggagagggagaaggtgttgctcaggaaacttacagttaccaccactgtctcaaagacagagtgaaagggcaaggactcctgagggagatggtatttccaggccgaccacactgcctttgacaacgcttccaagcattgctattacaactgtaagccaggagtgctttgatgtggaaaatggcccttccccaggtcggagtccactggatccccaggccagctcttccgctgggctggtacttcacgccacctttcctgggcacagccagcgcagagagtcatttctctacagatcagacagcgactatgacttgtcaccaaaggcgatgtcgagaaactcttctcttccaagcgagcaacacggcgatgacttgattgtaactccttttgcccaggtccttgccagcttgcgaagtgtgagaaacaacttcactatactgacaaaccttcatggtacatctaacaagaggtccccagctgctagtcagcctcctgtctccagagtcaacccacaagaagaatcttatcaaaaattagcaatggaaacgctggaggaattagactggtgtttagaccagctagagaccatacagacctaccggtctgtcagtgagatggcttctaacaagttcaaaagaatgctgaaccgggagctgacacacctctcagagatgagccgatcagggaaccaggtgtctgaatacatttcaaatactttcttagacaagcagaatgatgtggagatcccatctcctacccagaaagacagggagaaaaagaaaaagcagcagctcatgacccagataagtggagtgaagaaattaatgcatagttcaagcctaaacaatacaagcatctcacgctttggagtcaacactgaaaatgaagatcacctggccaaggagctggaagacctgaacaaatggggtcttaacatctttaatgtggctggatattctcacaatagacccctaacatgcatcatgtatgctatattccaggaaagagacctcctaaagacattcagaatctcatctgacacatttataacctacatgatgactttagaagaccattaccattctgacgtggcatatcacaacagcctgcacgctgctgatgtagcccagtcgacccatgttctcctttctacaccagcattagacgctgtcttcacagatttggagatcctggctgccatttttgcagctgccatccatgacgttgatcatcctggagtctccaatcagtttctcatcaacacaaattcagaacttgctttgatgtataatgatgaatctgtgttggaaaatcatcaccttgctgtgggtttcaaactgctgcaagaagaacactgtgacatcttcatgaatctcaccaagaagcagcgtcagacactcaggaagatggttattgacatggtgttagcaactgatatgtctaaacatatgagcctgctggcagacctgaagacaatggtagaaacgaagaaagttacaagttcaggcgttcttctcctagacaactataccgatcgcattcaggtccttcgcaacatggtacactgtgcagacctgagcaaccccaccaagtccttggaattgtatcggcaatggacagaccgcatcatggaggaatttttccagcagggagacaaagagcgggagaggggaatggaaattagcccaatgtgtgataaacacacagcttctgtggaaaaatcccaggttggtttcatcgactacattgtccatccattgtgggagacatgggcagatttggtacagcctgatgctcaggacattctcgataccttagaagataacaggaactggtatcagagcatgatacctcaaagtccctcaccaccactggacgagcagaacagggactgccagggtctgatggagaagtttcagtttgaactgactctcgatgaggaagattctgaaggacctgagaaggagggagagggacacagctatttcagcagcacaaagacgctttgtgtgattgatccagaaaacagagattccctgggagagactgacatagacattgcaacagaagacaagtcccccgtggatacataatccccctctccctgtggagatgaacattctatccttgatgagcatgccagctatgtggtagggccagcccaccatgggggccaagacctgcacaggacaagggccacctggcctttcagttacttgagtttggagtcagaaagcaagaccaggaagcaaatagcagctcaggaaatcccacggttgacttgccttgatggcaagcttggtggagagggctgaagctgttgctgggggccgattctgatcaagacacatggcttgaaaatggaagacacaaaactgagagatcattctgcactaagtttcgggaacttatccccgacagtgactgaactcactgactaataacttcatttatgaatcttctcacttgtccctttgtctgccaacctgtgtgccttttttgtaaaacattttcatgtctttaaaatgcctgttgaatacctggagtttagtatcaacttctacacagataagctttcaaagttgacaaacttttttgactctttctggaaaagggaaagaaaatagtcttccttctttcttgggcaatatccttcactttactacagttacttttgcaaacagacagaaaggatacacttctaaccacattttacttccttcccctgttgtccagtccaactccacagtcactcttaaaacttctctctgtttgcctgcctccaacagtacttttaactttttgctgtaaacagaataaaattgaacaaattagggggtagaaaggagcagtggtgtcgttcaccgtgagagtctgcatagaactcagcagtgtgccctgctgtgtcttggaccctgccccccacaggagttgtacagtccctggccctgttccctacctcctctcttcaccccgttaggctgttttcaatgtaatgctgccgtccttctcttgcactgccttctgcgctaacacctccattcctgtttataaccgtgtatttattacttaatgtatataatgtaatgttttgtaagttattaatttatatatctaacattgcctgccaatggtggtgttaaatttgtgtagaaaactctgcctaagagttacgactttttcttgtaatgttttgtattgtgtattatataacccaaacgtcacttagtagagacatatggcccccttggcagagaggacaggggtgggcttttgttcaaagggtctgccctttccctgcctgagttgctacttctgcacaacccctttatgaaccagttttggaaacaatattctcacattagatactaaatggtttatactgagcttttacttttgtatagcttgataggggcagggggcaatgggatgtagtttttacccaggttctatccaaatctatgtgggcatgagttgggttataactggatcctactatcattgtggctttggttcaaaaggaaacactacatttgctcacagatgattcttctgaatgctcccgaactactgactttgaagaggtagcctcctgcctgccattaagcaggaatgtcatgttccagttcattacaaaagaaaacaataaaacaatgtgaatttttataataaaatgtgaactgatgtagcaaattacgcaaatgtgaagcctcttctgataacacttgttaggcctcttactgatgtcagtttcagtttgtaaaatatgtttcatgctttcagttcagcattgtgactcagtaattacagaaaatggcacaaatgtgcatgaccaatgtatgtctatgaacactgcattgtttcaggtggacattttatcattttcaaatgtttctcacaatgtatgttatagtattattattatatattgtgttcaaatgcattctaaagagacttttatatgaggtgaataaagaaaagcatgattagatt

SEQ ID NO: 2785 - protein, 736 aa, Homo sapiens; identical to SEQ ID NO: 99

SEQ ID NO: 2786 - DNA, 1148 bp, Homo sapiens
ctgactccaggagctggggtcaaattgctggagcaggctgatttgcatagcccaatggccaagctgcatgcaaatgaggcggaaggtggttggctgagggttggcaggataaccccggagagcggggccctttgtcctccagtggctggtaggcagtggctgggaggcagcggcccaattagtgtcgtgcggcccgtggcgaggcgaggtccggggagcgagcgagcaagcaaggcgggaggggtggccggagctgcggcggctggcacaggaggaggagcccgggcgggcgaggggcggccggagagcgccagggcctgagctgccggagcggcgcctgtgagtgagtgcagaaagcaggcgcccgcgcgctagccgtggcaggagcagcccgcacgccgcgctctctccctgggcgacctgcagtttgcaatatgactttggaggaattctcggctggagagcagaagaccgaaaggatggataaggtgggggatgccctggaggaagtgctcagcaaagccctgagtcagcgcacgatcactgtcggggtgtacgaagcggccaagctgctcaacgtcgaccccgataacgtggtgttgtgcctgctggcggcggacgaggacgacgacagagatgtggctctgcagatccacttcaccctgatccaggcgttttgctgcgagaacgacatcaacatcctgcgcgtcagcaacccgggccggctggcggagctcctgctcttggagaccgacgctggccccgcggcgagcgagggcgccgagcagcccccggacctgcactgcgtgctggtgacgaatccacattcatctcaatggaaggatcctgccttaagtcaacttatttgtttttgccgggaaagtcgctacatggatcaatgggttccagtgattaatctccctgaacggtgatggcatctgaatgaaaataactgaaccaaattgcactgaagtttttgaaatacctttgtagttactcaagcagttactccctacactgatgcaaggattacagaaactgatgccaaggggctgagtgagttcaactacatgttctgggggcccggagatagatgactttgcagatggaaagaggtgaaaatgaagaaggaagctgtgttgaaacag

SEQ ID NO: 2787 - protein, 165 aa, Homo sapiens; identical to SEQ ID NO: 103

SEQ ID NO: 2788 - DNA, 1496 bp, Homo sapiens
ctgactccaggagctggggtcaaattgctggagcaggctgatttgcatagcccaatggccaagctgcatgcaaatgaggcggaaggtggttggctgagggttggcaggataaccccggagagcggggccctttgtcctccagtggctggtaggcagtggctgggaggcagcggcccaattagtgtcgtgcggcccgtggcgaggcgaggtccggggagcgagcgagcaagcaaggcgggaggggtggccggagctgcggcggctggcacaggaggaggagcccgggcgggcgaggggcggccggagagcgccagggcctgagctgccggagcggcgcctgtgagtgagtgcagaaagcaggcgcccgcgcgctagccgtggcaggagcagcccgcacgccgcgctctctccctgggcgacctgcagtttgcaatatgactttggaggaattctcggctggagagcagaagaccgaaaggatggataaggtgggggatgccctggaggaagtgctcagcaaagccctgagtcagcgcacgatcactgtcggggtgtacgaagcggccaagctgctcaacgtcgaccccgataacgtggtgttgtgcctgctggcggcggacgaggacgacgacagagatgtggctctgcagatccacttcaccctgatccaggcgttttgctgcgagaacgacatcaacatcctgcgcgtcagcaacccgggccggctggcggagctcctgctcttggagaccgacgctggccccgcggcgagcgagggcgccgagcagcccccggacctgcactgcgtgctggtgacgaatccacattcatctcaatggaaggatcctgccttaagtcaacttatttgtttttgccgggaaagtcgctacatggatcaatgggttccagtgattaatctccctgaacggtgatggcatctgaatgaaaataactgaaccaaattgcactgaagtttttgaaatacctttgtagttactcaagcagttactccctacactgatgcaaggattacagaaactgatgccaaggggctgagtgagttcaactacatgttctgggggcccggagatagatgactttgcagatggaaagaggtgaaaatgaagaaggaagctgtgttgaaacagaaaaataagtcaaaaggaacaaaaattacaaagaaccatgcaggaaggaaaactatgtattaatttagaatggttgagttacattaaaataaaccaaatatgttaaagtttaagtgtgcagccatagtttgggtatttttggtttatatgccctcaagtaaaagaaaagccgaaagggttaatcatatttgaaaaccatattttattgtattttgatgagatattaaattctcaaagttttattataaattctactaagttattttatgacatgaaaagttatttatgctataaattttttgaaacacaatacctacaataaactggtatgaataattgcatcatttc

SEQ ID NO: 2789 - protein, 165 aa, Homo sapiens; identical to SEQ ID NO: 103

SEQ ID NO: 2790 - DNA, 906 bp, Homo sapiens
agtggctggtaggcagtggctgggaggcagcggcccaattagtgtcgtgcggcccgtggcgaggcgaggtccggggagcgagcgagcaagcaaggcgggaggggtggccggagctgcggcggctggcacaggaggaggagcccgggcgggcgaggggcggccggagagcgccagggcctgagctgccggagcggcgcctgtgagtgagtgcagaaagcaggcgcccgcgcgctagccgtggcaggagcagcccgcacgccgcgctctctccctgggcgacctgcagtttgcaatatgactttggaggaattctcggctggagagcagaagaccgaaagcgaccccgataacgtggtgttgtgcctgctggcggcggacgaggacgacgacagagatgtggctctgcagatccacttcaccctgatccaggcgttttgctgcgagaacgacatcaacatcctgcgcgtcagcaacccgggccggctggcggagctcctgctcttggagaccgacgctggccccgcggcgagcgagggcgccgagcagcccccggacctgcactgcgtgctggtgacgaatccacattcatctcaatggaaggatcctgccttaagtcaacttatttgtttttgccgggaaagtcgctacatggatcaatgggttccagtgattaatctccctgaacggtgatggcatctgaatgaaaataactgaaccaaattgcactgaagtttttgaaatacctttgtagttactcaagcagttactccctacactgatgcaaggattacagaaactgatgccaaggggctgagtgagttcaactacatgttctgggggcccggagatagatgactttgcagatggaaagaggtgaaaatgaagaaggaagctgtgttgaaacag

SEQ ID NO: 2791 - protein, 131 aa, Homo sapiens
MTLEEFSAGEQKTESDPDNVVLCLLAADEDDDRDVALQIHFTLIQAFCCENDINILRVSNPGRLAELLLLETDAGPAASEGAEQPPDLHCVLVTNPHSSQWKDPALSQLICFCRESRYMDQWVPVINLPER

SEQ ID NO: 2792 - DNA, 1254 bp, Homo sapiens
agtggctggtaggcagtggctgggaggcagcggcccaattagtgtcgtgcggcccgtggcgaggcgaggtccggggagcgagcgagcaagcaaggcgggaggggtggccggagctgcggcggctggcacaggaggaggagcccgggcgggcgaggggcggccggagagcgccagggcctgagctgccggagcggcgcctgtgagtgagtgcagaaagcaggcgcccgcgcgctagccgtggcaggagcagcccgcacgccgcgctctctccctgggcgacctgcagtttgcaatatgactttggaggaattctcggctggagagcagaagaccgaaagcgaccccgataacgtggtgttgtgcctgctggcggcggacgaggacgacgacagagatgtggctctgcagatccacttcaccctgatccaggcgttttgctgcgagaacgacatcaacatcctgcgcgtcagcaacccgggccggctggcggagctcctgctcttggagaccgacgctggccccgcggcgagcgagggcgccgagcagcccccggacctgcactgcgtgctggtgacgaatccacattcatctcaatggaaggatcctgccttaagtcaacttatttgtttttgccgggaaagtcgctacatggatcaatgggttccagtgattaatctccctgaacggtgatggcatctgaatgaaaataactgaaccaaattgcactgaagtttttgaaatacctttgtagttactcaagcagttactccctacactgatgcaaggattacagaaactgatgccaaggggctgagtgagttcaactacatgttctgggggcccggagatagatgactttgcagatggaaagaggtgaaaatgaagaaggaagctgtgttgaaacagaaaaataagtcaaaaggaacaaaaattacaaagaaccatgcaggaaggaaaactatgtattaatttagaatggttgagttacattaaaataaaccaaatatgttaaagtttaagtgtgcagccatagtttgggtatttttggtttatatgccctcaagtaaaagaaaagccgaaagggttaatcatatttgaaaaccatattttattgtattttgatgagatattaaattctcaaagttttattataaattctactaagttattttatgacatgaaaagttatttatgctataaattttttgaaacacaatacctacaataaactggtatgaataattgcatcatttc

SEQ ID NO: 2793 - protein, 131 aa, Homo sapiens; identical to SEQ ID NO: 2791

SEQ ID NO: 2794 - DNA, 869 bp, Homo sapiens
gctggtaggcagtggctgggaggcagcggcccaattagtgtcgtgcggcccgtggcgaggcgaggtccggggagcgagcgagcaagcaaggcgggaggggtggccggagctgcggcggctggcacaggaggaggagcccgggcgggcgaggggcggccggagagcgccagggcctgagctgccggagcggcgcctgtgagtgagtgcagaaagcaggcgcccgcgcgctagccgtggcaggagcagcccgcacgccgcgctctctccctgggcgacctgcagtttgcaatatgactttggaggaattctcggctggagagcagaagaccgaaaggatggataaggtgggggatgccctggaggaagtgctcagcaaagccctgagtcagcgcacgatcactgtcggggtgtacgaagcggccaagctgctcaacgtgtaagtggggcccttgcgcgtcccccatggcaccccttcccgccccagcccgggaggtcgccttggctgggcgcccctcgcccggccgcgccacttcctgtcgcttttctgcctgtctcggaagggagggggcgagcgggccgggcggcgacccccagggacccgggcagtggttgagggcgcccgcgcttctgcgctcactggccccgcccgctgcccccagcgaccccgataacgtggtgttgtgcctgctggcggcggacgaggacgacgacagagatgtggctctgcagatccacttcaccctgatccaggcgttttgctgcgagaacgacatcaacatcctgcgcgtcagcaacccgggccggctggcggagctcctgctcttggagaccgacgctggccccgcggcgagcgagggcgccgagcagcc

SEQ ID NO: 2795 - protein, 49 aa, Homo sapiens [sequence omitted]

SEQ ID NO: 2796 - DNA, 4361 bp, Homo sapiens
aggcgagagatgctgctagtttgcccagatgggagcagaggagatgccaacgcatgattggattctggaggtattttgaagattcattccacttaaaacctgaaaacattggaccacacaaagtcttactgatttcaggtaaaaacaataattgaagatgtccagcaaaacagcaagcaccaacaatatagcccaggcaaggagaactgtgcagcagttaagattagaagcctccattgaaagaataaaggtttcgaaggcatcagcggacctcatgtcctactgtgaggaacatgccaggagtgaccctttgctgataggaataccaacttcagaaaaccctttcaaggataaaaaaacttgcatcatcttatagtggaatagagaaacagctcctcgcctcttcccaacaacgcaaattatgagcagctccttgaagagatttaccttcagcttatttggtaaccactgctaataactaaaatgttctcagcttggaataatggactctgaagtctctattttccaagttgtcctttctcttaaaataccctttactgatttaatacagaataacaatcttattttccacttggtaactatggctttatgttgggttactgtttaaggaaagttgatctgggcctttttaaaaacataattatatactttagaaatacaagggattccgatatgtcaggacctaaatggcctaagcacctgtcaaattaaaattccaaaattcattgaaatcctaaagccttgatattatattctttataaggcgtgtgccagcctgtatagtatataagagagaggggtgtttgtgtgtatatatatatgcctttgtgtatacacttatcaaagctattttcttatgaaaacgtccctctctccataccatcagtttctcagttccagaagttatacctttattttgagctgtgtataggtagaataaaaaattcctttcatatcgttattgtacaaaaagtaaagagtatcctaaagattgtattcattgtaatcaagtaatgcaatcatctctcctctcttgaaatcttgctggacctcttaggctacaataaactgtaccaaactaaactgacagtccttcgataatatgaaacattaatttacaaggacccgttagggcttcaatgatgctgagtctggaaaaggggaggagacccttgggaggactccaggcagctgtgctcccagggctcatgttctctactggattagggataggcacctctgaaatctccaccctgatgattggaatgaaacggagtgaacatgagcccagctgagagaggagcaggaatgtgtgaaaaacagctgctctccttgtcccagctttgtgattgagccctctgtcttgctctctctgccttccctgtgtctttcttctcttaccagagcatctgtttgcagaggtaacattaccttccccagccacaggtatgtggaatacggtgaggaaaaaaaaaattaaaaaaaaaatgcaagctgtcaggatgcttaagctcttttcagacatctgcagtttcatccctaccttgttcacataccatccaagaggcacataggctacccaagagagccttggattcagtggtacactccttgggcccaagggctttagcagctggatatggggttccttgattttcctctgggcccaaatatagccctcacactcttggaatttccaggtatgggggtagccccaaaaggaggaatctcctatggccaataaggtatcttgactttatcaaagtagaagagagggtcacttcggagtcaaatcatacactaggcctttgatgctttaattcttcttcagttcattaaaagtaactactaaggaaaggttaaaaacttcccctcaaaaaggaatcaaccccaggaagtaattatttacaacgattttcccaaattttgtacaatctgtcctggaaagcaaaccccttttaaaatctaatgtctgggctttgagtattagctcatttagggtggacaaatgcattactgttttcaaactgctcacatttattcagtatttctccaagttgctatctactcagccttatgaatgcccctcgcttttctaaggccatgtgaaaatcacggcactgcccttagccttgtgtcatctgctttttcgttctgcgatatgcccagttcccaaatcaattataggtacctgtttaggagagaggaagattttacctctcaaagggtgagatttgaaatttacactaaaaagacaactttacatttaatgcttcacttaatgagacattcttttttttataagtctatttttctactcagtttcagaacactaatctgattttcactctgatttttaacgtttctttaaatatttataatgtagcttctttcaaaatattttcatgaaaaattacttttattataccattatgtgcatgttattggtagcaggcatagtttattatttagtactgaaacatgctcttttacctaacagtaaacaagtatgttttgatatatatctgttaatatgcttatagtggtaagaaatggacttgaggtcccaggagatttcattttattcaccctggtcagatacaataaaggctatgagtataaatacataacttcctaaccaggtgtagggcatgttcatgaatatcaaatcttttgatgctggacccaagagaggaaaagttgtagctaaatgttgatttacttataactagacgtctatgtgagaaaatatatgtatacatatatatgatatgcagaagtcactttttttatcaggctttattctccttacaaagccacagtttaactgtctgcaacagttggtttatgttaatgatagacaaatacccagtgtttgttactttttccaactaccactgtaatgataatctttctcacgtatatacatgcaacttcttggcttcatttccatgaagctgtttcaatatattcagtatactttgtccttaatgctgcttctgttaacagtgatctctttctttttttcattcttatatcttcattagttcatcataaatctgtccagttgaggcctcaggaccacggcatgatttcatgactccgaagtattttacagaaacattttttaaataagggaaatattttatataccagatggttcacaagtgatggctcatagctagtttttttttttcttctaaaaaatgtcaggtttttaaaatcatttaccttattaaaatgaaaagtgccatacttaacttttaaaggaaagacctgacttgctttttctctatttagactgtttttgtactttactaatctttaaactatcaggaaaaaaaccaaaactttataccaatgatttagtaattttgaggcatagggtagcttacgtagtggaggatgtgccaaatattctcttcaaatgccaccttctcaatttataactaaaatagtgttatctgactaattcctctgaattttgatgtaagatctatataggcccccaaaatgatcgtagtacatgccagtcatttctcagtgaaataaatacaataccagagtacattatgggttttattgctttcttttatggtagacctgttaatggggaaaaaatacatcaaatcaaatagaatcttatatctgtatgttaaaatagagcacttacctgaagtcagtggcctggatcatagccctggatcatttcccagtctgtcctgtgctgtgtgaccttggacaaggcgcttcatctctctgggcctctatttctccatttgtaaaacaagtggctgcagtagatgatggctgagagcccttcctgttcccagatgccttggtccaaagaccccacccctctgctggtcctgccaacgtgttggtgctataagctgcttcagatataaaattggtttatctataatgtttgttcatttaatagcttctaaaaggcctttttgttatacagtgctttttttctagttttatggacttggttactgtaataatgtcttgtttttagccatgtaactacaaacagatattctcttgatgtcttagtaaatttgcatttgatatatcattgatgagattttgttgttatgtaatattctttggctacgcatctgtccagcatcttattaaccataatactgtgatcattatttggaaatatgtcctatggaaagaataaaagcatgtacttcacagctagcatgttcacagatttgaaagaagtttcattaaaagcaccattgctttctgtactgcgtcagtgcctcattgtatcatcctacttgtgttttgctcaataaatgaataaaagaccatttctcttc

SEQ ID NO: 2797 - protein, 72 aa, Homo sapiens; identical to SEQ ID NO: 105

SEQ ID NO: 2798 - DNA, 4423 bp, Homo sapiens
ccagactgcacccttgccagcgcttcgcagctctcgaagtaaattatcgcaggatggcggccctcacctaggagaaccaggaaggcaggcagcgctagaacgacgggattgaattttactattgccaaaacaatcacattcaaattcattccacttaaaacctgaaaacattggaccacacaaagtcttactgatttcaggtaaaaacaataattgaagatgtccagcaaaacagcaagcaccaacaatatagcccaggcaaggagaactgtgcagcagttaagattagaagcctccattgaaagaataaaggtttcgaaggcatcagcggacctcatgtcctactgtgaggaacatgccaggagtgaccctttgctgataggaataccaacttcagaaaaccctttcaaggataaaaaaacttgcatcatcttatagtggaatagagaaacagctcctcgcctcttcccaacaacgcaaattatgagcagctccttgaagagatttaccttcagcttatttggtaaccactgctaataactaaaatgttctcagcttggaataatggactctgaagtctctattttccaagttgtcctttctcttaaaataccctttactgatttaatacagaataacaatcttattttccacttggtaactatggctttatgttgggttactgtttaaggaaagttgatctgggcctttttaaaaacataattatatactttagaaatacaagggattccgatatgtcaggacctaaatggcctaagcacctgtcaaattaaaattccaaaattcattgaaatcctaaagccttgatattatattctttataaggcgtgtgccagcctgtatagtatataagagagaggggtgtttgtgtgtatatatatatgcctttgtgtatacacttatcaaagctattttcttatgaaaacgtccctctctccataccatcagtttctcagttccagaagttatacctttattttgagctgtgtataggtagaataaaaaattcctttcatatcgttattgtacaaaaagtaaagagtatcctaaagattgtattcattgtaatcaagtaatgcaatcatctctcctctcttgaaatcttgctggacctcttaggctacaataaactgtaccaaactaaactgacagtccttcgataatatgaaacattaatttacaaggacccgttagggcttcaatgatgctgagtctggaaaaggggaggagacccttgggaggactccaggcagctgtgctcccagggctcatgttctctactggattagggataggcacctctgaaatctccaccctgatgattggaatgaaacggagtgaacatgagcccagctgagagaggagcaggaatgtgtgaaaaacagctgctctccttgtcccagctttgtgattgagccctctgtcttgctctctctgccttccctgtgtctttcttctcttaccagagcatctgtttgcagaggtaacattaccttccccagccacaggtatgtggaatacggtgaggaaaaaaaaaattaaaaaaaaaatgcaagctgtcaggatgcttaagctcttttcagacatctgcagtttcatccctaccttgttcacataccatccaagaggcacataggctacccaagagagccttggattcagtggtacactccttgggcccaagggctttagcagctggatatggggttccttgattttcctctgggcccaaatatagccctcacactcttggaatttccaggtatgggggtagccccaaaaggaggaatctcctatggccaataaggtatcttgactttatcaaagtagaagagagggtcacttcggagtcaaatcatacactaggcctttgatgctttaattcttcttcagttcattaaaagtaactactaaggaaaggttaaaaacttcccctcaaaaaggaatcaaccccaggaagtaattatttacaacgattttcccaaattttgtacaatctgtcctggaaagcaaaccccttttaaaatctaatgtctgggctttgagtattagctcatttagggtggacaaatgcattactgttttcaaactgctcacatttattcagtatttctccaagttgctatctactcagccttatgaatgcccctcgcttttctaaggccatgtgaaaatcacggcactgcccttagccttgtgtcatctgctttttcgttctgcgatatgcccagttcccaaatcaattataggtacctgtttaggagagaggaagattttacctctcaaagggtgagatttgaaatttacactaaaaagacaactttacatttaatgcttcacttaatgagacattcttttttttataagtctatttttctactcagtttcagaacactaatctgattttcactctgatttttaacgtttctttaaatatttataatgtagcttctttcaaaatattttcatgaaaaattacttttattataccattatgtgcatgttattggtagcaggcatagtttattatttagtactgaaacatgctcttttacctaacagtaaacaagtatgttttgatatatatctgttaatatgcttatagtggtaagaaatggacttgaggtcccaggagatttcattttattcaccctggtcagatacaataaaggctatgagtataaatacataacttcctaaccaggtgtagggcatgttcatgaatatcaaatcttttgatgctggacccaagagaggaaaagttgtagctaaatgttgatttacttataactagacgtctatgtgagaaaatatatgtatacatatatatgatatgcagaagtcactttttttatcaggctttattctccttacaaagccacagtttaactgtctgcaacagttggtttatgttaatgatagacaaatacccagtgtttgttactttttccaactaccactgtaatgataatctttctcacgtatatacatgcaacttcttggcttcatttccatgaagctgtttcaatatattcagtatactttgtccttaatgctgcttctgttaacagtgatctctttctttttttcattcttatatcttcattagttcatcataaatctgtccagttgaggcctcaggaccacggcatgatttcatgactccgaagtattttacagaaacattttttaaataagggaaatattttatataccagatggttcacaagtgatggctcatagctagtttttttttttcttctaaaaaatgtcaggtttttaaaatcatttaccttattaaaatgaaaagtgccatacttaacttttaaaggaaagacctgacttgctttttctctatttagactgtttttgtactttactaatctttaaactatcaggaaaaaaaccaaaactttataccaatgatttagtaattttgaggcatagggtagcttacgtagtggaggatgtgccaaatattctcttcaaatgccaccttctcaatttataactaaaatagtgttatctgactaattcctctgaattttgatgtaagatctatataggcccccaaaatgatcgtagtacatgccagtcatttctcagtgaaataaatacaataccagagtacattatgggttttattgctttcttttatggtagacctgttaatggggaaaaaatacatcaaatcaaatagaatcttatatctgtatgttaaaatagagcacttacctgaagtcagtggcctggatcatagccctggatcatttcccagtctgtcctgtgctgtgtgaccttggacaaggcgcttcatctctctgggcctctatttctccatttgtaaaacaagtggctgcagtagatgatggctgagagcccttcctgttcccagatgccttggtccaaagaccccacccctctgctggtcctgccaacgtgttggtgctataagctgcttcagatataaaattggtttatctataatgtttgttcatttaatagcttctaaaaggcctttttgttatacagtgctttttttctagttttatggacttggttactgtaataatgtcttgtttttagccatgtaactacaaacagatattctcttgatgtcttagtaaatttgcatttgatatatcattgatgagattttgttgttatgtaatattctttggctacgcatctgtccagcatcttattaaccataatactgtgatcattatttggaaatatgtcctatggaaagaataaaagcatgtacttcacagctagcatgttcacagatttgaaagaagtttcattaaaagcaccattgctttctgtactgcgtcagtgcctcattgtatcatcctacttgtgttttgctcaataaatgaataaaagaccatttctcttc

SEQ ID NO: 2799 - protein, 72 aa, Homo sapiens; identical to SEQ ID NO: 105

SEQ ID NO: 2800 - DNA, 4404 bp, Homo sapiens
agcgaggcggagccggcgcccggaggagcaagaggaggaggaggaggagaggtcggagccgtctccaggagcccttagagaccgagtcccggcggcgacggcggggcagcgcaccggcaggcggattcattccacttaaaacctgaaaacattggaccacacaaagtcttactgatttcaggtaaaaacaataattgaagatgtccagcaaaacagcaagcaccaacaatatagcccaggcaaggagaactgtgcagcagttaagattagaagcctccattgaaagaataaaggtttcgaaggcatcagcggacctcatgtcctactgtgaggaacatgccaggagtgaccctttgctgataggaataccaacttcagaaaaccctttcaaggataaaaaaacttgcatcatcttatagtggaatagagaaacagctcctcgcctcttcccaacaacgcaaattatgagcagctccttgaagagatttaccttcagcttatttggtaaccactgctaataactaaaatgttctcagcttggaataatggactctgaagtctctattttccaagttgtcctttctcttaaaataccctttactgatttaatacagaataacaatcttattttccacttggtaactatggctttatgttgggttactgtttaaggaaagttgatctgggcctttttaaaaacataattatatactttagaaatacaagggattccgatatgtcaggacctaaatggcctaagcacctgtcaaattaaaattccaaaattcattgaaatcctaaagccttgatattatattctttataaggcgtgtgccagcctgtatagtatataagagagaggggtgtttgtgtgtatatatatatgcctttgtgtatacacttatcaaagctattttcttatgaaaacgtccctctctccataccatcagtttctcagttccagaagttatacctttattttgagctgtgtataggtagaataaaaaattcctttcatatcgttattgtacaaaaagtaaagagtatcctaaagattgtattcattgtaatcaagtaatgcaatcatctctcctctcttgaaatcttgctggacctcttaggctacaataaactgtaccaaactaaactgacagtccttcgataatatgaaacattaatttacaaggacccgttagggcttcaatgatgctgagtctggaaaaggggaggagacccttgggaggactccaggcagctgtgctcccagggctcatgttctctactggattagggataggcacctctgaaatctccaccctgatgattggaatgaaacggagtgaacatgagcccagctgagagaggagcaggaatgtgtgaaaaacagctgctctccttgtcccagctttgtgattgagccctctgtcttgctctctctgccttccctgtgtctttcttctcttaccagagcatctgtttgcagaggtaacattaccttccccagccacaggtatgtggaatacggtgaggaaaaaaaaaattaaaaaaaaaatgcaagctgtcaggatgcttaagctcttttcagacatctgcagtttcatccctaccttgttcacataccatccaagaggcacataggctacccaagagagccttggattcagtggtacactccttgggcccaagggctttagcagctggatatggggttccttgattttcctctgggcccaaatatagccctcacactcttggaatttccaggtatgggggtagccccaaaaggaggaatctcctatggccaataaggtatcttgactttatcaaagtagaagagagggtcacttcggagtcaaatcatacactaggcctttgatgctttaattcttcttcagttcattaaaagtaactactaaggaaaggttaaaaacttcccctcaaaaaggaatcaaccccaggaagtaattatttacaacgattttcccaaattttgtacaatctgtcctggaaagcaaaccccttttaaaatctaatgtctgggctttgagtattagctcatttagggtggacaaatgcattactgttttcaaactgctcacatttattcagtatttctccaagttgctatctactcagccttatgaatgcccctcgcttttctaaggccatgtgaaaatcacggcactgcccttagccttgtgtcatctgctttttcgttctgcgatatgcccagttcccaaatcaattataggtacctgtttaggagagaggaagattttacctctcaaagggtgagatttgaaatttacactaaaaagacaactttacatttaatgcttcacttaatgagacattcttttttttataagtctatttttctactcagtttcagaacactaatctgattttcactctgatttttaacgtttctttaaatatttataatgtagcttctttcaaaatattttcatgaaaaattacttttattataccattatgtgcatgttattggtagcaggcatagtttattatttagtactgaaacatgctcttttacctaacagtaaacaagtatgttttgatatatatctgttaatatgcttatagtggtaagaaatggacttgaggtcccaggagatttcattttattcaccctggtcagatacaataaaggctatgagtataaatacataacttcctaaccaggtgtagggcatgttcatgaatatcaaatcttttgatgctggacccaagagaggaaaagttgtagctaaatgttgatttacttataactagacgtctatgtgagaaaatatatgtatacatatatatgatatgcagaagtcactttttttatcaggctttattctccttacaaagccacagtttaactgtctgcaacagttggtttatgttaatgatagacaaatacccagtgtttgttactttttccaactaccactgtaatgataatctttctcacgtatatacatgcaacttcttggcttcatttccatgaagctgtttcaatatattcagtatactttgtccttaatgctgcttctgttaacagtgatctctttctttttttcattcttatatcttcattagttcatcataaatctgtccagttgaggcctcaggaccacggcatgatttcatgactccgaagtattttacagaaacattttttaaataagggaaatattttatataccagatggttcacaagtgatggctcatagctagtttttttttttcttctaaaaaatgtcaggtttttaaaatcatttaccttattaaaatgaaaagtgccatacttaacttttaaaggaaagacctgacttgctttttctctatttagactgtttttgtactttactaatctttaaactatcaggaaaaaaaccaaaactttataccaatgatttagtaattttgaggcatagggtagcttacgtagtggaggatgtgccaaatattctcttcaaatgccaccttctcaatttataactaaaatagtgttatctgactaattcctctgaattttgatgtaagatctatataggcccccaaaatgatcgtagtacatgccagtcatttctcagtgaaataaatacaataccagagtacattatgggttttattgctttcttttatggtagacctgttaatggggaaaaaatacatcaaatcaaatagaatcttatatctgtatgttaaaatagagcacttacctgaagtcagtggcctggatcatagccctggatcatttcccagtctgtcctgtgctgtgtgaccttggacaaggcgcttcatctctctgggcctctatttctccatttgtaaaacaagtggctgcagtagatgatggctgagagcccttcctgttcccagatgccttggtccaaagaccccacccctctgctggtcctgccaacgtgttggtgctataagctgcttcagatataaaattggtttatctataatgtttgttcatttaatagcttctaaaaggcctttttgttatacagtgctttttttctagttttatggacttggttactgtaataatgtcttgtttttagccatgtaactacaaacagatattctcttgatgtcttagtaaatttgcatttgatatatcattgatgagattttgttgttatgtaatattctttggctacgcatctgtccagcatcttattaaccataatactgtgatcattatttggaaatatgtcctatggaaagaataaaagcatgtacttcacagctagcatgttcacagatttgaaagaagtttcattaaaagcaccattgctttctgtactgcgtcagtgcctcattgtatcatcctacttgtgttttgctcaataaatgaataaaagaccatttctcttc

SEQ ID NO: 2801 - protein, 72 aa, Homo sapiens; identical to SEQ ID NO: 105

SEQ ID NO: 2802 - DNA, 4294 bp, Homo sapiens
aggcgagagatgctgctagtttgcccagatgggagcagaggagatgccaacgcatgattggattctggaggtattttgaagattcattccacttaaaacctgaaaacattggaccacacaaagtcttactgatttcaggtaaaaacaataattgaagatgtccagcaaaacagcaagcaccaacaatatagcccaggcaaggagaactgtgcagcagttaagattagaagcctccattgaaagaataaaggtttcgaaggcatcagcggacctcatgtcctactgtgaggaacatgccaggagtgaccctttgctgataggaataccaacttcagaaaaccctttcaaggataaaaaaacttgcatcatcttatagtggaatagagaaacagctcctcgcctcttcccaacaacgcaaattatgagcagctccttgaagagatttaccttcagcttatttggtaaccactgctaataactaaaatgttctcagcttggaataatggactctgaagtctctattttccaagttgtcctttctcttaaaataccctttactgatttaatacagaataacaatcttattttccacttggtaactatggctttatgttgggttactgtttaaggaaagttgatctgggcctttttaaaaacataattatatactttagaaatacaagggattccgatatgtcaggacctaaatggcctaagcacctgtcaaattaaaattccaaaattcattgaaatcctaaagccttgatattatattctttataaggcgtgtgccagcctgtatagtatataagagagaggggtgtttgtgtgtatatatatatgcctttgtgtatacacttatcaaagctattttcttatgaaaacgtccctctctccataccatcagtttctcagttccagaagttatacctttattttgagctgtgtataggtagaataaaaaattcctttcatatcgttattgtacaaaaagtaaagagtatcctaaagattgtattcattgtaatcaagtaatgcaatcatctctcctctcttgaaatcttgctggacctcttaggctacaataaactgtaccaaactaaactgacagtccttcgataatatgaaacattaatttacaaggacccgttagggcttcaatgatgctgagtctggaaaaggggaggagacccttgggaggactccaggcagctgtgctcccagggctcatgttctctactggattagggataggcacctctgaaatctccaccctgatgattggaatgaaacggagtgaacatgagcccagctgagagaggagcaggaatgtgtgaaaaacagctgctctccttgtcccagctttgtgattgagccctctgtcttgctctctctgccttccctgtgtctttcttctcttaccagagcatctgtttgcagaggtaacattaccttccccagccacaggtatgtggaatacggtgaggaaaaaaaaaattaaaaaaaaaatgcaagctgtcaggatgcttaagctcttttcagacatctgcagtttcatccctaccttgttcacataccatccaagaggcacataggctacccaagagagccttggattcagtggtacactccttgggcccaagggctttagcagctggatatggggttccttgattttcctctgggcccaaatatagccctcacactcttggaatttccaggtatgggggtagccccaaaaggaggaatctcctatggccaataaggtatcttgactttatcaaagtagaagagagggtcacttcggagtcaaatcatacactaggcctttgatgctttaattcttcttcagttcattaaaagtaactactaaggaaaggttaaaaacttcccctcaaaaaggaatcaaccccaggaagtaattatttacaacgattttcccaaattttgtacaatctgtcctggaaagcaaaccccttttaaaatctaatgtctgggctttgagtattagctcatttagggtggacaaatgcattactgttttcaaactgctcacatttattcagtatttctccaagttgctatctactcagccttatgaatgcccctcgcttttctaaggccatgtgaaaatcacggcactgcccttagccttgtgtcatctgctttttcgttctgcgatatgcccagttcccaaatcaattataggtacctgtttaggagagaggaagattttacctctcaaagggtgagatttgaaatttacactaaaaagacaactttacatttaatgcttcacttaatgagacattcttttttttataagtctatttttctactcagtttcagaacactaatctgattttcactctgatttttaacgtttctttaaatatttataatgtagcttctttcaaaatattttcatgaaaaattacttttattataccattatgtgcatgttattggtagcaggcatagtttattatttagtactgaaacatgctcttttacctaacagtaaacaagtatgttttgatatatatctgttaatatgcttatagtggtaagaaatggacttgaggtcccaggagatttcattttattcaccctggtcagatacaataaaggctatgagtataaatacataacttcctaaccaggtgtagggcatgttcatgaatatcaaatcttttgatgctggacccaagagaggaaaagttgtagctaaatgttgatttacttataactagacgtctatgtgagaaaatatatgtatacatatatatgatatgcagaagtcactttttttatcaggctttattctccttacaaagccacagtttaactgtctgcaacagttggtttatgttaatgatagacaaatacccagtgtttgttactttttccaactaccactgtaatgataatctttctcacgtatatacatgcaacttcttggcttcatttccatgaagctgtttcaatatattcagtatactttgtccttaatgctgcttctgttaacagtgatctctttctttttttcattcttatatcttcattagttcatcataaatctgtccagttgaggcctcaggaccacggcatgatttcatgactccgaagtattttacagaaacattttttaaataagggaaatattttatataccagatggttcacaagtgatggctcatagctagtttttttttttcttctaaaaaatgtcaggtttttaaaatcatttaccttattaaaatgaaaagtgccatacttaacttttaaaggaaagacctgacttgctttttctctatttagactgtttttgtactttactaatctttaaactatcaggaaaaaaaccaaaactttataccaatgatttagtaattttgaggcatagggtagcttacgtagtggaggatgtgccaaatattctcttcaaatgccaccttctcaatttataactaaaatagtgttatctgactaattcctctgaattttgatgtaagatctatataggcccccaaaatgatcgtagtacatgccagtcatttctcagtgaaataaatacaataccagagtacattatgggttttattgctttcttttatggtagacctgttaatggggaaaaaatacatcaaatcaaatagaatcttatatctgtatgttaaaatagagcacttacctgaagtcagtggcctggatcatagccctggatcatttcccagtctgtcctgtgctgtgtgaccttggacaaggcgcttcatctctctgggcctctatttctccatttgtaaaacaagtggctgcagtagatgatggctgagagcccttcctgttcccagatgccttggtccaaagaccccacccctctgctggtcctgccaacgtgttggtgctataagctgcttcagatataaaattggtttatctataatgtttgttcatttaatagcttctaaaaggcctttttgttatacagtgctttttttctagttttatggacttggttactgtaataatgtcttgtttttagccatgtaactacaaacagatattctcttgatgtcttagtaaatttgcatttgatatatcattgatgagattttgttgttatgtaatattctttggctacgcatctgtccagcatcttattaaccataatactgtgatcattatttggaaatatgtcctatggaaagaataaaagcatgtacttcacagctagcatgttcacagatttgaaagaagtttcattaaaagcaccattgctttctgtactgcg

SEQ ID NO: 2803 - protein, 72 aa, Homo sapiens; identical to SEQ ID NO: 105

SEQ ID NO: 2804 - DNA, 4356 bp, Homo sapiens
ccagactgcacccttgccagcgcttcgcagctctcgaagtaaattatcgcaggatggcggccctcacctaggagaaccaggaaggcaggcagcgctagaacgacgggattgaattttactattgccaaaacaatcacattcaaattcattccacttaaaacctgaaaacattggaccacacaaagtcttactgatttcaggtaaaaacaataattgaagatgtccagcaaaacagcaagcaccaacaatatagcccaggcaaggagaactgtgcagcagttaagattagaagcctccattgaaagaataaaggtttcgaaggcatcagcggacctcatgtcctactgtgaggaacatgccaggagtgaccctttgctgataggaataccaacttcagaaaaccctttcaaggataaaaaaacttgcatcatcttatagtggaatagagaaacagctcctcgcctcttcccaacaacgcaaattatgagcagctccttgaagagatttaccttcagcttatttggtaaccactgctaataactaaaatgttctcagcttggaataatggactctgaagtctctattttccaagttgtcctttctcttaaaataccctttactgatttaatacagaataacaatcttattttccacttggtaactatggctttatgttgggttactgtttaaggaaagttgatctgggcctttttaaaaacataattatatactttagaaatacaagggattccgatatgtcaggacctaaatggcctaagcacctgtcaaattaaaattccaaaattcattgaaatcctaaagccttgatattatattctttataaggcgtgtgccagcctgtatagtatataagagagaggggtgtttgtgtgtatatatatatgcctttgtgtatacacttatcaaagctattttcttatgaaaacgtccctctctccataccatcagtttctcagttccagaagttatacctttattttgagctgtgtataggtagaataaaaaattcctttcatatcgttattgtacaaaaagtaaagagtatcctaaagattgtattcattgtaatcaagtaatgcaatcatctctcctctcttgaaatcttgctggacctcttaggctacaataaactgtaccaaactaaactgacagtccttcgataatatgaaacattaatttacaaggacccgttagggcttcaatgatgctgagtctggaaaaggggaggagacccttgggaggactccaggcagctgtgctcccagggctcatgttctctactggattagggataggcacctctgaaatctccaccctgatgattggaatgaaacggagtgaacatgagcccagctgagagaggagcaggaatgtgtgaaaaacagctgctctccttgtcccagctttgtgattgagccctctgtcttgctctctctgccttccctgtgtctttcttctcttaccagagcatctgtttgcagaggtaacattaccttccccagccacaggtatgtggaatacggtgaggaaaaaaaaaattaaaaaaaaaatgcaagctgtcaggatgcttaagctcttttcagacatctgcagtttcatccctaccttgttcacataccatccaagaggcacataggctacccaagagagccttggattcagtggtacactccttgggcccaagggctttagcagctggatatggggttccttgattttcctctgggcccaaatatagccctcacactcttggaatttccaggtatgggggtagccccaaaaggaggaatctcctatggccaataaggtatcttgactttatcaaagtagaagagagggtcacttcggagtcaaatcatacactaggcctttgatgctttaattcttcttcagttcattaaaagtaactactaaggaaaggttaaaaacttcccctcaaaaaggaatcaaccccaggaagtaattatttacaacgattttcccaaattttgtacaatctgtcctggaaagcaaaccccttttaaaatctaatgtctgggctttgagtattagctcatttagggtggacaaatgcattactgttttcaaactgctcacatttattcagtatttctccaagttgctatctactcagccttatgaatgcccctcgcttttctaaggccatgtgaaaatcacggcactgcccttagccttgtgtcatctgctttttcgttctgcgatatgcccagttcccaaatcaattataggtacctgtttaggagagaggaagattttacctctcaaagggtgagatttgaaatttacactaaaaagacaactttacatttaatgcttcacttaatgagacattcttttttttataagtctatttttctactcagtttcagaacactaatctgattttcactctgatttttaacgtttctttaaatatttataatgtagcttctttcaaaatattttcatgaaaaattacttttattataccattatgtgcatgttattggtagcaggcatagtttattatttagtactgaaacatgctcttttacctaacagtaaacaagtatgttttgatatatatctgttaatatgcttatagtggtaagaaatggacttgaggtcccaggagatttcattttattcaccctggtcagatacaataaaggctatgagtataaatacataacttcctaaccaggtgtagggcatgttcatgaatatcaaatcttttgatgctggacccaagagaggaaaagttgtagctaaatgttgatttacttataactagacgtctatgtgagaaaatatatgtatacatatatatgatatgcagaagtcactttttttatcaggctttattctccttacaaagccacagtttaactgtctgcaacagttggtttatgttaatgatagacaaatacccagtgtttgttactttttccaactaccactgtaatgataatctttctcacgtatatacatgcaacttcttggcttcatttccatgaagctgtttcaatatattcagtatactttgtccttaatgctgcttctgttaacagtgatctctttctttttttcattcttatatcttcattagttcatcataaatctgtccagttgaggcctcaggaccacggcatgatttcatgactccgaagtattttacagaaacattttttaaataagggaaatattttatataccagatggttcacaagtgatggctcatagctagtttttttttttcttctaaaaaatgtcaggtttttaaaatcatttaccttattaaaatgaaaagtgccatacttaacttttaaaggaaagacctgacttgctttttctctatttagactgtttttgtactttactaatctttaaactatcaggaaaaaaaccaaaactttataccaatgatttagtaattttgaggcatagggtagcttacgtagtggaggatgtgccaaatattctcttcaaatgccaccttctcaatttataactaaaatagtgttatctgactaattcctctgaattttgatgtaagatctatataggcccccaaaatgatcgtagtacatgccagtcatttctcagtgaaataaatacaataccagagtacattatgggttttattgctttcttttatggtagacctgttaatggggaaaaaatacatcaaatcaaatagaatcttatatctgtatgttaaaatagagcacttacctgaagtcagtggcctggatcatagccctggatcatttcccagtctgtcctgtgctgtgtgaccttggacaaggcgcttcatctctctgggcctctatttctccatttgtaaaacaagtggctgcagtagatgatggctgagagcccttcctgttcccagatgccttggtccaaagaccccacccctctgctggtcctgccaacgtgttggtgctataagctgcttcagatataaaattggtttatctataatgtttgttcatttaatagcttctaaaaggcctttttgttatacagtgctttttttctagttttatggacttggttactgtaataatgtcttgtttttagccatgtaactacaaacagatattctcttgatgtcttagtaaatttgcatttgatatatcattgatgagattttgttgttatgtaatattctttggctacgcatctgtccagcatcttattaaccataatactgtgatcattatttggaaatatgtcctatggaaagaataaaagcatgtacttcacagctagcatgttcacagatttgaaagaagtttcattaaaagcaccattgctttctgtactgcg

SEQ ID NO: 2805 - protein, 72 aa, Homo sapiens; identical to SEQ ID NO: 105

SEQ ID NO: 2806 - DNA, 4337 bp, Homo sapiens
agcgaggcggagccggcgcccggaggagcaagaggaggaggaggaggagaggtcggagccgtctccaggagcccttagagaccgagtcccggcggcgacggcggggcagcgcaccggcaggcggattcattccacttaaaacctgaaaacattggaccacacaaagtcttactgatttcaggtaaaaacaataattgaagatgtccagcaaaacagcaagcaccaacaatatagcccaggcaaggagaactgtgcagcagttaagattagaagcctccattgaaagaataaaggtttcgaaggcatcagcggacctcatgtcctactgtgaggaacatgccaggagtgaccctttgctgataggaataccaacttcagaaaaccctttcaaggataaaaaaacttgcatcatcttatagtggaatagagaaacagctcctcgcctcttcccaacaacgcaaattatgagcagctccttgaagagatttaccttcagcttatttggtaaccactgctaataactaaaatgttctcagcttggaataatggactctgaagtctctattttccaagttgtcctttctcttaaaataccctttactgatttaatacagaataacaatcttattttccacttggtaactatggctttatgttgggttactgtttaaggaaagttgatctgggcctttttaaaaacataattatatactttagaaatacaagggattccgatatgtcaggacctaaatggcctaagcacctgtcaaattaaaattccaaaattcattgaaatcctaaagccttgatattatattctttataaggcgtgtgccagcctgtatagtatataagagagaggggtgtttgtgtgtatatatatatgcctttgtgtatacacttatcaaagctattttcttatgaaaacgtccctctctccataccatcagtttctcagttccagaagttatacctttattttgagctgtgtataggtagaataaaaaattcctttcatatcgttattgtacaaaaagtaaagagtatcctaaagattgtattcattgtaatcaagtaatgcaatcatctctcctctcttgaaatcttgctggacctcttaggctacaataaactgtaccaaactaaactgacagtccttcgataatatgaaacattaatttacaaggacccgttagggcttcaatgatgctgagtctggaaaaggggaggagacccttgggaggactccaggcagctgtgctcccagggctcatgttctctactggattagggataggcacctctgaaatctccaccctgatgattggaatgaaacggagtgaacatgagcccagctgagagaggagcaggaatgtgtgaaaaacagctgctctccttgtcccagctttgtgattgagccctctgtcttgctctctctgccttccctgtgtctttcttctcttaccagagcatctgtttgcagaggtaacattaccttccccagccacaggtatgtggaatacggtgaggaaaaaaaaaattaaaaaaaaaatgcaagctgtcaggatgcttaagctcttttcagacatctgcagtttcatccctaccttgttcacataccatccaagaggcacataggctacccaagagagccttggattcagtggtacactccttgggcccaagggctttagcagctggatatggggttccttgattttcctctgggcccaaatatagccctcacactcttggaatttccaggtatgggggtagccccaaaaggaggaatctcctatggccaataaggtatcttgactttatcaaagtagaagagagggtcacttcggagtcaaatcatacactaggcctttgatgctttaattcttcttcagttcattaaaagtaactactaaggaaaggttaaaaacttcccctcaaaaaggaatcaaccccaggaagtaattatttacaacgattttcccaaattttgtacaatctgtcctggaaagcaaaccccttttaaaatctaatgtctgggctttgagtattagctcatttagggtggacaaatgcattactgttttcaaactgctcacatttattcagtatttctccaagttgctatctactcagccttatgaatgcccctcgcttttctaaggccatgtgaaaatcacggcactgcccttagccttgtgtcatctgctttttcgttctgcgatatgcccagttcccaaatcaattataggtacctgtttaggagagaggaagattttacctctcaaagggtgagatttgaaatttacactaaaaagacaactttacatttaatgcttcacttaatgagacattcttttttttataagtctatttttctactcagtttcagaacactaatctgattttcactctgatttttaacgtttctttaaatatttataatgtagcttctttcaaaatattttcatgaaaaattacttttattataccattatgtgcatgttattggtagcaggcatagtttattatttagtactgaaacatgctcttttacctaacagtaaacaagtatgttttgatatatatctgttaatatgcttatagtggtaagaaatggacttgaggtcccaggagatttcattttattcaccctggtcagatacaataaaggctatgagtataaatacataacttcctaaccaggtgtagggcatgttcatgaatatcaaatcttttgatgctggacccaagagaggaaaagttgtagctaaatgttgatttacttataactagacgtctatgtgagaaaatatatgtatacatatatatgatatgcagaagtcactttttttatcaggctttattctccttacaaagccacagtttaactgtctgcaacagttggtttatgttaatgatagacaaatacccagtgtttgttactttttccaactaccactgtaatgataatctttctcacgtatatacatgcaacttcttggcttcatttccatgaagctgtttcaatatattcagtatactttgtccttaatgctgcttctgttaacagtgatctctttctttttttcattcttatatcttcattagttcatcataaatctgtccagttgaggcctcaggaccacggcatgatttcatgactccgaagtattttacagaaacattttttaaataagggaaatattttatataccagatggttcacaagtgatggctcatagctagtttttttttttcttctaaaaaatgtcaggtttttaaaatcatttaccttattaaaatgaaaagtgccatacttaacttttaaaggaaagacctgacttgctttttctctatttagactgtttttgtactttactaatctttaaactatcaggaaaaaaaccaaaactttataccaatgatttagtaattttgaggcatagggtagcttacgtagtggaggatgtgccaaatattctcttcaaatgccaccttctcaatttataactaaaatagtgttatctgactaattcctctgaattttgatgtaagatctatataggcccccaaaatgatcgtagtacatgccagtcatttctcagtgaaataaatacaataccagagtacattatgggttttattgctttcttttatggtagacctgttaatggggaaaaaatacatcaaatcaaatagaatcttatatctgtatgttaaaatagagcacttacctgaagtcagtggcctggatcatagccctggatcatttcccagtctgtcctgtgctgtgtgaccttggacaaggcgcttcatctctctgggcctctatttctccatttgtaaaacaagtggctgcagtagatgatggctgagagcccttcctgttcccagatgccttggtccaaagaccccacccctctgctggtcctgccaacgtgttggtgctataagctgcttcagatataaaattggtttatctataatgtttgttcatttaatagcttctaaaaggcctttttgttatacagtgctttttttctagttttatggacttggttactgtaataatgtcttgtttttagccatgtaactacaaacagatattctcttgatgtcttagtaaatttgcatttgatatatcattgatgagattttgttgttatgtaatattctttggctacgcatctgtccagcatcttattaaccataatactgtgatcattatttggaaatatgtcctatggaaagaataaaagcatgtacttcacagctagcatgttcacagatttgaaagaagtttcattaaaagcaccattgctttctgtactgcg

SEQ ID NO: 2807 - protein, 72 aa, Homo sapiens; identical to SEQ ID NO: 105

SEQ ID NO: 2808 - DNA, 463 bp, Homo sapiens
gaggaggaggaggaggagaggtcggagccgtctccaggagcccttagagaccgagtcccggcggcgacggcggggcagcgcaccggcaggcggattcattccacttaaaacctgaaaacattggaccacacaaagtcttactggtaagttcttcatttcttaaacaaagtgactgtttgactttatttttgagatgatattcacacttctaagttagatgcttccctaccagtgctatgatgagatgtctatttatttgtacttttctttaatctctataatttatgatgtttccatgccttaaaaaaacagagcaacccatgttcctttgtaagaccatgggcaggataaagatccatgattacatgccaaatactactaaaataaaaacttttttgggtaatgaaactatttccaggcccctgttgatgggagtatccaaaacaacagagtgttatttcag

SEQ ID NO: 2809 - protein, 58 aa, Homo sapiens
MMFPCLKKTEQPMFLCKTMGRIKIHDYMPNTTKIKTFLGNETISRPLLMGVSKTTECY

SEQ ID NO: 2810 - DNA, 1203 bp, Homo sapiens
tgcaaataagaatttgcagggaaatctgctttttgttcagaaataagctgtaatgagtgtggcattttgcatacacactgtgttatttttgaagggaggaaagtttagggttttggaactgttctccctacccccatgcctctcacctggattgttgttgtggcttcctaactgacctttaccctgcacactgccaccagcatgatttcttgaaaacataaatttcagtgggtcacttcctgaactcatagacaatagaaaattgtctatgagttccccaaaggcatcgcagtctagtaatgaagattcacactgcccaggttcaaggcctcgtgatgcttcttaccacctctggcttgggaatgtttttaacggctgtgtctcagtttactcatctctgaaacgggtgtgataatagcacttacctcacagataagttatgaaatgtaaatgagttaataggtgtgaagcactcataaccatgccggccacacagaaatcctcagtgaacattattcttgatctctctttcctttgtagaacaagctcatctttcttgtggctctccacaatagctcctacctccacctttctcagtgccaggcaaagcttgatcagcagacagacctctttgttagcaatctgcagctagataagtccatatttggtaatttttatagcaatttgaccatcattttacatctgttgaatctgattaggaactggacttgtattttgtcccatttttggcagttccttttcgctgaatttttatgaaagaattggtccatattgaattggaagtaaaaaaaaaaaaaaaaaaaaaaaaaaaacccctggtctttccccatgaataatttgagaagcacttctgtgtccccacacacccactatgtgattcacattggccaagttgtccaaactcactgtgtaaccttaaatctctctggatttcctcacactgtttcctctgcctagaatttgttagacatttattaagtacctgtaataagtacaagactctggggacataaggatgaataagggtctgcctttgcttttgaaaatgtttccttcaaaccacctagtaaattcctaccagtctgtcgaagcctagtatagtttcattttttccttcatccattgagaaaacatttattgaccaggtgcagtggctcacacctgtaatcccagcactttggg

SEQ ID NO: 2811 - protein, 40 aa, Homo sapiens
MSVAFCIHTVLFLKGGKFRVLELFSLPPCLSPGLLLWLPN

SEQ ID NO: 2812 - DNA, 2232 bp, Homo sapiens
acttgtttgtatacaaccacgcccggcaggatgaccaccagatgaccggccgcagcaatgcctccactcagtcccagttgggcaaagtttcactccactgcggcgacgtgaacaagaatcacggcttccttatcgtacctgccacaacacatgggaattatgggagtacaatttaagatgagatatggatgagaacacagagccaaaccatatcaactctatcttcatgtttgtttacatttctctcaactgtatgttttgtgacccagaatgtgatcctggtaaacattccatttgagaagaatgtgtattctgctgttgttggaagctgcgttgtcattgatgaaggaatatttcgaagcgctgaacaattcttgataaagttccgaaacaaacaaagcacaatcttccctcgatttacatgggagttgcattcctggaaaattcagtatattttaaaaccatgcaaaatatccttttaaaaaaatatgtaacatggagtttaggaccaaggctcagaatatttccaatccatggttgggtgcggaacctgcggatacagaggactgactataatatcaagagatcataaggctgtcggaatggactctttgtggcaataagataccatattataaacaggacccaaggtcatgccaggaggctcgtgtggtccctgtttgtcatccagtcaatacggccatcagcttctggccccagacacctttcctctgcactgtggcacagaggagcagactgctttggagggcagcttcctgggagctccagggaccctggccaggcggccactgccactgacttcctcggctcactgagcccgtgcctgcagctctcgtgtttcctctgtgctgcagtggacgcttatcttcccccgatggcacatttctttgtcacagacaggaccctcactggcagtcggaggacatcaagccctagtacaggaagggacattttcacactaatctgtgccagctggagcagtcctgccatctgaacatcatattttggaaccctgagaagctaggatgcagttaacagctagatgtcaattccctgcaggcagagaccagttctctgctgccatgtctttaaggcctgatgcaccatagattaattcaaatccagtgtctaccactcactcggcttaatgtaagacaagatgaagactccagacttcagaacttcagtgtccgcagatgaggattttaaatgcttcgcctacaacctcaattgttgtggagccaaagatgcaacagctttgaagaatagaagaattactctatatttgtcaggatctacgtggcaaacaagcgccacttggcttacattacttgcctggcttggatcccatggaatggaggagcattggaaccaagaggaaaaaaattaaagtgctttgggacagcgagccaaactcttacatagtatttgaaatggtgtggcaaacatgaaattattttaggctcaagattggtgctagttttttaccctctttttgaaaaaatagtaaaatgcacataaagggccctgccagaggtttagctcataaaatctgccaatcattggatgtgctaattggtgtagcaatccagtggtggcctggattaggactcaaaaactgacccttaccacccttggtgtcctgcagcaaagacagcctaaatcgaaaagactgatggaagtatatcaaattacgaatttctctatccctgaaaaatgcctgcaatttctgtttctccatcactccagaaatactcaaaacagcaaaaattaaatacatatgaagtgaacacaaaagacctccacagaaaaatcagtggctcatctgttgacgctattgctcattgctcggctggccagtcatctgggctaagttttgactttgggccagtgcttcaaaatcagcaacctttcagccaaaagactgtggaatgcagccaagaccacctgtggaaagtgaattatagcatctttaatttactaccttgggctatgatgtcagaaacccagcatggagggcgcaccagttcttgtgtgggaaatctctcagagcccccatggaggcccccaaagtggctctggcaaagctgtaggggtggaggtaacaaaaaaggggacacctggctctccttcttaaatcagctcaccatgggcacacatttatattggaattttagggtcagaaaataccaaaattaaatcttctagaag

SEQ ID NO: 2813 - protein, 97 aa, Homo sapiens
MRTQSQTISTLSSCLFTFLSTVCFVTQNVILVNIPFEKNVYSAVVGSCVVIDEGIFRSAEQFLIKFRNKQSTIFPRFTWELHSWKIQYILKPCKISF

SEQ ID NO: 2814 - DNA, 2058 bp, Homo sapiens
ttgtatacaaccacgcccggcaggatgaccaccagatgaccggccgcagcaatgcctccactcagtcccagttgggcaaagtttcactccactgcggcgacgtgaacaagaatcacggcttccttatctatctggccaaatgaatacatgcaggagatgaaatatggagaaagaacaaaaggactaattccacttgtgagagatgaaggaacaggagcactctcatgtttcttaggtatgttttgtgacccagaatgtgatcctggtaaacattccatttgagaagaatgtgtattctgctgttgttggaagctgcgttgtcattgatgaaggaatatttcgaagcgctgaacaattcttgataaagttccgaaacaaacaaagcacaatcttccctcgatttacatgggagttgcattcctggaaaattcagtatattttaaaaccatgcaaaatatccttttaaaaaaatatgtaacatggagtttaggaccaaggctcagaatatttccaatccatggttgggtgcggaacctgcggatacagaggactgactataatatcaagaatcagagaagctctactacccagaagagttggaacgggccttgaaatgtaacccaagcatcttattatacaggaggctcgtgtggtccctgtttgtcatccagtcaatacggccatcagcttctggccccagacacctttcctctgcactgtggcacagaggagcagactgctttggagggcagcttcctgggagctccagggaccctggccaggcggccactgccactgacttcctcggctcactgagcccgtgcctgcagctctcgtgtttcctctgtgctgcagtggacgcttatcttcccccgatggcacatttctttgtcacagacaggaccctcactggcagtcggaggacatcaagccctagtacaggaagggacattttcacactaatctgtgccagctggagcagtcctgccatctgaacatcatattttggaaccctgagaagctaggatgcagttaacaggcagatgaggattttaaatgcttcgcctacaacctcaattgttgtggagccaaagatgcaacagctttgaagaatagaagaattactctatatttgtcaggatctacgtggcaaacaagcgccacttggcttacattacttgcctggcttggatcccatggaatggaggagcattggaaccaagaggaaaaaaattaaagtgctttgggacagcgagccaaactcttacatagtatttgaaatggtgtggcaaacatgaaattattttaggctcaagattggtgctagttttttaccctctttttgaaaaaatagtaaaatgcacataaagggccctgccagaggtttagctcataaaatctgccaatcattggatgtgctaattggtgtagcaatccagtggtggcctggattaggactcaaaaactgacccttaccacccttggtgtcctgcagcaaagacagcctaaatcgaaaagactgatggaagtatatcaaattacgaatttctctatccctgaaaaatgcctgcaatttctgtttctccatcactccagaaatactcaaaacagcaaaaattaaatacatatgaagtgaacacaaaagacctccacagaaaaatcagtggctcatctgttgacgctattgctcattgctcggctggccagtcatctgggctaagttttgactttgggccagtgcttcaaaatcagcaacctttcagccaaaagactgtggaatgcagccaagaccacctgtggaaagtgaattatagcatctttaatttactaccttgggctatgatgtcagaaacccagcatggagggcgcaccagttcttgtgtgggaaatctctcagagcccccatggaggcccccaaagtggctctggcaaagctgtaggggtggaggtaacaaaaaaggggacacctggctctccttcttaaatcagctcaccatgggcacacatttatattggaattttagggtcagaaaataccaaaattaaatcttctagaag

SEQ ID NO: 2815 - protein, 68 aa, Homo sapiens
MGVAFLENSVYFKTMQNILLKKYVTWSLGPRLRIFPIHGWVRNLRIQRTDYNIKNQRSSTTQKSWNGP

SEQ ID NO: 2816 - DNA, 624 bp, Homo sapiens
tcttctttccttcaagtccagttctttgaaagtccaaatttgctctgaactgacttcaagcaagtgcccactcttgaacaaattactgaggctggaggataaagacacaaattggccaaacttggattacctgccttctgcatcttaaaggagtcagtcccaactacaaatttaagaggatcacagaaacacccacaaacttacgaggatcacagaaaacacccctacaccaacttatagccaatctattcaacctgcattgttagcaggtcacctctcctggatctctgcctgtagtgcccaattaagaatggaaggaggagatttttcagcttttgaagtctgcataccttcaaggaaattcttcaaaaacagccaagacattttaagatgaggagctacagaacagggtacatgccccacagtcttcaatactttttattattgtttcaagaaaactggataaattcattctgaacatcacagacttgaaagtcattgttaccatgcctttgagaatgcctatagttatcattgccatcatctcaaaggagaagaattctttaactcttattgtatatgcaattttgaataaaaaaatcaagttgcattgttattgaaatt

SEQ ID NO: 2817 - protein, 37 aa, Homo sapiens
MPLRMPIVIIAIISKEKNSLTLIVYAILNKKIKLHCY

SEQ ID NO: 2818 - DNA, 433 bp, Homo sapiens
tcctaagagaaaaggaatatcatttattgcctcttgcaaagtaaatactcctctatttaactgacgggatgaaccaatgatgtcatttaacagtttgtttgttggtgatctctactgctgaaatctcattaacatacacatttactcctttgatcttcacgataatcccatggaattggcaagtaaaaggcattattgacattttacagctttttcaggagttaagctgccttcgcaatgaggatcaaacctgcagcttacagcttatagactcgatgtatgtaagcaaaatggggaattgccaagtctaccttaaaatggccatttgccatacagttacttgatagacccattaaattccagtaaattcaaaatgttccaatgtggctaattattccagaaatgccaataaaaatgaaatgtgatgttcccc

SEQ ID NO: 2819 - DNA, 529 bp, Homo sapiens
gtccctcattcatgcactcttccatctttttgccattgtgccagctcaatttaaatgtatctgctctgtatctgttcaagtggagataatccatgcaaatcaggagccgtggctctcaatgcctggttcacagagaggactcagcttgaggaggtcactcgttcacagccgctcctcccattatatttttccccttattgcagaactgctgtatgtatacagtgactgaaaggactcaatttactgcaactgctgcctggctttacttacaacttttttttttttataaaggaacttacctccatctgtcttttcaagtttcagggtagaaagggtccctttaactcctgaagacagtaaatcacagtctgtgtggtggttctcagaagacacttaaaggactgaactggatgctctacatagcacccttgccaaaagggttcggaaatgacttccagcttcccacagtaataaaatggcactgtttggcatcttcgaggtaataaaagtgaattttttccattctagt

SEQ ID NO: 2820 - protein, 38 aa, Homo sapiens
MYTVTERTQFTATAAWLYLQLFFFYKGTYLHLSFQVSG

SEQ ID NO: 2821 - DNA, 3112 bp, Homo sapiens
aaagcagtggtgttttaccactctgcagagaaagctaaggttgctaaccaaacaaaataactttacactgacaatgccaatttttacatttctttcagaacaagggacactcaaactaccagagaaacggaccaatggactgcgaagaactcctaaacaggtggatccaggtttaccaaagatgcaggtcattaggaactattctggaacaccacccccagctctgcatgaaggaccccctttacagctccaggccggggataccgttgaacttctgaaaggagatgcacacagtctgttttggcagggcagaaatttagcatctggagaggttggattttttccaagtgatgcagtcaagccttgcccatgtgtgcccaaaccagtagattattcttgccaaccctggtatgctggagcaatggaaagattgcaagcagagaccgaacttattaatagggtaaatagtacttaccttgtgaggcacaggaccaaagagtcaggagaatatgcaattagcattaagtacaataatgaagcaaagcacatcaagattttaacaagagatggcttttttcacattgcagaaaatagaaaatttaaaagtttaatggaacttgtggagtactacaagcatcattctctcaaggaagggttcagaaccttagatacaactctgcagtttccatacaaggagccagaacattcagctggacagaggggtaatagagcaggcaacagcttgttaagtccaaaagtgctgggcattgccatcgctcggtatgacttctgtgcaagagatatgagagagttgtccttgttgaaaggagatgtggtgaagatttacacaaagatgagtgcaaatggctggtggagaggagaagtaaatggcagggtgggctggtttccatccacatatgtggaagaggatgaataaattcaaatcccgtgttgcaccctgcaccaaaaatttcagagaagggataaatagaagcctgcacagcatcgtgaattaactgaagtgtttaaaaagctgcatttctggctgttcaacatcctccctccttagcccctcctaagtcttaatgctgagatttctaaagatgctggtactgacagattaatggcttgcctagagctgtgcaagaaacagcctgccagtctgtcattgtcagggaccagggcaaaaccaagagctgttcttcccagaagagccctgcaaacacattggttcgtgcttccctttacttcttctggtcagataccatgaatgccagtcatcagtaaatcttaatacacttttgctttattctcacatgccattcaccagattatttgatggtacaaagaagcagaagtgtaattttccttttcccagcatgacgaaaaattggagttctgccatttgagcagcttactggaaagatccagccttacttgtcttaaattgtccaacaaggtgactcattgcccggcaaacacttttaccctcagatgttactcatgatattataaaatatgaggccagtgctcaggtttgcatcataagtgagctatccctgaagggttttaattacttatttggtgtcctgattatatttgcaaacttctttataaaaggtgaaaaaagcacacaaaagagagggtgtcttcatattaaaccttcacaaccttcatgatttcataggattattttggaaatatagcacttgactttatgaaaggatctgggctaggtatattaagggtagttgccaataacctgaagaagctggcattgtttacagaaacagatcaagggctataatttatgtcattttatagcagcagtatctattaatacatgccttttcctcccatccacctcccccgcacacacacaaagatgacctgggacatgatttttttattcccacattttcttggagcacaaacaactttgttgaggattttggaaggaaagcacaactgggtcctttattcatttctgggacagaaagagggtcagtggacttttgtgggcctccagcttctctcagagtctccccctctgcagcccatcctgggagtgtattaactggagggaagatgggtcttgcagtacatttgttttgcccagccatcactcttttttgtgaggagcctaaatacattcttcctggggtccagagtccccattcaaggcagtcaagttaagacactaacttggccctttcctgatggaaatatttcctccatagcagaagttgtgttctgacaagactgagagagttacatgttgggaaaaaaaagaagcattaacttagtagaactgaaccaggagcattaagttctgaaattttgaatcatctctgaaatgaagcaggtgtagcctgccctctcatcaatccgtctgggtgccagaactcaaggttcagtggacacatccccctgttagagaccctcatgggctaggacttttcatctaggatagattcaagacctttacctcagaattatgtaaactgtgattgtgttttagaaaaattattatttgctaaaaccatttaagtctttgtatatgtgtaaatgatcacaaaaatgtattttataaaatgttctgtacaataaagttacacctcaaagtgtactcttggaatggattctttcctgtaaagtcttatctgcgactctgtctcgggaatgttttgtctgttgccgtcagccgaactttgttatggagggagcagcctcacacaagcagaaacactcctgtggatggtattgtagcatgtattgtttattttagtcaatagaccctctccttataaatggtgtttagtcttcctgttgcatttcatgggcctgggggtttcctagcagaggatattggagcccctttttgtgacattaccaattacatctttgtccacgtttaatactttgttttggaaaatttaaatgctgcagatttgtgtagagttctaataccaaagacagaagtaaatgttttccatatactttgtcttgcctgtatgcagccctcgtgtaatacggtgaattagagtggtatttcactttgtattattttgtaaatatgtcaatataataaatagtgactaaattgatttct

SEQ ID NO: 2822 - protein, 287 aa, Homo sapiens
MPIFTFLSEQGTLKLPEKRTNGLRRTPKQVDPGLPKMQVIRNYSGTPPPALHEGPPLQLQAGDTVELLKGDAHSLFWQGRNLASGEVGFFPSDAVKPCPCVPKPVDYSCQPWYAGAMERLQAETELINRVNSTYLVRHRTKESGEYAISIKYNNEAKHIKILTRDGFFHIAENRKFKSLMELVEYYKHHSLKEGFRTLDTTLQFPYKEPEHSAGQRGNRAGNSLLSPKVLGIAIARYDFCARDMRELSLLKGDVVKIYTKMSANGWWRGEVNGRVGWFPSTYVEEDE

SEQ ID NO: 2823 - DNA, 4565 bp, Homo sapiens
tcagaaaccaggatgcaacatctgtgccttgagcctctgctgctagatagcaacctaatgttgtaggggtgtgatgccgtggaccccttcttgaacccccaagctcgtcttgcatttggggctctagcatgcagctgcctgattgcccttgcagagcccacctccctgttatagaaacattatcacgactttctcgaacacctatagcattggccacaggaatcaggcccttcccaacagaagaaagcattaatgatgaagacatctacaaaggccttcctgatttaatagatgaaacccttgtggaagatgaagaagatctctatgactgtgtttatggggaagatgaaggtggagaagtctatgaggacttaatgaaggcagaggaagcacatcagcccaaatgtccagaaaatgatatacgaagttgttgtctagcagaaattaagcagacagaagaaaaatatacagaaactttggagtcaatagaaaagtatttcatggcaccactaaaaagatttctgacagcagcagaatttgattcagtattcatcaacattcctgaacttgtaaaacttcatcggaacctaatgcaagagattcatgattccattgtaaataaaaatgaccagaacttgtaccaagtttttattaactacaaggaaagattggttatttacgggcagtactgcagtggagtggagtcagccatctctagtttagactacatttctaagacaaaagaagatgtcaaactgaaattagaggaatgttccaaaagagcaaataatgggaaatttactcttcgagacttgcttgtggttcctatgcaacgtgttttaaagtaccaccttctcctccaggaactggtcaaacataccactgatccgactgagaaggcaaatctgaaactggctcttgatgccatgaaggacttggcacaatatgtgaatgaagtgaaaagagataatgagacccttcgtgaaattaaacagtttcagctatctatagagaatttgaaccaaccagttttgctttttggacgacctcagggagatggtgaaattcgaataaccactctagacaagcataccaaacaagaaaggcatatcttcttatttgatttggcagtgatcgtatgtaagagaaaaggtgataactatgaaatgaaggaaataatagatcttcagcagtacaagatagccaataatcctacaaccgataaagaaaacaaaaagtggtcttatggcttctacctcatccatacccaaggacaaaatgggttagaattttattgcaaaacaaaagatttaaagaagaaatggctagaacagtttgaaatggctttgtctaacataagaccagactatgcagactccaatttccacgacttcaagatgcataccttcactcgagtcacatcctgcaaagtctgccagatgctcctgaggggaacattttatcaaggctatttatgttttaagtgtggagcgagagcacacaaagaatgtttgggaagagtagacaattgtggcagagttaattctggtgaacaagggacactcaaactaccagagaaacggaccaatggactgcgaagaactcctaaacaggtggatccaggtttaccaaagatgcaggtcattaggaactattctggaacaccacccccagctctgcatgaaggaccccctttacagctccaggccggggataccgttgaacttctgaaaggagatgcacacagtctgttttggcagggcagaaatttagcatctggagaggttggattttttccaagtgatgcagtcaagccttgcccatgtgtgcccaaaccagtagattattcttgccaaccctggtatgctggagcaatggaaagattgcaagcagagaccgaacttattaatagggtaaatagtacttaccttgtgaggcacaggaccaaagagtcaggagaatatgcaattagcattaagtacaataatgaagcaaagcacatcaagattttaacaagagatggcttttttcacattgcagaaaatagaaaatttaaaagtttaatggaacttgtggagtactacaagcatcattctctcaaggaagggttcagaaccttagatacaactctgcagtttccatacaaggagccagaacattcagctggacagaggggtaatagagcaggcaacagcttgttaagtccaaaagtgctgggcattgccatcgctcggtatgacttctgtgcaagagatatgagagagttgtccttgttgaaaggagatgtggtgaagatttacacaaagatgagtgcaaatggctggtggagaggagaagtaaatggcagggtgggctggtttccatccacatatgtggaagaggatgaataaattcaaatcccgtgttgcaccctgcaccaaaaatttcagagaagggataaatagaagcctgcacagcatcgtgaattaactgaagtgtttaaaaagctgcatttctggctgttcaacatcctccctccttagcccctcctaagtcttaatgctgagatttctaaagatgctggtactgacagattaatggcttgcctagagctgtgcaagaaacagcctgccagtctgtcattgtcagggaccagggcaaaaccaagagctgttcttcccagaagagccctgcaaacacattggttcgtgcttccctttacttcttctggtcagataccatgaatgccagtcatcagtaaatcttaatacacttttgctttattctcacatgccattcaccagattatttgatggtacaaagaagcagaagtgtaattttccttttcccagcatgacgaaaaattggagttctgccatttgagcagcttactggaaagatccagccttacttgtcttaaattgtccaacaaggtgactcattgcccggcaaacacttttaccctcagatgttactcatgatattataaaatatgaggccagtgctcaggtttgcatcataagtgagctatccctgaagggttttaattacttatttggtgtcctgattatatttgcaaacttctttataaaaggtgaaaaaagcacacaaaagagagggtgtcttcatattaaaccttcacaaccttcatgatttcataggattattttggaaatatagcacttgactttatgaaaggatctgggctaggtatattaagggtagttgccaataacctgaagaagctggcattgtttacagaaacagatcaagggctataatttatgtcattttatagcagcagtatctattaatacatgccttttcctcccatccacctcccccgcacacacacaaagatgacctgggacatgatttttttattcccacattttcttggagcacaaacaactttgttgaggattttggaaggaaagcacaactgggtcctttattcatttctgggacagaaagagggtcagtggacttttgtgggcctccagcttctctcagagtctccccctctgcagcccatcctgggagtgtattaactggagggaagatgggtcttgcagtacatttgttttgcccagccatcactcttttttgtgaggagcctaaatacattcttcctggggtccagagtccccattcaaggcagtcaagttaagacactaacttggccctttcctgatggaaatatttcctccatagcagaagttgtgttctgacaagactgagagagttacatgttgggaaaaaaaagaagcattaacttagtagaactgaaccaggagcattaagttctgaaattttgaatcatctctgaaatgaagcaggtgtagcctgccctctcatcaatccgtctgggtgccagaactcaaggttcagtggacacatccccctgttagagaccctcatgggctaggacttttcatctaggatagattcaagacctttacctcagaattatgtaaactgtgattgtgttttagaaaaattattatttgctaaaaccatttaagtctttgtatatgtgtaaatgatcacaaaaatgtattttataaaatgttctgtacaataaagttacacctcaaagtgtactcttggaatggattctttcctgtaaagtcttatctgcgactctgtctcgggaatgttttgtctgttgccgtcagccgaactttgttatggagggagcagcctcacacaagcagaaacactcctgtggatggtattgtagcatgtattgtttattttagtcaatagaccctctccttataaatggtgtttagtcttcctgttgcatttcatgggcctgggggtttcctagcagaggatattggagcccctttttgtgacattaccaattacatctttgtccacgtttaatactttgttttggaaaatttaaatgctgcagatttgtgtagagttctaataccaaagacagaagtaaatgttttccatatactttgtcttgcctgtatgcagccctcgtgtaatacggtgaattagagtggtatttcactttgtattattttgtaaatatgtcaatataataaatagtgactaaattgatttct

SEQ ID NO: 2824 - protein, 753 aa, Homo sapiens
MQLPDCPCRAHLPVIETLSRLSRTPIALATGIRPFPTEESINDEDIYKGLPDLIDETLVEDEEDLYDCVYGEDEGGEVYEDLMKAEEAHQPKCPENDIRSCCLAEIKQTEEKYTETLESIEKYFMAPLKRFLTAAEFDSVFINIPELVKLHRNLMQEIHDSIVNKNDQNLYQVFINYKERLVIYGQYCSGVESAISSLDYISKTKEDVKLKLEECSKRANNGKFTLRDLLVVPMQRVLKYHLLLQELVKHTTDPTEKANLKLALDAMKDLAQYVNEVKRDNETLREIKQFQLSIENLNQPVLLFGRPQGDGEIRITTLDKHTKQERHIFLFDLAVIVCKRKGDNYEMKEIIDLQQYKIANNPTTDKENKKWSYGFYLIHTQGQNGLEFYCKTKDLKKKWLEQFEMALSNIRPDYADSNFHDFKMHTFTRVTSCKVCQMLLRGTFYQGYLCFKCGARAHKECLGRVDNCGRVNSGEQGTLKLPEKRTNGLRRTPKQVDPGLPKMQVIRNYSGTPPPALHEGPPLQLQAGDTVELLKGDAHSLFWQGRNLASGEVGFFPSDAVKPCPCVPKPVDYSCQPWYAGAMERLQAETELINRVNSTYLVRHRTKESGEYAISIKYNNEAKHIKILTRDGFFHIAENRKFKSLMELVEYYKHHSLKEGFRTLDTTLQFPYKEPEHSAGQRGNRAGNSLLSPKVLGIAIARYDFCARDMRELSLLKGDVVKIYTKMSANGWWRGEVNGRVGWFPSTYVEEDE

SEQ ID NO: 2825 - DNA, 4773 bp, Homo sapiens
cggccgcatccttgccgcccgccccggcccagccgcgtcccggagccgtcgggcatggagccgtggaagcagtgcgcgcagtggctcatccattgcaaggtgctgcccaccaaccaccgggtgacctgggactcggctcaggtgttcgaccttgcgcagaccctccgcgatggagtcctgctctgccagctgcttaacaacctccgggcgcactccatcaacctgaaggagatcaacctgaggccgcagatgtcccagtttctctgtttgaagaacataaggacatttctcacggcctgttgtgagacgtttggaatgaggaaaagtgaacttttcgaggcatttgacttgtttgatgttcgtgactttggaaaggttatagaaacattatcacgactttctcgaacacctatagcattggccacaggaatcaggcccttcccaacagaagaaagcattaatgatgaagacatctacaaaggccttcctgatttaatagatgaaacccttgtggaagatgaagaagatctctatgactgtgtttatggggaagatgaaggtggagaagtctatgaggacttaatgaaggcagaggaagcacatcagcccaaatgtccagaaaatgatatacgaagttgttgtctagcagaaattaagcagacagaagaaaaatatacagaaactttggagtcaatagaaaagtatttcatggcaccactaaaaagatttctgacagcagcagaatttgattcagtattcatcaacattcctgaacttgtaaaacttcatcggaacctaatgcaagagattcatgattccattgtaaataaaaatgaccagaacttgtaccaagtttttattaactacaaggaaagattggttatttacgggcagtactgcagtggagtggagtcagccatctctagtttagactacatttctaagacaaaagaagatgtcaaactgaaattagaggaatgttccaaaagagcaaataatgggaaatttactcttcgagacttgcttgtggttcctatgcaacgtgttttaaagtaccaccttctcctccaggaactggtcaaacataccactgatccgactgagaaggcaaatctgaaactggctcttgatgccatgaaggacttggcacaatatgtgaatgaagtgaaaagagataatgagacccttcgtgaaattaaacagtttcagctatctatagagaatttgaaccaaccagttttgctttttggacgacctcagggagatggtgaaattcgaataaccactctagacaagcataccaaacaagaaaggcatatcttcttatttgatttggcagtgatcgtatgtaagagaaaaggtgataactatgaaatgaaggaaataatagatcttcagcagtacaagatagccaataatcctacaaccgataaagaaaacaaaaagtggtcttatggcttctacctcatccatacccaaggacaaaatgggttagaattttattgcaaaacaaaagatttaaagaagaaatggctagaacagtttgaaatggctttgtctaacataagaccagactatgcagactccaatttccacgacttcaagatgcataccttcactcgagtcacatcctgcaaagtctgccagatgctcctgaggggaacattttatcaaggctatttatgttttaagtgtggagcgagagcacacaaagaatgtttgggaagagtagacaattgtggcagagttaattctggtgaacaagggacactcaaactaccagagaaacggaccaatggactgcgaagaactcctaaacaggtggatccaggtttaccaaagatgcaggtcattaggaactattctggaacaccacccccagctctgcatgaaggaccccctttacagctccaggccggggataccgttgaacttctgaaaggagatgcacacagtctgttttggcagggcagaaatttagcatctggagaggttggattttttccaagtgatgcagtcaagccttgcccatgtgtgcccaaaccagtagattattcttgccaaccctggtatgctggagcaatggaaagattgcaagcagagaccgaacttattaatagggtaaatagtacttaccttgtgaggcacaggaccaaagagtcaggagaatatgcaattagcattaagtacaataatgaagcaaagcacatcaagattttaacaagagatggcttttttcacattgcagaaaatagaaaatttaaaagtttaatggaacttgtggagtactacaagcatcattctctcaaggaagggttcagaaccttagatacaactctgcagtttccatacaaggagccagaacattcagctggacagaggggtaatagagcaggcaacagcttgttaagtccaaaagtgctgggcattgccatcgctcggtatgacttctgtgcaagagatatgagagagttgtccttgttgaaaggagatgtggtgaagatttacacaaagatgagtgcaaatggctggtggagaggagaagtaaatggcagggtgggctggtttccatccacatatgtggaagaggatgaataaattcaaatcccgtgttgcaccctgcaccaaaaatttcagagaagggataaatagaagcctgcacagcatcgtgaattaactgaagtgtttaaaaagctgcatttctggctgttcaacatcctccctccttagcccctcctaagtcttaatgctgagatttctaaagatgctggtactgacagattaatggcttgcctagagctgtgcaagaaacagcctgccagtctgtcattgtcagggaccagggcaaaaccaagagctgttcttcccagaagagccctgcaaacacattggttcgtgcttccctttacttcttctggtcagataccatgaatgccagtcatcagtaaatcttaatacacttttgctttattctcacatgccattcaccagattatttgatggtacaaagaagcagaagtgtaattttccttttcccagcatgacgaaaaattggagttctgccatttgagcagcttactggaaagatccagccttacttgtcttaaattgtccaacaaggtgactcattgcccggcaaacacttttaccctcagatgttactcatgatattataaaatatgaggccagtgctcaggtttgcatcataagtgagctatccctgaagggttttaattacttatttggtgtcctgattatatttgcaaacttctttataaaaggtgaaaaaagcacacaaaagagagggtgtcttcatattaaaccttcacaaccttcatgatttcataggattattttggaaatatagcacttgactttatgaaaggatctgggctaggtatattaagggtagttgccaataacctgaagaagctggcattgtttacagaaacagatcaagggctataatttatgtcattttatagcagcagtatctattaatacatgccttttcctcccatccacctcccccgcacacacacaaagatgacctgggacatgatttttttattcccacattttcttggagcacaaacaactttgttgaggattttggaaggaaagcacaactgggtcctttattcatttctgggacagaaagagggtcagtggacttttgtgggcctccagcttctctcagagtctccccctctgcagcccatcctgggagtgtattaactggagggaagatgggtcttgcagtacatttgttttgcccagccatcactcttttttgtgaggagcctaaatacattcttcctggggtccagagtccccattcaaggcagtcaagttaagacactaacttggccctttcctgatggaaatatttcctccatagcagaagttgtgttctgacaagactgagagagttacatgttgggaaaaaaaagaagcattaacttagtagaactgaaccaggagcattaagttctgaaattttgaatcatctctgaaatgaagcaggtgtagcctgccctctcatcaatccgtctgggtgccagaactcaaggttcagtggacacatccccctgttagagaccctcatgggctaggacttttcatctaggatagattcaagacctttacctcagaattatgtaaactgtgattgtgttttagaaaaattattatttgctaaaaccatttaagtctttgtatatgtgtaaatgatcacaaaaatgtattttataaaatgttctgtacaataaagttacacctcaaagtgtactcttggaatggattctttcctgtaaagtcttatctgcgactctgtctcgggaatgttttgtctgttgccgtcagccgaactttgttatggagggagcagcctcacacaagcagaaacactcctgtggatggtattgtagcatgtattgtttattttagtcaatagaccctctccttataaatggtgtttagtcttcctgttgcatttcatgggcctgggggtttcctagcagaggatattggagcccctttttgtgacattaccaattacatctttgtccacgtttaatactttgttttggaaaatttaaatgctgcagatttgtgtagagttctaataccaaagacagaagtaaatgttttccatatactttgtcttgcctgtatgcagccctcgtgtaatacggtgaattagagtggtatttcactttgtattattttgtaaatatgtcaatataataaatagtgactaaattgatttct

SEQ ID NO: 2826 - protein, 847 aa, Homo sapiens
MEPWKQCAQWLIHCKVLPTNHRVTWDSAQVFDLAQTLRDGVLLCQLLNNLRAHSINLKEINLRPQMSQFLCLKNIRTFLTACCETFGMRKSELFEAFDLFDVRDFGKVIETLSRLSRTPIALATGIRPFPTEESINDEDIYKGLPDLIDETLVEDEEDLYDCVYGEDEGGEVYEDLMKAEEAHQPKCPENDIRSCCLAEIKQTEEKYTETLESIEKYFMAPLKRFLTAAEFDSVFINIPELVKLHRNLMQEIHDSIVNKNDQNLYQVFINYKERLVIYGQYCSGVESAISSLDYISKTKEDVKLKLEECSKRANNGKFTLRDLLVVPMQRVLKYHLLLQELVKHTTDPTEKANLKLALDAMKDLAQYVNEVKRDNETLREIKQFQLSIENLNQPVLLFGRPQGDGEIRITTLDKHTKQERHIFLFDLAVIVCKRKGDNYEMKEIIDLQQYKIANNPTTDKENKKWSYGFYLIHTQGQNGLEFYCKTKDLKKKWLEQFEMALSNIRPDYADSNFHDFKMHTFTRVTSCKVCQMLLRGTFYQGYLCFKCGARAHKECLGRVDNCGRVNSGEQGTLKLPEKRTNGLRRTPKQVDPGLPKMQVIRNYSGTPPPALHEGPPLQLQAGDTVELLKGDAHSLFWQGRNLASGEVGFFPSDAVKPCPCVPKPVDYSCQPWYAGAMERLQAETELINRVNSTYLVRHRTKESGEYAISIKYNNEAKHIKILTRDGFFHIAENRKFKSLMELVEYYKHHSLKEGFRTLDTTLQFPYKEPEHSAGQRGNRAGNSLLSPKVLGIAIARYDFCARDMRELSLLKGDVVKIYTKMSANGWWRGEVNGRVGWFPSTYVEEDE

SEQ ID NO: 2827 - DNA, 2485 bp, Homo sapiens
atgtatttaaagttagagcacacacagtcatctgtgattcttggtgtcagtgtttcatcagggtcccctgcacttcagattctgcattccttgcctgtttgccttcaacctgctggtgggcagtccctaagaaagaacaggcatggaagtggggagagccatacgtatttaaaagtgagtttctctgtttgaagaacataaggacatttctcacggcctgttgtgagacgtttggaatgaggaaaagtgaacttttcgaggcatttgacttgtttgatgttcgtgactttggaaaggttatagaaacattatcacgactttctcgaacacctatagcattggccacaggaatcagttttcatctacactagtgaacggagccatggaaggatgattgctaccaaattatttgttatcagatcccacagctgaaaagagagggtgctgaaggcaagggcccttcccaacagaagaaagcattaatgatgaagacatctacaaaggccttcctgatttaatagatgaaacccttgtggaagatgaagaagatctctatgactgtgtttatggggaagatgaaggtggagaagtctatgaggacttaatgaaggcagaggaagcacatcagcccaaatgtccagaaaatgatatacgaagttgttgtctagcagaaattaagcagacagaagaaaaatatacagaaactttggagtcaatagaaaagtatttcatggcaccactaaaaagatttctgacagcagcagaatttgattcagtattcatcaacattcctgaacttgtaaaacttcatcggaacctaatgcaagagattcatgattccattgtaaataaaaatgaccagaacttgtaccaagtttttattaactacaaggaaagattggttatttacgggcagtactgcagtggagtggagtcagccatctctagtttagactacatttctaagacaaaagaagatgtcaaactgaaattagaggaatgttccaaaagagcaaataatgggaaatttactcttcgagacttgcttgtggttcctatgcaacgtgttttaaagtaccaccttctcctccaggaactggtcaaacataccactgatccgactgagaaggcaaatctgaaactggctcttgatgccatgaaggacttggcacaatatgtgaatgaagtgaaaagagataatgagacccttcgtgaaattaaacagtttcagctatctatagagaatttgaaccaaccagttttgctttttggacgacctcagggagatggtgaaattcgaataaccactctagacaagcataccaaacaagaaaggcatatcttcttatttgatttggcagtgatcgtatgtaagagaaaaggtgataactatgaaatgaaggaaataatagatcttcagcagtacaagatagccaataatcctacaaccgataaagaaaacaaaaagtggtcttatggcttctacctcatccatacccaaggacaaaatgggttagaattttattgcaaaacaaaagatttaaagaagaaatggctagaacagtttgaaatggctttgtctaacataagaccagactatgcagactccaatttccacgacttcaagatgcataccttcactcgagtcacatcctgcaaagtctgccagatgctcctgaggggaacattttatcaaggctatttatgttttaagtgtggagcgagagcacacaaagaatgtttgggaagagtagacaattgtggcagagttaattctggtgaacaagggacactcaaactaccagagaaacggaccaatggactgcgaagaactcctaaacaggtggatccagatgtgccctgtctccttcatttctttatttccatggcccctgctactagaagcattgtaaaaagccaaaagaagaacaagaaattctgaggacatgggtgaaaatgcagccttgaggtttctgaaaataacaggagacagacaaggctggtgtccagcaacaatactgggtagctctttttgtccccacttacacagcgaaggataaagaagagatcctatggacacttagtaaggattacttcatgttttaattcaaagtactttggaaagaagactttgagcagagtggaatagcaggaggtttttgtaaggtgaaatagaatgaaagtgcagccaagaatttttctgtcttcaattttaaagaacaccggcataactcatttttctttttttcccctgtgttctttttgaccttcttagcagctcctgactttctcccttggggatttttctctgtatagtcagcgctgactcccttagaaatcctgaaccccacacccgtatcgcgaaagagttgaagagaattcaaataaacacgttgagataagtagcttgtgaactaactgttacagcatgcctctgtaataagatactgccagctagaagctaaaataaagtgaaattccattt

SEQ ID NO: 2828 - protein, 445 aa, Homo sapiens
MKAEEAHQPKCPENDIRSCCLAEIKQTEEKYTETLESIEKYFMAPLKRFLTAAEFDSVFINIPELVKLHRNLMQEIHDSIVNKNDQNLYQVFINYKERLVIYGQYCSGVESAISSLDYISKTKEDVKLKLEECSKRANNGKFTLRDLLVVPMQRVLKYHLLLQELVKHTTDPTEKANLKLALDAMKDLAQYVNEVKRDNETLREIKQFQLSIENLNQPVLLFGRPQGDGEIRITTLDKHTKQERHIFLFDLAVIVCKRKGDNYEMKEIIDLQQYKIANNPTTDKENKKWSYGFYLIHTQGQNGLEFYCKTKDLKKKWLEQFEMALSNIRPDYADSNFHDFKMHTFTRVTSCKVCQMLLRGTFYQGYLCFKCGARAHKECLGRVDNCGRVNSGEQGTLKLPEKRTNGLRRTPKQVDPDVPCLLHFFISMAPATRSIVKSQKKNKKF

SEQ ID NO: 2829 - DNA, 439 bp, Homo sapiens
cccgctccgctgatgcctgtctgcagaatccgcaccaaccagcaccatgcccatgactctggggtactgggacatccgtgggtgaatagccatggagctcctaaaaagaatgggacctttcacttgacctcccttctctcccttgcctactgcccctgagcgagtgcttcagctacagtctgggagccgaagatgcctgtgtttgatgcctccagcaccctgtctctgcatcttgaatccagccacgtgaccatctcttgcccacctttggccaatgtccctgagacatttcaagtgcatcatgctgcagactggtgttgctgtctccacaataccgcgcttcccctgtgtccccatctcagtctttggtcccactatccacttcccacatgcagccattgagtcctctatttttcttccttaaatctccagaatctgc

SEQ ID NO: 2830 - protein, 48 aa, Homo sapiens
MPVCRIRTNQHHAHDSGVLGHPWVNSHGAPKKNGTFHLTSLLSLAYCP

SEQ ID NO: 2831 - DNA, 793 bp, Homo sapiens
aaagctcagggcccttgttcactagaagcaaggagtcccctgacccccttcttcaaaacatactcttcagtctttgtctttattcccgccttggtcctcctttgttcagtccagcaaggtccacagcaaagtgctgcccgaaaacagggtcttgaggacatgaacaaagaaggtctgctggagcagaggaagtgaaattgaccagatgaacagggaccctgggatgaatctgctggcagtggatataaggggcaaagccaggatctgaacccagacggcccggctccggagtccatgctcctgagcaccacacagtgctgctcccttggaaattcagaaaggctggaccccgtgctccagggcagcaggaggagggcacatgccaaggatgtcactggaaagggagcagaggtgaggctgtgaagcctttatacccaagagaaactcagctggacaccagtaacataagtgctattcattgaaaagagcaaagcaagagcgctgaccccttacggacaggatgaaacaaaacaagctctgcaagtctgcctcctgctcagcatacaggcttgttgccccactgggccatcttgttgttgatgggcatcttgcagaactgatcagacttgaatagccatggagctcctaaaaagaatgggacctttcacttgacctcccttctctcccttgcctactgcccctgagcgagtgcttcagctacagtctgggagccgaagatgcctgtgtttgatgcctccagcaccctgtctctgcatcttgaatccagccacgt

SEQ ID NO: 2832 - protein, 37 aa, Homo sapiens
MKQNKLCKSASCSAYRLVAPLGHLVVDGHLAELIRLE

SEQ ID NO: 2833 - DNA, 2238 bp, Homo sapiens
gttgagcggttagtgaccaggaagcctccccacccaccagagtccaaagagcacaggcgtggctgcctctgtaacctcatcaaaggcaggctctgcctgtggccactagcagagaagctgctgtccttccaccaccagcaccggaccacctgctccaagaccagcctcctggggggaccaggcacccggccttcactggcacccagggagccgtcctcagcagcgtcaacatgtcaaggcccagcagcagagccatttacttgcaccggaaggagtactcccagaacctcacctcagagcccaccctcctgcagcacagggtggagcacttgatgacatgcaagcaggggagtcagagagtccaggggcccgaggatgccttgcagaagctgttcgagatggatgcacagggccgggtgtggagccaagacttgatcctgcaggtcagggacggctggctgcagctgctggacattgagaccaaggaggagctggactcttaccgcctagacagcatccaggccatgaatgtggcgctcaacacatgttcctacaactccatcctgtccatcaccgtgcaggagccgggcctgccaggcactagcactctgctcttccagtgccaggaagtgggggcagagcgactgaagaccagcctgcagaaggctctggaggaagagctggagcaaagcagacctcgacttggaggccttcagccaggccaggacagatggagggggcctgctatggaaaggccgctccctatggagcaggcacgctatctggagccggggatccctccagaacagccccaccagaggaccctagagcacagcctcccaccatccccaaggcccctgccacgccacaccagtgcccgagaaccaagtgcctttactctgcctcctccaaggcggtcctcttcccccgaggacccagagagggacgaggaagtgctgaaccatgtcctaagggacattgagctgttcatgggaaagctggagaaggcccaggcaaagaccagcaggaagaagaaatttgggaaaaaaaacaaggaccagggaggtctcacccaggcacagtacattgactgcttccagaagatcaagcacagcttcaacctcctgggaaggctggccacctggctgaaggagacaagtgcccctgagctcgtacacatcctcttcaagtccctgaacttcatcctggccaggtgccctgaggctggcctagcagcccaagtgatctcacccctcctcacccctaaagctatcaacctgctacagtcctgtctaagcccacctgagagtaacctttggatggggttgggcccagcctggaccactagccgggccgactggacaggcgatgagcccctgccctaccaacccacattctcagatgactggcaacttccagagccctccagccaagcacccttaggataccaggaccctgtttcccttcggccctccagccccaaacctgcccagccagccctgaaaatgcaagtcttgtacgagtttgaagctaggaacccacgggaactgactgtggtccagggagagaagctggaggttctggaccacagcaagcggtggtggctggtgaagaatgaggcgggacggagcggctacattccaagcaacatcctggagcccctacagccggggacccctgggacccagggccagtcaccctctcgggttccaatgcttcgacttagctcgaggcctgaagaggtcacagactggctgcaggcagagaacttctccactgccacggtgaggacacttgggtccctgacggggagccagctacttcgcataagacctggggagctacagatgctatgtccacaggaggccccacgaatcctgtcccggctggaggctgtcagaaggatgctggggataagcccttaggcaccagcttagacacctccaagaaccaggccccgctgatgcaagatggcagatctgatacccattagagccccgagaattcctcttctggatcccagtttgcagcaaaccccacaccccagctcacacagcaaaaacaatggacaggcccagaggctgaagcaaacagtgtcccttctggctgtgttggagcctccccagtaaccacctatttattttacctctttcccaaacctggagcatttatgcctaggcttgtcaagaatctgttcagtccctctccttctcaataaaagcatcttcaagcttgtca

SEQ ID NO: 2834 - protein, 564 aa, Homo sapiens
MSRPSSRAIYLHRKEYSQNLTSEPTLLQHRVEHLMTCKQGSQRVQGPEDALQKLFEMDAQGRVWSQDLILQVRDGWLQLLDIETKEELDSYRLDSIQAMNVALNTCSYNSILSITVQEPGLPGTSTLLFQCQEVGAERLKTSLQKALEEELEQSRPRLGGLQPGQDRWRGPAMERPLPMEQARYLEPGIPPEQPHQRTLEHSLPPSPRPLPRHTSAREPSAFTLPPPRRSSSPEDPERDEEVLNHVLRDIELFMGKLEKAQAKTSRKKKFGKKNKDQGGLTQAQYIDCFQKIKHSFNLLGRLATWLKETSAPELVHILFKSLNFILARCPEAGLAAQVISPLLTPKAINLLQSCLSPPESNLWMGLGPAWTTSRADWTGDEPLPYQPTFSDDWQLPEPSSQAPLGYQDPVSLRPSSPKPAQPALKMQVLYEFEARNPRELTVVQGEKLEVLDHSKRWWLVKNEAGRSGYIPSNILEPLQPGTPGTQGQSPSRVPMLRLSSRPEEVTDWLQAENFSTATVRTLGSLTGSQLLRIRPGELQMLCPQEAPRILSRLEAVRRMLGISP

SEQ ID NO: 2835 - DNA, 2328 bp, Homo sapiens
gttgagcggttagtgaccaggaagcctccccacccaccagagtccaaagagcacaggcgtggctgcctctgtaacctcatcaaaggcaggctctgcctgtggccactagcagagaagctgctgtccttccaccaccagcaccggaccacctgctccaagaccagcctcctggggggaccaggcacccggccttcactggcacccagggagccgtcctcagcagcgtcaacatgtcaaggcccagcagcagagccatttacttgcaccggaaggagtactcccagaacctcacctcagagcccaccctcctgcagcacagggtggagcacttgatgacatgcaagcaggggagtcagagagtccaggggcccgaggatgccttgcagaagctgttcgagatggatgcacagggccgggtgtggagccaagacttgatcctgcaggtcagggacggctggctgcagctgctggacattgagaccaaggaggagctggactcttaccgcctagacagcatccaggccatgaatgtggcgctcaacacatgttcctacaactccatcctgtccatcaccgtgcaggagccgggcctgccaggcactagcactctgctcttccagtgccaggaagtgggggcagagcgactgaagaccagcctgcagaaggctctggaggaagagctggagcaaagcagacctcgacttggaggccttcagccaggccaggacagatggagggggcctgctatggaaaggccgctccctatggagcaggcacgctatctggagccggggatccctccagaacagccccaccagaggaccctagagcacagcctcccaccatccccaaggcccctgccacgccacaccagtgcccgagaaccaagtgcctttactctgcctcctccaaggcggtcctcttcccccgaggacccagagagggacgaggaagtgctgaaccatgtcctaagggacattgagctgttcatgggaaagctggagaaggcccaggcaaagaccagcaggaagaagaaatttgggaaaaaaaacaaggaccagggaggtctcacccaggcacagtacattgactgcttccagaagatcaagcacagcttcaacctcctgggaaggctggccacctggctgaaggagacaagtgcccctgagctcgtacacatcctcttcaagtccctgaacttcatcctggccaggtgccctgaggctggcctagcagcccaagtgatctcacccctcctcacccctaaagctatcaacctgctacagtcctgtctaagcccacctgagagtaacctttggatggggttgggcccagcctggaccactagccgggccgactggacaggcgatgagcccctgccctaccaacccacattctcagatgactggcaacttccagagccctccagccaagcacccttaggataccaggaccctgtttcccttcggcggggaagtcataggttagggagcacctcacactttcctcaggagaagacacacaaccatgaccctcagcctggggaccccaactccaggccctccagccccaaacctgcccagccagccctgaaaatgcaagtcttgtacgagtttgaagctaggaacccacgggaactgactgtggtccagggagagaagctggaggttctggaccacagcaagcggtggtggctggtgaagaatgaggcgggacggagcggctacattccaagcaacatcctggagcccctacagccggggacccctgggacccagggccagtcaccctctcgggttccaatgcttcgacttagctcgaggcctgaagaggtcacagactggctgcaggcagagaacttctccactgccacggtgaggacacttgggtccctgacggggagccagctacttcgcataagacctggggagctacagatgctatgtccacaggaggccccacgaatcctgtcccggctggaggctgtcagaaggatgctggggataagcccttaggcaccagcttagacacctccaagaaccaggccccgctgatgcaagatggcagatctgatacccattagagccccgagaattcctcttctggatcccagtttgcagcaaaccccacaccccagctcacacagcaaaaacaatggacaggcccagaggctgaagcaaacagtgtcccttctggctgtgttggagcctccccagtaaccacctatttattttacctctttcccaaacctggagcatttatgcctaggcttgtcaagaatctgttcagtccctctccttctcaataaaagcatcttcaagcttgtca

SEQ ID NO: 2836 - protein, 594 aa, Homo sapiens; identical to SEQ ID NO: 117

SEQ ID NO: 2837 - DNA, 544 bp, Homo sapiens
agagaagctgctgtccttccaccaccagcaccggaccacctgctccaagaccagcctcctggggggaccaggcacccggccttcactggcacccagggagccgtcctcagcagcgtcaacatgtcaaggcccagcagcagagccatttacttgcaccggaaggagtactcccagaacctcacctcagagcccaccctcctgcagcacagggtggagcacgcctgtggtccacctctctgagctttctcccagtcctaggactccccctctccctgcagcacttgatgacatgcaagcaggggagtcagagagtccaggggcccgaggatgccttgcagaagctgttcgagatggatgcacagggccgggtgtggagccaagacttgatcctgcaggtcagggacggctggctgcagctgctggacattgagaccaaggaggagctggactcttaccgcctagacagcatccaggccatgaatgtggcgctcaacacatgttcctacaactccatcctgtccatcaccgtgcaggagccgggcct

SEQ ID NO: 2838 - protein, 85 aa, Homo sapiens
MTCKQGSQRVQGPEDALQKLFEMDAQGRVWSQDLILQVRDGWLQLLDIETKEELDSYRLDSIQAMNVALNTCSYNSILSITVQEP

SEQ ID NO: 2839 - DNA, 493 bp, Homo sapiens
actagcagagaagctgctgtccttccaccaccagcaccggaccacctgctccaagaccagcctcctggggggaccaggcacccggccttcactggcacccagggagccgtcctcagcagcgtcaacatgtcaaggcccagcagcagagccatttacttgcaccggaaggagtactcccagaacctcacctcagagcccaccctcctgcagcacagggtggaggtgagtacctctgcagcccccgggcagtgtccaactaaacccaagtgttcccatgtgcccaccgccctgccagaacatggacacttcacacaagtccctgccccagaagccaacagcctgtcccaaccatgtcgcatggactcagatccaacaagcctgccagagcatctgctcagtgtcagggacggggaggggtggtcagattgaacagagcaggcctggctggaggttgagcgggtgagtgtcctgtccccagacaggaagaagtagc

SEQ ID NO: 2840 - protein, 100 aa, Homo sapiens
MSRPSSRAIYLHRKEYSQNLTSEPTLLQHRVEVSTSAAPGQCPTKPKCSHVPTALPEHGHFTQVPAPEANSLSQPCRMDSDPTSLPEHLLSVRDGEGWSD

SEQ ID NO: 2841 - DNA, 476 bp, Homo sapiens
ttgccgcttctctcttctactgtcccagctgtctctgttttttaggcaactttctgtggctttttcaagagtggagatttggctggagcaggattaggaagcctcctgctacacgctttccctgagaaaaacctcctctctggaaggggcctgaggtgaaaatgattcagaaggcagctgaggagttctggaaagagccccaaagaccaggctctgaggcctccctgggccacttactaactaaatgggagaagattacttgagaaaaagcctagaacagtgcccagcatgggtgattttctcttgtaaaatggcttgaaccccaaagctatagcacaagcaagcagggtcatcagaagccactccattcttctggaagctgcagggaaatggaacccagaaaccagatgtctatgtcctaatctccagaacctatgaatggattgtctttcatggaaaaggggtatttagattgc

SEQ ID NO: 2842 - protein, 33 aa, Homo sapiens [sequence omitted]

SEQ ID NO: 2843 - DNA, 450 bp, Homo sapiens
gggcctcaatggattctgacccatggatttgttcctgagggaagaatgcatgttgcattttgccaagttgctctcagctttttcctgcctgtatgccatctttctgcaaactaccagcgctggccgcctcgcacagcgataatcagcctgtcagtcaataaactgaagatgttggtggtgtgctggggttggtggccagcagtgagagccctgagagttataaattcaagatgagaattgagatgttgccaaggcttcacagagtccctgatttactaggaaattgttccctagccttgactgctggccctgttatgcaagggactttgtgtgggctggggggatggttgaaggaaagacaaaaaataaaagaccagaagccagtgtttaggcacagtggataggacattccctaccccactgcatttggtcacctatggtctgctattt

SEQ ID NO: 2844 - protein, 39 aa, Homo sapiens
MDLFLREECMLHFAKLLSAFSCLYAIFLQTTSAGRLAQR

SEQ ID NO: 2845 - DNA, 1981 bp, Homo sapiens
gtgactaggaagacgcgcgagcggggctggccggccggcgggtgggggaggggaggcgggggaaggcggctgagtgggcctctggagtgtgtgtgtctgtgtcagtgtgtgtgtgtgtgtgtgtatgtgtgtgtctggcgcctggccagggtgatttcccataaaccacatgccccccagtcctctcttaaaaggctgtgccgagggctggccagtgaggctcggcccggggaaagtgaaagtttgcctgggtcctctcggcgccagagccgctctccgcatcccaggacagcggtgcggccctcggccggggcgcccactccgcagcagccagcgagcgagcgagcgagcgagggcggccgacgcgcccggccgggacccagctgcccgtatgaccgcgccgggcgccgccgggcgctgccctcccacgacatggctgggctccctgctgttgttggtctgtctcctggcgagcaggagtatcaccgaggaggtgtcggagtactgtagccacatgattgggagtggacacctgcagtctctgcagcggctgattgacagtcagatggagacctcgtgccaaattacatttgagtttgtagaccaggaacagttgaaagatccagtgtgctaccttaagaaggcatttctcctggtacaagacataatggaggacaccatgcgcttcagagataacacccccaatgccatcgccattgtgcagctgcaggaactctctttgaggctgaagagctgcttcaccaaggattatgaagagcatgacaaggcctgcgtccgaactttctatgagacacctctccagttgctggagaaggtcaagaatgtctttaatgaaacaaagaatctccttgacaaggactggaatattttcagcaagaactgcaacaacagctttgctgaatgctccagccaagatgtggtgaccaagcctgattgcaactgcctgtaccccaaagccatccctagcagtgacccggcctctgtctcccctcatcagcccctcgccccctccatggcccctgtggctggcttgacctgggaggactctgagggaactgagggcagctccctcttgcctggtgagcagcccctgcacacagtggatccaggcagtgccaagcagcggccacccaggagcacctgccagagctttgagccgccagagaccccagttgtcaaggacagcaccatcggtggctcaccacagcctcgcccctctgtcggggccttcaaccccgggatggaggatattcttgactctgcaatgggcactaattgggtcccagaagaagcctctggagaggccagtgagattcccgtaccccaagggacagagctttccccctccaggccaggagggggcagcatgcagacagagcccgccagacccagcaacttcctctcagcatcttctccactccctgcatcagcaaagggccaacagccggcagatgtaactggccatgagaggcagtccgagggatccttcagcccgcagctccaggagtctgtcttccacctgctggtgcccagtgtcatcctggtcttgctggccgtcggaggcctcttgttctacaggtggaggcggcggagccatcaagagcctcagagagcggattctcccttggagcaaccagagggcagccccctgactcaggatgacagacaggtggaactgccagtgtagagggaattctaagacccctcaccatcctggacacactcgtttgtcaatgtccctctgaaaatgtgacgcccagccccggacacagtactccagatgttgtctgaccagctcagagagagtacagtgggactgttaccttccttgatatggacagtattcttctatttgtgcagattaagattgcattagtttttttcttaacaactgcatcatactgttgtcatatgttgagcctgtggtctattaaaacccctagttccatttcccataaac

SEQ ID NO: 2846 - protein, 512 aa, Homo sapiens
MPPSPLLKGCAEGWPVRLGPGKVKVCLGPLGARAALRIPGQRCGPRPGRPLRSSQRASERARAADAPGRDPAARMTAPGAAGRCPPTTWLGSLLLLVCLLASRSITEEVSEYCSHMIGSGHLQSLQRLIDSQMETSCQITFEFVDQEQLKDPVCYLKKAFLLVQDIMEDTMRFRDNTPNAIAIVQLQELSLRLKSCFTKDYEEHDKACVRTFYETPLQLLEKVKNVFNETKNLLDKDWNIFSKNCNNSFAECSSQDVVTKPDCNCLYPKAIPSSDPASVSPHQPLAPSMAPVAGLTWEDSEGTEGSSLLPGEQPLHTVDPGSAKQRPPRSTCQSFEPPETPVVKDSTIGGSPQPRPSVGAFNPGMEDILDSAMGTNWVPEEASGEASEIPVPQGTELSPSRPGGGSMQTEPARPSNFLSASSPLPASAKGQQPADVTGHERQSEGSFSPQLQESVFHLLVPSVILVLLAVGGLLFYRWRRRSHQEPQRADSPLEQPEGSPLTQDDRQVELPV

SEQ ID NO: 2847 - DNA, 2750 bp, Homo sapiens
gtgactaggaagacgcgcgagcggggctggccggccggcgggtgggggaggggaggcgggggaaggcggctgagtgggcctctggagtgtgtgtgtctgtgtcagtgtgtgtgtgtgtgtgtgtatgtgtgtgtctggcgcctggccagggtgatttcccataaaccacatgccccccagtcctctcttaaaaggctgtgccgagggctggccagtgaggctcggcccggggaaagtgaaagtttgcctgggtcctctcggcgccagagccgctctccgcatcccaggacagcggtgcggccctcggccggggcgcccactccgcagcagccagcgagcgagcgagcgagcgagggcggccgacgcgcccggccgggacccagctgcccgtatgaccgcgccgggcgccgccgggcgctgccctcccacgacatggctgggctccctgctgttgttggtctgtctcctggcgagcaggagtatcaccgaggaggtgtcggagtactgtagccacatgattgggagtggacacctgcagtctctgcagcggctgattgacagtcagatggagacctcgtgccaaattacatttgagtttgtagaccaggaacagttgaaagatccagtgtgctaccttaagaaggcatttctcctggtacaagacataatggaggacaccatgcgcttcagagataacacccccaatgccatcgccattgtgcagctgcaggaactctctttgaggctgaagagctgcttcaccaaggattatgaagagcatgacaaggcctgcgtccgaactttctatgagacacctctccagttgctggagaaggtcaagaatgtctttaatgaaacaaagaatctccttgacaaggactggaatattttcagcaagaactgcaacaacagctttgctgaatgctccagccaagatgtggtgaccaagcctgattgcaactgcctgtaccccaaagccatccctagcagtgacccggcctctgtctcccctcatcagcccctcgccccctccatggcccctgtggctggcttgacctgggaggactctgagggaactgagggcagctccctcttgcctggtgagcagcccctgcacacagtggatccaggcagtgccaagcagcggccacccaggagcacctgccagagctttgagccgccagagaccccagttgtcaaggacagcaccatcggtggctcaccacagcctcgcccctctgtcggggccttcaaccccgggatggaggatattcttgactctgcaatgggcactaattgggtcccagaagaagcctctggagaggccagtgagattcccgtaccccaagggacagagctttccccctccaggccaggagggggcagcatgcagacagagcccgccagacccagcaacttcctctcagcatcttctccactccctgcatcagcaaagggccaacagccggcagatgtaactggtaccgccttgcccagggtgggccccgtgaggcccactggccaggactggaatcacaccccccagaagacagaccatccatctgccctgctcagagaccccccggagccaggctctcccaggatctcatcactgcgcccccagggcctcagcaacccctccaccctctctgctcagccacagctttccagaagccactcctcgggcagcgtgctgccccttggggagctggagggcaggaggagcaccagggatcggaggagccccgcagagccagaaggaggaccagcaagtgaaggggcagccaggcccctgccccgttttaactccgttcctttgactgacacaggccatgagaggcagtccgagggatccttcagcccgcagctccaggagtctgtcttccacctgctggtgcccagtgtcatcctggtcttgctggccgtcggaggcctcttgttctacaggtggaggcggcggagccatcaagagcctcagagagcggattctcccttggagcaaccagagggcagccccctgactcaggatgacagacaggtggaactgccagtgtagagggaattctaagacccctcaccatcctggacacactcgtttgtcaatgtccctctgaaaatgtgacgcccagccccggacacagtactccagatgttgtctgaccagctcagagagagtacagtgggactgttaccttccttgatatggacagtattcttctatttgtgcagattaagattgcattagtttttttcttaacaactgcatcatactgttgtcatatgttgagcctgtggtctattaaaacccctagttccatttcccataaacttctgtcaagccagaccatctctaccctgtacttggacaacttaacttttttaaccaaagtgcagtttatgttcacctttgttaaagccaccttgttggtttctgcccatcacctgaacctactgaagttgtgtgaaatcctaattctgtcatctccgtagccctcccagttgtgcctcctgcacattgatgagtgcctgctgttgtctttgcccatgttgttgatgtagctgtgaccctattgttcctcacccctgccccccgccaaccccagctggcccacctcttccccctcccacccaagcccacagccagcccatcaggaagccttcctggcttctccacaaccttctgactgctcttttcagtcatgctcctcctgctcttttgtatttggctaatagtatatcaatttgcactt

SEQ ID NO: 2848 - protein, 628 aa, Homo sapiens
MPPSPLLKGCAEGWPVRLGPGKVKVCLGPLGARAALRIPGQRCGPRPGRPLRSSQRASERARAADAPGRDPAARMTAPGAAGRCPPTTWLGSLLLLVCLLASRSITEEVSEYCSHMIGSGHLQSLQRLIDSQMETSCQITFEFVDQEQLKDPVCYLKKAFLLVQDIMEDTMRFRDNTPNAIAIVQLQELSLRLKSCFTKDYEEHDKACVRTFYETPLQLLEKVKNVFNETKNLLDKDWNIFSKNCNNSFAECSSQDVVTKPDCNCLYPKAIPSSDPASVSPHQPLAPSMAPVAGLTWEDSEGTEGSSLLPGEQPLHTVDPGSAKQRPPRSTCQSFEPPETPVVKDSTIGGSPQPRPSVGAFNPGMEDILDSAMGTNWVPEEASGEASEIPVPQGTELSPSRPGGGSMQTEPARPSNFLSASSPLPASAKGQQPADVTGTALPRVGPVRPTGQDWNHTPQKTDHPSALLRDPPEPGSPRISSLRPQGLSNPSTLSAQPQLSRSHSSGSVLPLGELEGRRSTRDRRSPAEPEGGPASEGAARPLPRFNSVPLTDTGHERQSEGSFSPQLQESVFHLLVPSVILVLLAVGGLLFYRWRRRSHQEPQRADSPLEQPEGSPLTQDDRQVELPV

SEQ ID NO: 2849 - DNA, 3318 bp, Homo sapiens
gtgactaggaagacgcgcgagcggggctggccggccggcgggtgggggaggggaggcgggggaaggcggctgagtgggcctctggagtgtgtgtgtctgtgtcagtgtgtgtgtgtgtgtgtgtatgtgtgtgtctggcgcctggccagggtgatttcccataaaccacatgccccccagtcctctcttaaaaggctgtgccgagggctggccagtgaggctcggcccggggaaagtgaaagtttgcctgggtcctctcggcgccagagccgctctccgcatcccaggacagcggtgcggccctcggccggggcgcccactccgcagcagccagcgagcgagcgagcgagcgagggcggccgacgcgcccggccgggacccagctgcccgtatgaccgcgccgggcgccgccgggcgctgccctcccacgacatggctgggctccctgctgttgttggtctgtctcctggcgagcaggagtatcaccgaggaggtgtcggagtactgtagccacatgattgggagtggacacctgcagtctctgcagcggctgattgacagtcagatggagacctcgtgccaaattacatttgagtttgtagaccaggaacagttgaaagatccagtgtgctaccttaagaaggcatttctcctggtacaagacataatggaggacaccatgcgcttcagagataacacccccaatgccatcgccattgtgcagctgcaggaactctctttgaggctgaagagctgcttcaccaaggattatgaagagcatgacaaggcctgcgtccgaactttctatgagacacctctccagttgctggagaaggtcaagaatgtctttaatgaaacaaagaatctccttgacaaggactggaatattttcagcaagaactgcaacaacagctttgctgaatgctccagccaaggccatgagaggcagtccgagggatccttcagcccgcagctccaggagtctgtcttccacctgctggtgcccagtgtcatcctggtcttgctggccgtcggaggcctcttgttctacaggtggaggcggcggagccatcaagagcctcagagagcggattctcccttggagcaaccagagggcagccccctgactcaggatgacagacaggtggaactgccagtgtagagggaattctaagctggacgcacagaacagtctctccgtgggaggagacattatggggcgtccaccaccacccctccctggccatcctcctggaatgtggtctgccctccaccagagctcctgcctgccaggactggaccagagcagccaggctggggcccctctgtctcaacccgcagacccttgactgaatgagagaggccagaggatgctccccatgctgccactatttattgtgagccctggaggctcccatgtgcttgaggaaggctggtgagcccggctcaggaccctcttccctcaggggctgcaccctcctctcactcccttccatgccggaacccaggccagggacccaccggcctgtggtttgtgggaaagcagggtggacgctgaggagtgaaagaaccctgcacccagagggcctgcctggtgccaaggtatcccagcctggacaggcatggacctgtctccagagagaggagcctgaagttcgtggggcgggacagcgtcggcctgatttcccgtaaaggtgtgcagcctgagagacgggaagaggaggcctctggacctgctggtctgcactgacagcctgaagggtctacaccctcggctcacctaagtgccctgtgctggttgccaggcgcagaggggaggccagccctgccctcaggacctgcctgacctgccagtgatgccaagagggggatcaagcactggcctctgcccctcctccttccagcacctgccagagcttctccaggaggccaagcagaggctcccctcatgaaggaagccattgcactgtgaacactgtacctgcctgctgaacagcctgcccccgtccatccatgagccagcatccgtccgtcctccactctccagcctctccccagcctcctgcactgagctggcctcaccagtcgactgagggagcccctcagccctgaccttctcctgacctggcctttgactccccggagtggagtggggtgggagaacctcctgggccgccagccagagccggtctttaggctgtgttgttcgcccaggtttctgcatcttgcactttgacattcccaagagggaagggactagtgggagagagcaagggaggggagggcacagacagagaggctacagggcgagctctgactgaagatgggcctttgaaatataggtatgcacctgaggttgggggagggtctgcactcccaaaccccagcgcagtgtcctttccctgctgccgacaggaacctggggctgaacaggttatccctgtcaggagccctggactgggctgcatctcagccccacctgcatggtatccagctcccatccacttctcacccttctttcctcctgaccttggtcagcagtgatgacctccaactctcacccaccccctctaccatcacctctaaccaggcaagccagggtgggagagcaatcaggagagccaggcctcagcttccaatgcctggagggcctccactttgtggccagcctgtggtggtggctctgaggcctaggcaacgagcgacagggctgccagttgcccctgggttcctttgtgctgctgtgtgcctcctctcctgccgccctttgtcctccgctaagagaccctgccctacctggccgctgggccccgtgactttcccttcctgcccaggaaagtgagggtcggctggccccaccttccctgtcctgatgccgacagcttagggaagggcagtgaacttgcatatggggcttagccttctagtcacagcctctatatttgatgctagaaaacacatatttttaaatggaagaaaaataaaaaggcattcccccttcatccccctaccttaaacatataatattttaaaggtcaaaaaagcaatccaacccactgcagaagctctttttgagcacttggtggcatcagagcaggaggagccccagagccacctctggtgtccccccaggctacctgctcaggaaccccttctgttctctgagaagtcaagagaggacattggctcacgcactgtgagattttgtttttatacttggaagtggtgaattattttatataaagtcatttaaatatctatttaaaagataggaagctgcttatatatttaataataaaagaagtgcacaagctgcca

SEQ ID NO: 2850 - protein, 330 aa, Homo sapiens
MPPSPLLKGCAEGWPVRLGPGKVKVCLGPLGARAALRIPGQRCGPRPGRPLRSSQRASERARAADAPGRDPAARMTAPGAAGRCPPTTWLGSLLLLVCLLASRSITEEVSEYCSHMIGSGHLQSLQRLIDSQMETSCQITFEFVDQEQLKDPVCYLKKAFLLVQDIMEDTMRFRDNTPNAIAIVQLQELSLRLKSCFTKDYEEHDKACVRTFYETPLQLLEKVKNVFNETKNLLDKDWNIFSKNCNNSFAECSSQGHERQSEGSFSPQLQESVFHLLVPSVILVLLAVGGLLFYRWRRRSHQEPQRADSPLEQPEGSPLTQDDRQVELPV

SEQ ID NO: 2851 - DNA, 4212 bp, Homo sapiens
gtgactaggaagacgcgcgagcggggctggccggccggcgggtgggggaggggaggcgggggaaggcggctgagtgggcctctggagtgtgtgtgtctgtgtcagtgtgtgtgtgtgtgtgtgtatgtgtgtgtctggcgcctggccagggtgatttcccataaaccacatgccccccagtcctctcttaaaaggctgtgccgagggctggccagtgaggctcggcccggggaaagtgaaagtttgcctgggtcctctcggcgccagagccgctctccgcatcccaggacagcggtgcggccctcggccggggcgcccactccgcagcagccagcgagcgagcgagcgagcgagggcggccgacgcgcccggccgggacccagctgcccgtatgaccgcgccgggcgccgccgggcgctgccctcccacgacatggctgggctccctgctgttgttggtctgtctcctggcgagcaggagtatcaccgaggaggtgtcggagtactgtagccacatgattgggagtggacacctgcagtctctgcagcggctgattgacagtcagatggagacctcgtgccaaattacatttgagtttgtagaccaggaacagttgaaagatccagtgtgctaccttaagaaggcatttctcctggtacaagacataatggaggacaccatgcgcttcagagataacacccccaatgccatcgccattgtgcagctgcaggaactctctttgaggctgaagagctgcttcaccaaggattatgaagagcatgacaaggcctgcgtccgaactttctatgagacacctctccagttgctggagaaggtcaagaatgtctttaatgaaacaaagaatctccttgacaaggactggaatattttcagcaagaactgcaacaacagctttgctgaatgctccagccaagatgtggtgaccaagcctgattgcaactgcctgtaccccaaagccatccctagcagtgacccggcctctgtctcccctcatcagcccctcgccccctccatggcccctgtggctggcttgacctgggaggactctgagggaactgagggcagctccctcttgcctggtgagcagcccctgcacacagtggatccaggcagtgccaagcagcggccacccaggagcacctgccagagctttgagccgccagagaccccagttgtcaaggacagcaccatcggtggctcaccacagcctcgcccctctgtcggggccttcaaccccgggatggaggatattcttgactctgcaatgggcactaattgggtcccagaagaagcctctggagaggccagtgagattcccgtaccccaagggacagagctttccccctccaggccaggagggggcagcatgcagacagagcccgccagacccagcaacttcctctcagcatcttctccactccctgcatcagcaaagggccaacagccggcagatgtaactggtaccgccttgcccagggtgggccccgtgaggcccactggccaggactggaatcacaccccccagaagacagaccatccatctgccctgctcagagaccccccggagccaggctctcccaggatctcatcactgcgcccccagggcctcagcaacccctccaccctctctgctcagccacagctttccagaagccactcctcgggcagcgtgctgccccttggggagctggagggcaggaggagcaccagggatcggaggagccccgcagagccagaaggaggaccagcaagtgaaggggcagccaggcccctgccccgttttaactccgttcctttgactgacacaggccatgagaggcagtccgagggatccttcagcccgcagctccaggagtctgtcttccacctgctggtgcccagtgtcatcctggtcttgctggccgtcggaggcctcttgttctacaggtggaggcggcggagccatcaagagcctcagagagcggattctcccttggagcaaccagagggcagccccctgactcaggatgacagacaggtggaactgccagtgtagagggaattctaagctggacgcacagaacagtctctccgtgggaggagacattatggggcgtccaccaccacccctccctggccatcctcctggaatgtggtctgccctccaccagagctcctgcctgccaggactggaccagagcagccaggctggggcccctctgtctcaacccgcagacccttgactgaatgagagaggccagaggatgctccccatgctgccactatttattgtgagccctggaggctcccatgtgcttgaggaaggctggtgagcccggctcaggaccctcttccctcaggggctgcaccctcctctcactcccttccatgccggaacccaggccagggacccaccggcctgtggtttgtgggaaagcagggtggacgctgaggagtgaaagaaccctgcacccagagggcctgcctggtgccaaggtatcccagcctggacaggcatggacctgtctccagagagaggagcctgaagttcgtggggcgggacagcgtcggcctgatttcccgtaaaggtgtgcagcctgagagacgggaagaggaggcctctggacctgctggtctgcactgacagcctgaagggtctacaccctcggctcacctaagtgccctgtgctggttgccaggcgcagaggggaggccagccctgccctcaggacctgcctgacctgccagtgatgccaagagggggatcaagcactggcctctgcccctcctccttccagcacctgccagagcttctccaggaggccaagcagaggctcccctcatgaaggaagccattgcactgtgaacactgtacctgcctgctgaacagcctgcccccgtccatccatgagccagcatccgtccgtcctccactctccagcctctccccagcctcctgcactgagctggcctcaccagtcgactgagggagcccctcagccctgaccttctcctgacctggcctttgactccccggagtggagtggggtgggagaacctcctgggccgccagccagagccggtctttaggctgtgttgttcgcccaggtttctgcatcttgcactttgacattcccaagagggaagggactagtgggagagagcaagggaggggagggcacagacagagaggctacagggcgagctctgactgaagatgggcctttgaaatataggtatgcacctgaggttgggggagggtctgcactcccaaaccccagcgcagtgtcctttccctgctgccgacaggaacctggggctgaacaggttatccctgtcaggagccctggactgggctgcatctcagccccacctgcatggtatccagctcccatccacttctcacccttctttcctcctgaccttggtcagcagtgatgacctccaactctcacccaccccctctaccatcacctctaaccaggcaagccagggtgggagagcaatcaggagagccaggcctcagcttccaatgcctggagggcctccactttgtggccagcctgtggtggtggctctgaggcctaggcaacgagcgacagggctgccagttgcccctgggttcctttgtgctgctgtgtgcctcctctcctgccgccctttgtcctccgctaagagaccctgccctacctggccgctgggccccgtgactttcccttcctgcccaggaaagtgagggtcggctggccccaccttccctgtcctgatgccgacagcttagggaagggcagtgaacttgcatatggggcttagccttctagtcacagcctctatatttgatgctagaaaacacatatttttaaatggaagaaaaataaaaaggcattcccccttcatccccctaccttaaacatataatattttaaaggtcaaaaaagcaatccaacccactgcagaagctctttttgagcacttggtggcatcagagcaggaggagccccagagccacctctggtgtccccccaggctacctgctcaggaaccccttctgttctctgagaagtcaagagaggacattggctcacgcactgtgagattttgtttttatacttggaagtggtgaattattttatataaagtcatttaaatatctatttaaaagataggaagctgcttatatatttaataataaaagaagtgcacaagctgcca

SEQ ID NO: 2852 - protein, 628 aa, Homo sapiens; identical to SEQ ID NO: 2848

SEQ ID NO: 2853 - DNA, 3864 bp, Homo sapiens
gtgactaggaagacgcgcgagcggggctggccggccggcgggtgggggaggggaggcgggggaaggcggctgagtgggcctctggagtgtgtgtgtctgtgtcagtgtgtgtgtgtgtgtgtgtatgtgtgtgtctggcgcctggccagggtgatttcccataaaccacatgccccccagtcctctcttaaaaggctgtgccgagggctggccagtgaggctcggcccggggaaagtgaaagtttgcctgggtcctctcggcgccagagccgctctccgcatcccaggacagcggtgcggccctcggccggggcgcccactccgcagcagccagcgagcgagcgagcgagcgagggcggccgacgcgcccggccgggacccagctgcccgtatgaccgcgccgggcgccgccgggcgctgccctcccacgacatggctgggctccctgctgttgttggtctgtctcctggcgagcaggagtatcaccgaggaggtgtcggagtactgtagccacatgattgggagtggacacctgcagtctctgcagcggctgattgacagtcagatggagacctcgtgccaaattacatttgagtttgtagaccaggaacagttgaaagatccagtgtgctaccttaagaaggcatttctcctggtacaagacataatggaggacaccatgcgcttcagagataacacccccaatgccatcgccattgtgcagctgcaggaactctctttgaggctgaagagctgcttcaccaaggattatgaagagcatgacaaggcctgcgtccgaactttctatgagacacctctccagttgctggagaaggtcaagaatgtctttaatgaaacaaagaatctccttgacaaggactggaatattttcagcaagaactgcaacaacagctttgctgaatgctccagccaagatgtggtgaccaagcctgattgcaactgcctgtaccccaaagccatccctagcagtgacccggcctctgtctcccctcatcagcccctcgccccctccatggcccctgtggctggcttgacctgggaggactctgagggaactgagggcagctccctcttgcctggtgagcagcccctgcacacagtggatccaggcagtgccaagcagcggccacccaggagcacctgccagagctttgagccgccagagaccccagttgtcaaggacagcaccatcggtggctcaccacagcctcgcccctctgtcggggccttcaaccccgggatggaggatattcttgactctgcaatgggcactaattgggtcccagaagaagcctctggagaggccagtgagattcccgtaccccaagggacagagctttccccctccaggccaggagggggcagcatgcagacagagcccgccagacccagcaacttcctctcagcatcttctccactccctgcatcagcaaagggccaacagccggcagatgtaactggccatgagaggcagtccgagggatccttcagcccgcagctccaggagtctgtcttccacctgctggtgcccagtgtcatcctggtcttgctggccgtcggaggcctcttgttctacaggtggaggcggcggagccatcaagagcctcagagagcggattctcccttggagcaaccagagggcagccccctgactcaggatgacagacaggtggaactgccagtgtagagggaattctaagctggacgcacagaacagtctctccgtgggaggagacattatggggcgtccaccaccacccctccctggccatcctcctggaatgtggtctgccctccaccagagctcctgcctgccaggactggaccagagcagccaggctggggcccctctgtctcaacccgcagacccttgactgaatgagagaggccagaggatgctccccatgctgccactatttattgtgagccctggaggctcccatgtgcttgaggaaggctggtgagcccggctcaggaccctcttccctcaggggctgcaccctcctctcactcccttccatgccggaacccaggccagggacccaccggcctgtggtttgtgggaaagcagggtggacgctgaggagtgaaagaaccctgcacccagagggcctgcctggtgccaaggtatcccagcctggacaggcatggacctgtctccagagagaggagcctgaagttcgtggggcgggacagcgtcggcctgatttcccgtaaaggtgtgcagcctgagagacgggaagaggaggcctctggacctgctggtctgcactgacagcctgaagggtctacaccctcggctcacctaagtgccctgtgctggttgccaggcgcagaggggaggccagccctgccctcaggacctgcctgacctgccagtgatgccaagagggggatcaagcactggcctctgcccctcctccttccagcacctgccagagcttctccaggaggccaagcagaggctcccctcatgaaggaagccattgcactgtgaacactgtacctgcctgctgaacagcctgcccccgtccatccatgagccagcatccgtccgtcctccactctccagcctctccccagcctcctgcactgagctggcctcaccagtcgactgagggagcccctcagccctgaccttctcctgacctggcctttgactccccggagtggagtggggtgggagaacctcctgggccgccagccagagccggtctttaggctgtgttgttcgcccaggtttctgcatcttgcactttgacattcccaagagggaagggactagtgggagagagcaagggaggggagggcacagacagagaggctacagggcgagctctgactgaagatgggcctttgaaatataggtatgcacctgaggttgggggagggtctgcactcccaaaccccagcgcagtgtcctttccctgctgccgacaggaacctggggctgaacaggttatccctgtcaggagccctggactgggctgcatctcagccccacctgcatggtatccagctcccatccacttctcacccttctttcctcctgaccttggtcagcagtgatgacctccaactctcacccaccccctctaccatcacctctaaccaggcaagccagggtgggagagcaatcaggagagccaggcctcagcttccaatgcctggagggcctccactttgtggccagcctgtggtggtggctctgaggcctaggcaacgagcgacagggctgccagttgcccctgggttcctttgtgctgctgtgtgcctcctctcctgccgccctttgtcctccgctaagagaccctgccctacctggccgctgggccccgtgactttcccttcctgcccaggaaagtgagggtcggctggccccaccttccctgtcctgatgccgacagcttagggaagggcagtgaacttgcatatggggcttagccttctagtcacagcctctatatttgatgctagaaaacacatatttttaaatggaagaaaaataaaaaggcattcccccttcatccccctaccttaaacatataatattttaaaggtcaaaaaagcaatccaacccactgcagaagctctttttgagcacttggtggcatcagagcaggaggagccccagagccacctctggtgtccccccaggctacctgctcaggaaccccttctgttctctgagaagtcaagagaggacattggctcacgcactgtgagattttgtttttatacttggaagtggtgaattattttatataaagtcatttaaatatctatttaaaagataggaagctgcttatatatttaataataaaagaagtgcacaagctgcca

SEQ ID NO: 2854 - protein, 512 aa, Homo sapiens; identical to SEQ ID NO: 2846

SEQ ID NO: 2855 - DNA, 1588 bp, Homo sapiens
aggctcggcccggggaaagtgaaagtttgcctgggtcctctcggcgccagagccgctctccgcatcccaggacagcggtgcggccctcggccggggcgcccactccgcagcagccagcgagcgagcgagcgagcgagggcggccgacgcgcccggccgggacccagctgcccgtatgaccgcgccgggcgccgccgggcgctgccctcccacgattgacagtcagatggagacctcgtgccaaattacatttgagtttgtagaccaggaacagttgaaagatccagtgtgctaccttaagaaggcatttctcctggtacaagacataatggaggacaccatgcgcttcagagataacacccccaatgccatcgccattgtgcagctgcaggaactctctttgaggctgaagagctgcttcaccaaggattatgaagagcatgacaaggcctgcgtccgaactttctatgagacacctctccagttgctggagaaggtcaagaatgtctttaatgaaacaaagaatctccttgacaaggactggaatattttcagcaagaactgcaacaacagctttgctgaatgctccagccaagatgtggtgaccaagcctgattgcaactgcctgtaccccaaagccatccctagcagtgacccggcctctgtctcccctcatcagcccctcgccccctccatggcccctgtggctggcttgacctgggaggactctgagggaactgagggcagctccctcttgcctggtgagcagcccctgcacacagtggatccaggcagtgccaagcagcggccacccaggagcacctgccagagctttgagccgccagagaccccagttgtcaaggacagcaccatcggtggctcaccacagcctcgcccctctgtcggggccttcaaccccgggatggaggatattcttgactctgcaatgggcactaattgggtcccagaagaagcctctggagaggccagtgagattcccgtaccccaagggacagagctttccccctccaggccaggagggggcagcatgcagacagagcccgccagacccagcaacttcctctcagcatcttctccactccctgcatcagcaaagggccaacagccggcagatgtaactggtaccgccttgcccagggtgggccccgtgaggcccactggccaggactggaatcacaccccccagaagacagaccatccatctgccctgctcagagaccccccggagccaggctctcccaggatctcatcactgcgcccccagggcctcagcaacccctccaccctctctgctcagccacagctttccagaagccactcctcgggcagcgtgctgccccttggggagctggagggcaggaggagcaccagggatcggaggagccccgcagagccagaaggaggaccagcaagtgaaggggcagccaggcccctgccccgttttaactccgttcctttgactgacacaggccatgagaggcagtccgagggatccttcagcccgcagctccaggagtctgtcttccacctgctggtgcccagtgtcatcctggtcttgctggccgtcg

SEQ ID NO: 2856 - protein, 470 aa, Homo sapiens
MTAPGAAGRCPPTIDSQMETSCQITFEFVDQEQLKDPVCYLKKAFLLVQDIMEDTMRFRDNTPNAIAIVQLQELSLRLKSCFTKDYEEHDKACVRTFYETPLQLLEKVKNVFNETKNLLDKDWNIFSKNCNNSFAECSSQDVVTKPDCNCLYPKAIPSSDPASVSPHQPLAPSMAPVAGLTWEDSEGTEGSSLLPGEQPLHTVDPGSAKQRPPRSTCQSFEPPETPVVKDSTIGGSPQPRPSVGAFNPGMEDILDSAMGTNWVPEEASGEASEIPVPQGTELSPSRPGGGSMQTEPARPSNFLSASSPLPASAKGQQPADVTGTALPRVGPVRPTGQDWNHTPQKTDHPSALLRDPPEPGSPRISSLRPQGLSNPSTLSAQPQLSRSHSSGSVLPLGELEGRRSTRDRRSPAEPEGGPASEGAARPLPRFNSVPLTDTGHERQSEGSFSPQLQESVFHLLVPSVILVLLA

SEQ ID NO: 2857 - DNA, 1092 bp, Homo sapiens
cagctggacgcacagaacagtctctccgtgggaggagacattatggggcgtccaccaccacccctccctggccatcctcctggaatgtggtctgccctccaccagagctcctgcctgccaggactggaccagagcagccaggctggggcccctctgtctcaacccgcagacccttgactgaatgagagaggccagaggatgctccccatgctgccactatttattgtgagccctggaggctcccatgtgcttgaggaaggctggtgagcccggctcaggaccctcttccctcaggggctgcaccctcctctcactcccttccatgccggaacccaggccagggacccaccggcctgtggtttgtgggaaagcagggtggacgctgaggagtgaaagaaccctgcacccagagggcctgcctggtgccaaggtatcccagcctggacaggcatggacctgtctccagagagaggagcctgaagttcgtggggcgggacagcgtcggcctgatttcccgtaaaggtgtgcagcctgagagacgggaagaggaggcctctggacctgctggtctgcactgacagcctgaagggtctacaccctcggctcacctaagtgccctgtgctggttgccaggcgcagaggggaggccagccctgccctcaggacctgcctgacctgccagtgatgccaagagggggatcaagcactggcctctgcccctcctccttccagcacctgccagagcttctccaggaggccaagcagaggctccccttcatccccctaccttaaacatataatattttaaaggtcaaaaaagcaatccaacccactgcagaagctctttttgagcacttggtggcatcagagcaggaggagccccagagccacctctggtgtccccccaggctacctgctcaggaaccccttctgttctctgagaagtcaagagaggacattggctcacgcactgtgagattttgtttttatacttggaagtggtgaattattttatataaagtcatttaaatatctatttaaaagataggaagctgcttatatatttaataataaaagaagtgcacaagctgc

SEQ ID NO: 2858 - protein, 35 aa, Homo sapiens
MPRGGSSTGLCPSSFQHLPELLQEAKQRLPFIPLP

SEQ ID NO: 2859 - DNA, 1752 bp, Homo sapiens
ggaggctcccatgtgcttgaggaaggctggtgagcccggctcaggaccctcttccctcaggggctgcaccctcctctcactcccttccatgccggaacccaggccagggacccaccggcctgtggtttgtgggaaagcagggtggacgctgaggagtgaaagaaccctgcacccagagggcctgcctggtgccaaggtatcccagcctggacaggcatggacctgtctccagagagaggagcctgaagttcgtggggcgggacagcgtcggcctgatttcccgtaaaggtgtgcagcctgagagacgggaagaggaggcctctggacctgctggtctgcactgacagcctgaagggtctacaccctcggctcacctaagtgccctgtgctggttgccaggcgcagaggggaggccagccctgccctcaggacctgcctgacctgccagtgatgccaagagggggatcaagcactggcctctgcccctcctccttccagcacctgccagagcttctccaggaggccaagcagaggctcccctcatgaaggaagccattgcactgtgaacactgtacctgcctgctgaacagcctgcccccgtccatccatgagccagcatccgtccgtcctccactctccagcctctccccagcctcctgcactgagctggcctcaccagtcgactgagggagcccctcagccctgaccttctcctgacctggcctttgactccccggagtggagtggggtgggagaacctcctgggccgccagccagagccggtctttaggctgtgttgttcgcccaggtttctgcatcttgcactttgactttccctgctgccgacaggaacctggggctgaacaggttatccctgtcaggagccctggactgggctgcatctcagccccacctgcatggtatccagctcccatccacttctcacccttctttcctcctgaccttggtcagcagtgatgacctccaactctcacccaccccctctaccatcacctctaaccaggcaagccagggtgggagagcaatcaggagagccaggcctcagcttccaatgcctggagggcctccactttgtggccagcctgtggtggtggctctgaggcctaggcaacgagcgacagggctgccagttgcccctgggttcctttgtgctgctgtgtgcctcctctcctgccgccctttgtcctccgctaagagaccctgccctacctggccgctgggccccgtgactttcccttcctgcccaggaaagtgagggtcggctggccccaccttccctgtcctgatgccgacagcttagggaagggcagtgaacttgcatatggggcttagccttctagtcacagcctctatatttgatgctagaaaacacatatttttaaatggaagaaaaataaaaaggcattcccccttcatccccctaccttaaacatataatattttaaaggtcaaaaaagcaatccaacccactgcagaagctctttttgagcacttggtggcatcagagcaggaggagccccagagccacctctggtgtccccccaggctacctgctcaggaaccccttctgttctctgagaagtcaagagaggacattggctcacgcactgtgagattttgtttttatacttggaagtggtgaattattttatataaagtcatttaaatatctatttaaaagataggaagctgcttatatatttaataataaaagaagtgcacaagctgcca

SEQ ID NO: 2860 - protein, 91 aa, Homo sapiens [sequence omitted]

SEQ ID NO: 2861 - DNA, 440 bp, Homo sapiens
tttcccttcctgcccaggaaatgaacttgcatatggggcttagccttctagtcacagcctctatatttgatgctagaaaacacatatttttaaatggaagaaaaataaaaaggcattcccccttcatccccctaccttaaacatataatattttaaaggtcaaaaaagcaatccaacccactgcagaagctctttttgagcacttggtggcatcagagcaggaggagccccagagccacctctggtgtccccccaggctacctgctcaggaaccccttctgttctctgagaagtcaagagaggacattggctcacgcactgtgagattttgtttttatacttggaagtggtgaattattttatataaagtcatttaaatatctatttaaaagataggaagctgcttatatatttaataataaaagaagtgcacaagctgc

SEQ ID NO: 2862 - protein, 39 aa, Homo sapiens
MNLHMGLSLLVTASIFDARKHIFLNGRKIKRHSPFIPLP

SEQ ID NO: 2863 - DNA, 3346 bp, Homo sapiens; identical to SEQ ID NO: 126

SEQ ID NO: 2864 - protein, 575 aa, Homo sapiens; identical to SEQ ID NO: 127

SEQ ID NO: 2865 - DNA, 7084 bp, Homo sapiens
gctcggtggccgagtcggtcccgcggccggcggatcgggcgcgcgcgtcgggggtcgtccggctgccaggcagggcgagcacgcgccgggaggccttggaggcgtagggggcgggggtacggctcgcctgctcgcaagatggcggacgaggacggggaagggattcatccctcagcccctcacaggaacggaggtggcggcggcggcggggggtctgggctccactgcgccgggaacggcggcgggggaggcggcggcccgcgggtcgtgcgcatcgtcaagtccgagtccggctacggcttcaacgtgcggggccaagaaccacgtgaatgttgagggggcgacacacaagcaggtggtggacctgattcgagcaggcgagaaggaattgatcttgacagtgttatctgtacctcctcatgaggcagataacctagatcccagtgacgactcgttgggacaatcattttatgattacacagaaaagcaagcagtgcccatatcggtccccagatacaaacatgtggagcagaatggtgagaagtttgtggtatataatgtttacatggcagggaggcagctgtgttctaagcggtaccgggagtttgctatcctacaccagaacctgaagagagagtttgccaactttacatttcctcgactcccagggaagtggccattttcattatcagaacaacaattagatgcccgacgtcggggattggaagaatatctagaaaaagtgtgttcaatacgagtaattggtgagagtgacatcatgcaggaattcctatcagaatccgatgagaactacaatggtgtgtccgacgtagagctgagagtagcattaccagatggaacaacggttacagtcagggttaaaaagaacagtactacagaccaagtatatcaggctatcgcagcaaaggttggcatggacagtacgacagtgaattactttgccttatttgaagtgatcagtcactcctttgtacgtaaattggcacctaatgagtttcctcacaaactctacattcagaattatacatcagctgtgccaggcacctgcttgaccattcgaaagtggctttttacaacagaagaagaaattctcttaaatgacaatgaccttgctgttacctacttctttcatcaggcagtcgatgatgtgaagaaaggttacatcaaagcagaagaaaagtcctatcaattacagaagctatacgaacaaagaaaaatggtcatgtacctcaacatgctaaggacttgtgagggctacaatgaaatcatctttccccactgtgcctgtgactccaggaggaaggggcacgttatcacagccatcagcatcacgcactttaaactgcatgcctgcactgaagaaggacagctggagaaccaggtaattgcatttgaatgggatgagatgcagcgatgggacacagatgaagaagggatggccttctgtttcgaatatgcacgaggagagaagaagccccgatgggttaaaatcttcacgccatatttcaattacatgcatgagtgcttcgagagggtgttctgcgagctcaagtggagaaaagaggaatattagttagagactgattatctcatgtgagccaggacattcttccagcaaggttggcctctggatggtgaacgggctgtgcaaaaaagccctgcttcttcccttgtctagagggtggacattggctacaggctcttccatctctcatgacttcatggaccctcctctgccagttttttaaatcagatcaccctccatgttgttcctgacccacaggggaagctgtcctcagttgtagccgtcttgactggatgagtcctggcagtctttctaggcgaaccaagaatgtttgtgtgagggaaggtgtttgctgttgctttactgctgtctgtatgtgccagtgctggaacagaatttggaagattctgaataattagttacttattctcaaagaaaatctttgaaagaatcaggaggtcaagtcaagaacatgaaaatttatattttagtacagtagaaagaacattgggctctgggaattttatctgggttttctcctggcttttttttccctctgtgtaattttgggtaaatcagcctccctagctttcagttttctcttctgtgaaacaggaagactgaaccacgtaattaatatccaaggtcccttccggctctaaaaggctatgattctagatgagaagttatatcaagaaagatgtggccaatcagattgagtcatccaggcatacctttttagcttctgtttgtggagttgtctccagataagaggagatgtgccttcccaataactctttttttttttcctttcagaacattttccagatggcgaggtcacagcagagagatgtggccacctagcctttccttatccccttcccttcccttcacccccatcctcttactcctttcatgtcccatttcagacagagtaaccattaacaaaaaagaagagaaaaagttaaagtcgttatattcaaaagccctaaactaaatattattaataaccccctctgaatttcatgtctctggaattgaggtggtagtgaacagcagatcggtcagcaccagaagtcaactgagttaaggcaggaaaagaaataagcccaaccaacttgccaaaggtatctttgtcctttcacctgggcctcataccaacagcctctccttgtactatatttttaaaactggaactatgaacttcatccatttgcactgttcagacatatatatgtatgtatgtaaaaattatatatacacaaattagctgcacgtatatacatatatatatttctttttaaatttcatattgatggcagtaccttttttagcttgtgtttttacacacctttcactagaatccatgacctccctcgtgctctctttcttttgaaacaaactttaaaaaggaaaaaaaagcattttacagggaaaaatacctctcctcatgaaggacttgaaaagtttacaacctgcttggatttttgcccctttttttgtattgagtatagattccggctcatgggttgccatagagtctaggaacaaggagtatagtttctttatcttccaagagggtgctggggaggagaaagaggtgtgtttctcaaggttaacaggctgtagttctgcagggagagcctgaagtcctggtatgggctcttgattctgtgacaatttttttgatccatctatttctctcactcctggctttctagccacattctgcacctccttcctgctttcctagagcctcggtatgctttccctcaaccgaccctggctcaggaggttgatgccatgggaacctgaacctgaaacacttcatggtagtaatttcctgttttccttgccttttttttttttttttttttttttttctgagacagggtcttactctgtcgcccagactggaatgtggtggcatgaacatagctcactgttaccttgaattctgggctcaggtgatccttccgcctcaccctcctgagtagctgggactacaggtgtgcaccaccacacctggctaattcttcttaaaatttttttgtagagacagggtctcactatgttgcccaggctggtctcaaactcctggcctcaggtgatcctcttgtctcagcctcccaaagtgctgggattacaggcatgagccactgtgtccttccctgccttttttgcagcagggatagtactcaggaccagagttaagctgataccttaggcacacaggttggacttacatagaggaaagaaagcaagaaatgccctatgtacatgaggttttacctcctccattcctgaccaataaccacccataactacggcattctctgtgacttccttaaacagcagtgatgggaagggatccaatagtatcttcaaggccttggggaaacttgcagtgggtcagtggtctgtgccaaccaaacgatagccccatccaagccagctgagaacctaggaaggagtagtaggaatatggttgattagattggatctcccaagttttaattgaaaggagactgaacgaaaacctttctgctttctgtccgttaaagagctcctcatctgatcttgcagctagaccctttgagacttaagagctgcatcccaggatcagaagccagggctaattggggtaggacaatattcccagcccctaagctctgtagataatgcataagaagcaccaagtcaggctcagatgcaactaaaacacatctttgagccttttctttttcccttctcccctttctaaacaaaaaccttcctaggatggcatcttttgctctaactgggagacagtcataattggttgtagtcaattctactaagcagtgttggggtggttggaaagtctcttttttgtaatttgtttttgcaaatcattgtgaggccactttttctttctttctttctttctttctttctttctttctttctttcgttctttcgttctttcgttctttctttctttctttctttctctttctttcttttgctttccttctttcatctcttttttgtaatttgttgttgcaaatcattgtgaggccacttttctttccccttccttccttcctttttttctgttttttttttttttttttcccagagtcttgctctgtcgcccaggttggagtgcagtggcacgatctcggctcactgcaccctctgcctcttgggttcaagcgattctcctgcctcagcctcccaagtagctgggattacaggcatacaccaccacgccccactaattttttgtatttttggtagggcggggtttcaccatgatggccaggttggttttgaactcctgacctcaagtaatctgcccacctcggcctcccaaagtgctaggattacaggagtgagccactgcgcctggcccacttttctttctttccttcttattttgttatgctggcagccatttgcccctgcatggtatgggatcaaagaggacagcctttcctccctcaccttctccaaatctaggtgaaatcacagagtacaaaacgtgagaatgctgaatgtgtaaagttgcagagggatccctaatttgaagactttgacacagaactaacttcttttgacttaaatgaatttaaaatgagccaaaggaccctgaaaagaagacatgttgatttcccactcctagatgctaaagagacttggcaccagctttgttcaaactgtaaaaatagcaatttgcccctactcgctcagagtgggacagtagtgaacagagctgggattccatgcgacagcttgaatgctgaccttcagacatgagacatagggatttggaggccccttagaatgggtagatggtgttatgttccctttctggcatagcattcacttggtgctttggagattaggtgagggccctataggtagttggcctgttggcagaatttatttaggaacagcccttttgaaagtgtcccagtaacaacgcacccagctgcagcaaggaggtggggaaggagggcaccccaaaggacagcgccttcttctcttccacccatgcacggccttgggtgatggaggcgggttccctgtggctgcgtggatcccataggatcaagcccttctttgcatgaagcagtgttgtgactcttctctctccccttcctctgcacttcctttctgtaatccctactgttcttcttagtcccagcttctgcccagggaggcttctacccagacttcttttgcaatttgtccctgggaagagggggtctcccagtgcccccagcttcatcccagcagaaccagcaggatcctcctggtctctcactggccttcctccacacttggtttctatcctcaggggtagaagctcagagctttttatggcccaggagaaaatgtagaccctgagaaacctgtccctgcagaaaggttcccttgggccatgctttgggccctctgctctttatatgtttattctattctccatttttccaccccgtccttaccctaggcctaaacacaggtacagatatgtgcatgctcagggcagctcctaggcctggactgagctctcaggggggaattagataaatattccaacatcctcatgcctggcccatttagtttcatcctttagttacccaggccagtagctttgggttatcccttcctgtagctccaaacccagcacttggagcagcaaaatagggcactgacaggagatgaaactctctcctatctcagaatttgccaacttctgggctgggctcctaggaggtagttttcttgaaggggactgcatcctagttgacctgaattttccagaccaggagggactgctgtgctctcccttctcgccatcatactgtttggctagattcattcagcagtagaagctgtttgatctgttgaccccagcatactgctgtttcttcaccagcttcattgtgtcacagtagcttcctttgggaggatgatgtgatagaacactcagagagagggagggagaagagagatagtgggtatgcttctctagctccccatcttccaggtccacctcttgacttcctgttcccctaaacctgagcacatcacgccaggcctctttgctgccaggacagcatcagctcactcctcagcaataatctagggtatgtgggaaggtcagggctgtggtaaggaatagaatcaaagaggggagtgatacggggtgggggcacttggccgcctgctaaacttggacattaattttatatcatgacccccttttaagccagtgagctgggcttcagtttttcccaggccatgcacatttaatttatttcagagaaactctaattgtattttcactgcagtatcttgtattttttatttgtgatttaagaaatgtgaagagaaaatacacagacacaataatggctaacattgtttctttcattccttgttctagagctaaccactctaaaattgtttggtaatgtcacttagtgtaattaattgtaacatattcttttaaataaattgatttattgatcaaacacttctttggtt

SEQ ID NO: 2866 - protein, 342 aa, Homo sapiens
MAGRQLCSKRYREFAILHQNLKREFANFTFPRLPGKWPFSLSEQQLDARRRGLEEYLEKVCSIRVIGESDIMQEFLSESDENYNGVSDVELRVALPDGTTVTVRVKKNSTTDQVYQAIAAKVGMDSTTVNYFALFEVISHSFVRKLAPNEFPHKLYIQNYTSAVPGTCLTIRKWLFTTEEEILLNDNDLAVTYFFHQAVDDVKKGYIKAEEKSYQLQKLYEQRKMVMYLNMLRTCEGYNEIIFPHCACDSRRKGHVITAISITHFKLHACTEEGQLENQVIAFEWDEMQRWDTDEEGMAFCFEYARGEKKPRWVKIFTPYFNYMHECFERVFCELKWRKEEY

SEQ ID NO: 2867 - DNA, 7093 bp, Homo sapiens
ctcgcctgctcgcaagatggcggacgaggacggggaagggattcatccctcagcccctcacaggaacggaggtggcggcggcggcggggggtctgggctccactgcgccgggaacggcggcgggggaggcggcggcccgcgggtcgtgcgcatcgtcaagtccgagtccggctacggcttcaacgtgcggggccaagtgagcgagggcgggcaactgcggagcatcaacggggagctgtacgcgccgctgcagcatgtgagcgccgtgctgcccgggggggcggccgatcgggccggggtgcgcaagggggaccgcatcctggaggtgaaccacgtgaatgttgagggggcgacacacaagcaggtggtggacctgattcgagcaggcgagaaggaattgatcttgacagtgttatctgtacctcctcatgaggcagataacctagatcccagtgacgactcgttgggacaatcattttatgattacacagaaaagcaagcagtgcccatatcggtccccagatacaaacatgtggagcagaatggtgagaagtttgtggtatataatgtttacatggcagggaggcagctgtgttctaagcggtaccgggagtttgctatcctacaccagaacctgaagagagagtttgccaactttacatttcctcgactcccagggaagtggccattttcattatcagaacaacaattagatgcccgacgtcggggattggaagaatatctagaaaaagtgtgttcaatacgagtaattggtgagagtgacatcatgcaggaattcctatcagaatccgatgagaactacaatggtgtgtccgacgtagagctgagagtagcattaccagatggaacaacggttacagtcagggttaaaaagaacagtactacagaccaagtatatcaggctatcgcagcaaaggttggcatggacagtacgacagtgaattactttgccttatttgaagtgatcagtcactcctttgtacgtaaattggcacctaatgagtttcctcacaaactctacattcagaattatacatcagctgtgccaggcacctgcttgaccattcgaaagtggctttttacaacagaagaagaaattctcttaaatgacaatgaccttgctgttacctacttctttcatcaggcagtcgatgatgtgaagaaaggttacatcaaagcagaagaaaagtcctatcaattacagaagctatacgaacaaagaaaaatggtcatgtacctcaacatgctaaggacttgtgagggctacaatgaaatcatctttccccactgtgcctgtgactccaggaggaaggggcacgttatcacagccatcagcatcacgcactttaaactgcatgcctgcactgaagaaggacagctggagaaccaggtaattgcatttgaatgggatgagatgcagcgatgggacacagatgaagaagggatggccttctgtttcgaatatgcacgaggagagaagaagccccgatgggttaaaatcttcacgccatatttcaattacatgcatgagtgcttcgagagggtgttctgcgagctcaagtggagaaaagaggaatattagttagagactgattatctcatgtgagccaggacattcttccagcaaggttggcctctggatggtgaacgggctgtgcaaaaaagccctgcttcttcccttgtctagagggtggacattggctacaggctcttccatctctcatgacttcatggaccctcctctgccagttttttaaatcagatcaccctccatgttgttcctgacccacaggggaagctgtcctcagttgtagccgtcttgactggatgagtcctggcagtctttctaggcgaaccaagaatgtttgtgtgagggaaggtgtttgctgttgctttactgctgtctgtatgtgccagtgctggaacagaatttggaagattctgaataattagttacttattctcaaagaaaatctttgaaagaatcaggaggtcaagtcaagaacatgaaaatttatattttagtacagtagaaagaacattgggctctgggaattttatctgggttttctcctggcttttttttccctctgtgtaattttgggtaaatcagcctccctagctttcagttttctcttctgtgaaacaggaagactgaaccacgtaattaatatccaaggtcccttccggctctaaaaggctatgattctagatgagaagttatatcaagaaagatgtggccaatcagattgagtcatccaggcatacctttttagcttctgtttgtggagttgtctccagataagaggagatgtgccttcccaataactctttttttttttcctttcagaacattttccagatggcgaggtcacagcagagagatgtggccacctagcctttccttatccccttcccttcccttcacccccatcctcttactcctttcatgtcccatttcagacagagtaaccattaacaaaaaagaagagaaaaagttaaagtcgttatattcaaaagccctaaactaaatattattaataaccccctctgaatttcatgtctctggaattgaggtggtagtgaacagcagatcggtcagcaccagaagtcaactgagttaaggcaggaaaagaaataagcccaaccaacttgccaaaggtatctttgtcctttcacctgggcctcataccaacagcctctccttgtactatatttttaaaactggaactatgaacttcatccatttgcactgttcagacatatatatgtatgtatgtaaaaattatatatacacaaattagctgcacgtatatacatatatatatttctttttaaatttcatattgatggcagtaccttttttagcttgtgtttttacacacctttcactagaatccatgacctccctcgtgctctctttcttttgaaacaaactttaaaaaggaaaaaaaagcattttacagggaaaaatacctctcctcatgaaggacttgaaaagtttacaacctgcttggatttttgcccctttttttgtattgagtatagattccggctcatgggttgccatagagtctaggaacaaggagtatagtttctttatcttccaagagggtgctggggaggagaaagaggtgtgtttctcaaggttaacaggctgtagttctgcagggagagcctgaagtcctggtatgggctcttgattctgtgacaatttttttgatccatctatttctctcactcctggctttctagccacattctgcacctccttcctgctttcctagagcctcggtatgctttccctcaaccgaccctggctcaggaggttgatgccatgggaacctgaacctgaaacacttcatggtagtaatttcctgttttccttgccttttttttttttttttttttttttttctgagacagggtcttactctgtcgcccagactggaatgtggtggcatgaacatagctcactgttaccttgaattctgggctcaggtgatccttccgcctcaccctcctgagtagctgggactacaggtgtgcaccaccacacctggctaattcttcttaaaatttttttgtagagacagggtctcactatgttgcccaggctggtctcaaactcctggcctcaggtgatcctcttgtctcagcctcccaaagtgctgggattacaggcatgagccactgtgtccttccctgccttttttgcagcagggatagtactcaggaccagagttaagctgataccttaggcacacaggttggacttacatagaggaaagaaagcaagaaatgccctatgtacatgaggttttacctcctccattcctgaccaataaccacccataactacggcattctctgtgacttccttaaacagcagtgatgggaagggatccaatagtatcttcaaggccttggggaaacttgcagtgggtcagtggtctgtgccaaccaaacgatagccccatccaagccagctgagaacctaggaaggagtagtaggaatatggttgattagattggatctcccaagttttaattgaaaggagactgaacgaaaacctttctgctttctgtccgttaaagagctcctcatctgatcttgcagctagaccctttgagacttaagagctgcatcccaggatcagaagccagggctaattggggtaggacaatattcccagcccctaagctctgtagataatgcataagaagcaccaagtcaggctcagatgcaactaaaacacatctttgagccttttctttttcccttctcccctttctaaacaaaaaccttcctaggatggcatcttttgctctaactgggagacagtcataattggttgtagtcaattctactaagcagtgttggggtggttggaaagtctcttttttgtaatttgtttttgcaaatcattgtgaggccactttttctttctttctttctttctttctttctttctttctttctttcgttctttcgttctttcgttctttctttctttctttctttctctttctttcttttgctttccttctttcatctcttttttgtaatttgttgttgcaaatcattgtgaggccacttttctttccccttccttccttcctttttttctgttttttttttttttttttcccagagtcttgctctgtcgcccaggttggagtgcagtggcacgatctcggctcactgcaccctctgcctcttgggttcaagcgattctcctgcctcagcctcccaagtagctgggattacaggcatacaccaccacgccccactaattttttgtatttttggtagggcggggtttcaccatgatggccaggttggttttgaactcctgacctcaagtaatctgcccacctcggcctcccaaagtgctaggattacaggagtgagccactgcgcctggcccacttttctttctttccttcttattttgttatgctggcagccatttgcccctgcatggtatgggatcaaagaggacagcctttcctccctcaccttctccaaatctaggtgaaatcacagagtacaaaacgtgagaatgctgaatgtgtaaagttgcagagggatccctaatttgaagactttgacacagaactaacttcttttgacttaaatgaatttaaaatgagccaaaggaccctgaaaagaagacatgttgatttcccactcctagatgctaaagagacttggcaccagctttgttcaaactgtaaaaatagcaatttgcccctactcgctcagagtgggacagtagtgaacagagctgggattccatgcgacagcttgaatgctgaccttcagacatgagacatagggatttggaggccccttagaatgggtagatggtgttatgttccctttctggcatagcattcacttggtgctttggagattaggtgagggccctataggtagttggcctgttggcagaatttatttaggaacagcccttttgaaagtgtcccagtaacaacgcacccagctgcagcaaggaggtggggaaggagggcaccccaaaggacagcgccttcttctcttccacccatgcacggccttgggtgatggaggcgggttccctgtggctgcgtggatcccataggatcaagcccttctttgcatgaagcagtgttgtgactcttctctctccccttcctctgcacttcctttctgtaatccctactgttcttcttagtcccagcttctgcccagggaggcttctacccagacttcttttgcaatttgtccctgggaagagggggtctcccagtgcccccagcttcatcccagcagaaccagcaggatcctcctggtctctcactggccttcctccacacttggtttctatcctcaggggtagaagctcagagctttttatggcccaggagaaaatgtagaccctgagaaacctgtccctgcagaaaggttcccttgggccatgctttgggccctctgctctttatatgtttattctattctccatttttccaccccgtccttaccctaggcctaaacacaggtacagatatgtgcatgctcagggcagctcctaggcctggactgagctctcaggggggaattagataaatattccaacatcctcatgcctggcccatttagtttcatcctttagttacccaggccagtagctttgggttatcccttcctgtagctccaaacccagcacttggagcagcaaaatagggcactgacaggagatgaaactctctcctatctcagaatttgccaacttctgggctgggctcctaggaggtagttttcttgaaggggactgcatcctagttgacctgaattttccagaccaggagggactgctgtgctctcccttctcgccatcatactgtttggctagattcattcagcagtagaagctgtttgatctgttgaccccagcatactgctgtttcttcaccagcttcattgtgtcacagtagcttcctttgggaggatgatgtgatagaacactcagagagagggagggagaagagagatagtgggtatgcttctctagctccccatcttccaggtccacctcttgacttcctgttcccctaaacctgagcacatcacgccaggcctctttgctgccaggacagcatcagctcactcctcagcaataatctagggtatgtgggaaggtcagggctgtggtaaggaatagaatcaaagaggggagtgatacggggtgggggcacttggccgcctgctaaacttggacattaattttatatcatgacccccttttaagccagtgagctgggcttcagtttttcccaggccatgcacatttaatttatttcagagaaactctaattgtattttcactgcagtatcttgtattttttatttgtgatttaagaaatgtgaagagaaaatacacagacacaataatggctaacattgtttctttcattccttgttctagagctaaccactctaaaattgtttggtaatgtcacttagtgtaattaattgtaacatattcttttaaataaattgatttattgatcaaacacttctttggtt

SEQ ID NO: 2868 - protein, 528 aa, Homo sapiens; identical to SEQ ID NO: 129

SEQ ID NO: 2869 - DNA, 6798 bp, Homo sapiens
atgggattgtctttttccctttttccccttaggaaccacgtgaatgttgagggggcgacacacaagcaggtggtggacctgattcgagcaggcgagaaggaattgatcttgacagtgttatctgtacctcctcatgaggcagataacctagatcccagtgacgactcgttgggacaatcattttatgattacacagaaaagcaagcagtgcccatatcggtccccagatacaaacatgtggagcagaatggtgagaagtttgtggtatataatgtttacatggcagggaggcagctgtgttctaagcggtaccgggagtttgctatcctacaccagaacctgaagagagagtttgccaactttacatttcctcgactcccagggaagtggccattttcattatcagaacaacaattagatgcccgacgtcggggattggaagaatatctagaaaaagtgtgttcaatacgagtaattggtgagagtgacatcatgcaggaattcctatcagaatccgatgagaactacaatggtgtgtccgacgtagagctgagagtagcattaccagatggaacaacggttacagtcagggttaaaaagaacagtactacagaccaagtatatcaggctatcgcagcaaaggttggcatggacagtacgacagtgaattactttgccttatttgaagtgatcagtcactcctttgtacgtaaattggcacctaatgagtttcctcacaaactctacattcagaattatacatcagctgtgccaggcacctgcttgaccattcgaaagtggctttttacaacagaagaagaaattctcttaaatgacaatgaccttgctgttacctacttctttcatcaggcagtcgatgatgtgaagaaaggttacatcaaagcagaagaaaagtcctatcaattacagaagctatacgaacaaagaaaaatggtcatgtacctcaacatgctaaggacttgtgagggctacaatgaaatcatctttccccactgtgcctgtgactccaggaggaaggggcacgttatcacagccatcagcatcacgcactttaaactgcatgcctgcactgaagaaggacagctggagaaccaggtaattgcatttgaatgggatgagatgcagcgatgggacacagatgaagaagggatggccttctgtttcgaatatgcacgaggagagaagaagccccgatgggttaaaatcttcacgccatatttcaattacatgcatgagtgcttcgagagggtgttctgcgagctcaagtggagaaaagaggaatattagttagagactgattatctcatgtgagccaggacattcttccagcaaggttggcctctggatggtgaacgggctgtgcaaaaaagccctgcttcttcccttgtctagagggtggacattggctacaggctcttccatctctcatgacttcatggaccctcctctgccagttttttaaatcagatcaccctccatgttgttcctgacccacaggggaagctgtcctcagttgtagccgtcttgactggatgagtcctggcagtctttctaggcgaaccaagaatgtttgtgtgagggaaggtgtttgctgttgctttactgctgtctgtatgtgccagtgctggaacagaatttggaagattctgaataattagttacttattctcaaagaaaatctttgaaagaatcaggaggtcaagtcaagaacatgaaaatttatattttagtacagtagaaagaacattgggctctgggaattttatctgggttttctcctggcttttttttccctctgtgtaattttgggtaaatcagcctccctagctttcagttttctcttctgtgaaacaggaagactgaaccacgtaattaatatccaaggtcccttccggctctaaaaggctatgattctagatgagaagttatatcaagaaagatgtggccaatcagattgagtcatccaggcatacctttttagcttctgtttgtggagttgtctccagataagaggagatgtgccttcccaataactctttttttttttcctttcagaacattttccagatggcgaggtcacagcagagagatgtggccacctagcctttccttatccccttcccttcccttcacccccatcctcttactcctttcatgtcccatttcagacagagtaaccattaacaaaaaagaagagaaaaagttaaagtcgttatattcaaaagccctaaactaaatattattaataaccccctctgaatttcatgtctctggaattgaggtggtagtgaacagcagatcggtcagcaccagaagtcaactgagttaaggcaggaaaagaaataagcccaaccaacttgccaaaggtatctttgtcctttcacctgggcctcataccaacagcctctccttgtactatatttttaaaactggaactatgaacttcatccatttgcactgttcagacatatatatgtatgtatgtaaaaattatatatacacaaattagctgcacgtatatacatatatatatttctttttaaatttcatattgatggcagtaccttttttagcttgtgtttttacacacctttcactagaatccatgacctccctcgtgctctctttcttttgaaacaaactttaaaaaggaaaaaaaagcattttacagggaaaaatacctctcctcatgaaggacttgaaaagtttacaacctgcttggatttttgcccctttttttgtattgagtatagattccggctcatgggttgccatagagtctaggaacaaggagtatagtttctttatcttccaagagggtgctggggaggagaaagaggtgtgtttctcaaggttaacaggctgtagttctgcagggagagcctgaagtcctggtatgggctcttgattctgtgacaatttttttgatccatctatttctctcactcctggctttctagccacattctgcacctccttcctgctttcctagagcctcggtatgctttccctcaaccgaccctggctcaggaggttgatgccatgggaacctgaacctgaaacacttcatggtagtaatttcctgttttccttgccttttttttttttttttttttttttttctgagacagggtcttactctgtcgcccagactggaatgtggtggcatgaacatagctcactgttaccttgaattctgggctcaggtgatccttccgcctcaccctcctgagtagctgggactacaggtgtgcaccaccacacctggctaattcttcttaaaatttttttgtagagacagggtctcactatgttgcccaggctggtctcaaactcctggcctcaggtgatcctcttgtctcagcctcccaaagtgctgggattacaggcatgagccactgtgtccttccctgccttttttgcagcagggatagtactcaggaccagagttaagctgataccttaggcacacaggttggacttacatagaggaaagaaagcaagaaatgccctatgtacatgaggttttacctcctccattcctgaccaataaccacccataactacggcattctctgtgacttccttaaacagcagtgatgggaagggatccaatagtatcttcaaggccttggggaaacttgcagtgggtcagtggtctgtgccaaccaaacgatagccccatccaagccagctgagaacctaggaaggagtagtaggaatatggttgattagattggatctcccaagttttaattgaaaggagactgaacgaaaacctttctgctttctgtccgttaaagagctcctcatctgatcttgcagctagaccctttgagacttaagagctgcatcccaggatcagaagccagggctaattggggtaggacaatattcccagcccctaagctctgtagataatgcataagaagcaccaagtcaggctcagatgcaactaaaacacatctttgagccttttctttttcccttctcccctttctaaacaaaaaccttcctaggatggcatcttttgctctaactgggagacagtcataattggttgtagtcaattctactaagcagtgttggggtggttggaaagtctcttttttgtaatttgtttttgcaaatcattgtgaggccactttttctttctttctttctttctttctttctttctttctttctttcgttctttcgttctttcgttctttctttctttctttctttctctttctttcttttgctttccttctttcatctcttttttgtaatttgttgttgcaaatcattgtgaggccacttttctttccccttccttccttcctttttttctgttttttttttttttttttcccagagtcttgctctgtcgcccaggttggagtgcagtggcacgatctcggctcactgcaccctctgcctcttgggttcaagcgattctcctgcctcagcctcccaagtagctgggattacaggcatacaccaccacgccccactaattttttgtatttttggtagggcggggtttcaccatgatggccaggttggttttgaactcctgacctcaagtaatctgcccacctcggcctcccaaagtgctaggattacaggagtgagccactgcgcctggcccacttttctttctttccttcttattttgttatgctggcagccatttgcccctgcatggtatgggatcaaagaggacagcctttcctccctcaccttctccaaatctaggtgaaatcacagagtacaaaacgtgagaatgctgaatgtgtaaagttgcagagggatccctaatttgaagactttgacacagaactaacttcttttgacttaaatgaatttaaaatgagccaaaggaccctgaaaagaagacatgttgatttcccactcctagatgctaaagagacttggcaccagctttgttcaaactgtaaaaatagcaatttgcccctactcgctcagagtgggacagtagtgaacagagctgggattccatgcgacagcttgaatgctgaccttcagacatgagacatagggatttggaggccccttagaatgggtagatggtgttatgttccctttctggcatagcattcacttggtgctttggagattaggtgagggccctataggtagttggcctgttggcagaatttatttaggaacagcccttttgaaagtgtcccagtaacaacgcacccagctgcagcaaggaggtggggaaggagggcaccccaaaggacagcgccttcttctcttccacccatgcacggccttgggtgatggaggcgggttccctgtggctgcgtggatcccataggatcaagcccttctttgcatgaagcagtgttgtgactcttctctctccccttcctctgcacttcctttctgtaatccctactgttcttcttagtcccagcttctgcccagggaggcttctacccagacttcttttgcaatttgtccctgggaagagggggtctcccagtgcccccagcttcatcccagcagaaccagcaggatcctcctggtctctcactggccttcctccacacttggtttctatcctcaggggtagaagctcagagctttttatggcccaggagaaaatgtagaccctgagaaacctgtccctgcagaaaggttcccttgggccatgctttgggccctctgctctttatatgtttattctattctccatttttccaccccgtccttaccctaggcctaaacacaggtacagatatgtgcatgctcagggcagctcctaggcctggactgagctctcaggggggaattagataaatattccaacatcctcatgcctggcccatttagtttcatcctttagttacccaggccagtagctttgggttatcccttcctgtagctccaaacccagcacttggagcagcaaaatagggcactgacaggagatgaaactctctcctatctcagaatttgccaacttctgggctgggctcctaggaggtagttttcttgaaggggactgcatcctagttgacctgaattttccagaccaggagggactgctgtgctctcccttctcgccatcatactgtttggctagattcattcagcagtagaagctgtttgatctgttgaccccagcatactgctgtttcttcaccagcttcattgtgtcacagtagcttcctttgggaggatgatgtgatagaacactcagagagagggagggagaagagagatagtgggtatgcttctctagctccccatcttccaggtccacctcttgacttcctgttcccctaaacctgagcacatcacgccaggcctctttgctgccaggacagcatcagctcactcctcagcaataatctagggtatgtgggaaggtcagggctgtggtaaggaatagaatcaaagaggggagtgatacggggtgggggcacttggccgcctgctaaacttggacattaattttatatcatgacccccttttaagccagtgagctgggcttcagtttttcccaggccatgcacatttaatttatttcagagaaactctaattgtattttcactgcagtatcttgtattttttatttgtgatttaagaaatgtgaagagaaaatacacagacacaataatggctaacattgtttctttcattccttgttctagagctaaccactctaaaattgtttggtaatgtcacttagtgtaattaattgtaacatattcttttaaataaattgatttattgatcaaacacttctttggtt

SEQ ID NO: 2870 - protein, 435 aa, Homo sapiens
MGLSFSLFPLRNHVNVEGATHKQVVDLIRAGEKELILTVLSVPPHEADNLDPSDDSLGQSFYDYTEKQAVPISVPRYKHVEQNGEKFVVYNVYMAGRQLCSKRYREFAILHQNLKREFANFTFPRLPGKWPFSLSEQQLDARRRGLEEYLEKVCSIRVIGESDIMQEFLSESDENYNGVSDVELRVALPDGTTVTVRVKKNSTTDQVYQAIAAKVGMDSTTVNYFALFEVISHSFVRKLAPNEFPHKLYIQNYTSAVPGTCLTIRKWLFTTEEEILLNDNDLAVTYFFHQAVDDVKKGYIKAEEKSYQLQKLYEQRKMVMYLNMLRTCEGYNEIIFPHCACDSRRKGHVITAISITHFKLHACTEEGQLENQVIAFEWDEMQRWDTDEEGMAFCFEYARGEKKPRWVKIFTPYFNYMHECFERVFCELKWRKEEY

SEQ ID NO: 2871 - DNA, 370 bp, Homo sapiens
gaaaaagatgacagatgttaagagttttgtaaagtatatatcagtagctattattagtatcatttagctattaagttcttctaagaaccgtacaaggatatgaatgtcctgccaggaagtgactaatagaaagattatgccagtctctccccaacctggccatacaagtgaaggctcacttaggcaccgaggattatagccacagaggggatgttcaagaagaaccacgatgcaatgtcaatgtcctgaagatcctgaacactttcctcttcatcaccaaaacactgtactgcttccagcctgggagacagagcaagactctgtctcaaaaaaaaaaaaaaaaagattacactgcttgactgactaagtg

SEQ ID NO: 2872 - protein, 45 aa, Homo sapiens
MQCQCPEDPEHFPLHHQNTVLLPAWETEQDSVSKKKKKRLHCLTD

SEQ ID NO: 2873 - DNA, 1353 bp, Homo sapiens
ggtttttattcagctcagactagtattaagatttgaggcacaccatgaggactggggtgtgggggcaggagtcgtggtaaggcacgcagggcagctacaagggaagactagcctgagattaaacatttgctgtggcaacccagggtggggatgatttccagttcagagtcctcacagagtagccaatgatgcccttttcattccagtaggcttttcactttccaagcatgtgccttcacattcctcattttttcttctagcctcttgcacatctcatgtctctgcatctccacagccatcaacactgtccacgtcacattgctctcatctgtctccatgtttcttttcctgctctcctacaatttgttctcccaagaagccaagagtcatcttttaaaagttaattcaccaacatttactacccagtctgctttgtccagcactgtatcctggtcaccctaaacagtgccccaaatattagacattgcttagtaaataagaaatgactgttggacatctatactggacttcccatccatatctacatcatcatagggccaatgctaaaactttctcccataaagtcctgactcatatatttctattttctagtcacatagacagaaaacctcaagagtttttagtactttcgcataaactcaatggtattaaatcatttaagatttcacttccacaaactttctcatatcatttccctcttttcaattatcactgcctacacttattaactgagtaatcatagcaatttcctaattggtccttctgtctatgttctgaagcatcaatctttctaaactgcagctaataaaaaacaaaacttctctgctgctgttttttgttgtttttcatagaacacctcagcctggcattcaaggctcttcgaagccttactttccacttcattcctacacatacccaaatagaactattcattgttctctaggcaagtttggtcccttttctcccatgtcttttcattcccagttactacagtgtctggcacataacggctcaataaatgtttgttgaatgccttcttgttgaaatccttctcacactaaaacagttcaccttaaacactactttcttcatgaaaatcttaacggccctcatccacaggtctttctccttccttttctagtccttatggcacttaaacctttcactgctgtgtatcatggccatgcgtaagtgtctcattcttctgtgagcctgtaagctggcagaaatgtttctttctttgcttttgtgtctgttgcagtatctcaaacaatctccccaccccacccccaacagcagatacctaataaatgtttgactttaaccactgta

SEQ ID NO: 2874 - protein, 84 aa, Homo sapiens
MTVGHLYWTSHPYLHHHRANAKTFSHKVLTHIFLFSSHIDRKPQEFLVLSHKLNGIKSFKISLPQTFSYHFPLFNYHCLHLLTE

SEQ ID NO: 2875 - DNA, 496 bp, Homo sapiens
acctgccctgggccttgactgggttctggggcaaacgctgcttcgtggcccccgggggcacaagacaccggcccctcccacccccctgcctctctgaagggccatggctatgcttccctggctccaagggcccatttcctcctagatgcccttttggcctttgtgagggagcgaggaacaggctcgaaggctccggggtatctgccttctgctgggctcctgtgacaggccttctgtacccagcgtttgtacttgcctcccccaacagtgggcctgttctacccgtgcaggccccaggagagccgcaggggcctgccacacactcccagctcaccctcaccccatcagtttcagacagttctctatgcttaacttatttatttattgcattttacttttaaagagttggtcttttctgtctaaataaagaaaaaagtttaaaagcatcaaataagagtcttggaaggttgagggtaggggattgttccctacccac

SEQ ID NO: 2876 - protein, 132 aa, Homo sapiens
LPWALTGFWGKRCFVAPGGTRHRPLPPPCLSEGPWLCFPGSKGPFPPRCPFGLCEGARNRLEGSGVSAFCWAPVTGLLYPAFVLASPNSGPVLPVQAPGEPQGPATHSQLTLTPSVSDSSLCLTYLFIAFYF

SEQ ID NO: 2877 - DNA, 2510 bp, Homo sapiens
gggaggggggtgtggaggggggaggtttttgttgaggagagcgcggccggagagcagagctccgggacccaggtgaccgggaaagcaggcagccccagcggcgggagcagccggcagcagcccaggcccggggactggggtgggggtgggaggggggctgaggggaggacctgaaggggggcggcagggcaaaagggacccctggagccctgccgccatcagagatcaagcatctggcatcagggatcttcggacccagcagaaggatccgccacaggggaggtgtcctcccagggaagccaacgagagattcacctgccccacatcaggagtgggccccccttactgacgctgctggcaaccatagcaggccccttaacccctcagtctcctccccatcaccctcctcaggccctttccccgcctccagctctcatctcaactcccagttcccagccctctaagccctagcacccccggctaccacctaaccctccaggtcttggccatactcacccccatcctgggacatttgccagatctctgggagggagatcgtttgtttaggcgatgccccctggtggcatgacagcgtctgcctagacccctgacccctagcactcaactccctgggcctcctttgtgtgaagagccgcccctctgcttagcagcgtggttgggggccaaagggaaagccagccccagctgggcccccgggccccaccacttatctccttgctgggcagctccccttggcctttgggcctctccctgctcccctcggcccctcctcctgggccgcctcaatgaaggagccggatgccatcaagctgtttgtggggcagatcccgaggcatctggaggagaaggacctgaagcccatcttcgaacagtttggtcggatctttgagctgactgtcatcaaggacaagtacaccgggctgcacaagggatgtgccttcctgacatactgtgcccgggattcagccctgaaggcccagagcgccctgcacgaacagaagacgcttccagggatgaacaggccgatccaggtcaagccagccgacagcgagagccgaggagaagaccggaagctctttgtggggatgctagggaagcagcagacagatgaggacgtccggaagatgtttgagcccttcgggaccatcgacgagtgcactgtgctccgggggccagatggcaccagcaaaggctgcgccttcgtgaagttccagacccacgctgaggcccaggcggccatcaacacccttcacagcagccggaccctgccaggtgcctcgtccagcctggtggtgaagtttgctgacactgagaaggagcgaggtctccgccgcatgcagcaggtggccacccagttgggcatgttcagccccatcgccctccagtttggagcctacagcgcctacacccaggccctgatgcagcagcaggcggccctggtagcggctcacagtgcctacctcagccccatggccaccatggctgccgtgcagatgcagcacatggctgccatcaatgccaatggcctcatcgccacccccatcaccccatcctcagtgaagggccatggctatgcttccctggctccaagggcccatttcctcctagatgcccttttggcctttgtgagggagcgaggaacaggctcgaaggctccggggtatctgccttctgctgggctcctgtgacaggccttctgtacccagcgtttgtacttgcctcccccaacagtgggcctgttctacccgtgcaggccccaggagagccgcaggggcctgccacacactcccagctcaccctcaccccagcctcttccccacattaggggtttcttggaagctggctctcactcccctccaccctcagctagaggtaggatatccctgattcctgggctcccagccttaaaactcactgcctcccccaagggccccctctaaggagggtgtgggggagccctgagggctgcctctctgccagtcagccacagagaccctcctcctttcacgaggaaaagaccttcccctgaacccctaaaaatgtttacagtctctgctggttccctctgtgtaaataccactaccacccgtgcgttatccagcccgcccggcctggcccggacgctgccatctctctttctgggagtttagacaatgttgcccttggatttttttctctctcttaatttctccctttgctttggggggtaattgggtattgggaggaggggtgtggggaggggtcaaggggtttattacctgatcattttctttaggaagaggttttagggaaaagaaaatggggtgggggtgggggtggtaaggggagaccggggagtcagtttcagacagttctctatgcttaacttatttatttattgcattttacttttaaagagttggtcttttctgtctaaataaagaaaaaagtttaaaagcatcaaataagagtcttggaaggttgagggtaggggattgttccctacccac

SEQ ID NO: 2878 - protein, 300 aa, Homo sapiens
MKEPDAIKLFVGQIPRHLEEKDLKPIFEQFGRIFELTVIKDKYTGLHKGCAFLTYCARDSALKAQSALHEQKTLPGMNRPIQVKPADSESRGEDRKLFVGMLGKQQTDEDVRKMFEPFGTIDECTVLRGPDGTSKGCAFVKFQTHAEAQAAINTLHSSRTLPGASSSLVVKFADTEKERGLRRMQQVATQLGMFSPIALQFGAYSAYTQALMQQQAALVAAHSAYLSPMATMAAVQMQHMAAINANGLIATPITPSSVKGHGYASLAPRAHFLLDALLAFVRERGTGSKAPGYLPSAGLL

SEQ ID NO: 2879 - DNA, 3309 bp, Homo sapiens
gggaggggggtgtggaggggggaggtttttgttgaggagagcgcggccggagagcagagctccgggacccaggtgaccgggaaagcaggcagccccagcggcgggagcagccggcagcagcccaggcccggggactggggtgggggtgggaggggggctgaggggaggacctgaaggggggcggcagggcaaaagggacccctggagccctgccgccatcagagatcaagcatctggcatcagggatcttcggacccagcagaaggatccgccacaggggaggtgtcctcccagggaagccaacgagagattcacctgccccacatcaggagtgggccccccttactgacgctgctggcaaccatagcaggccccttaacccctcagtctcctccccatcaccctcctcaggccctttccccgcctccagctctcatctcaactcccagttcccagccctctaagccctagcacccccggctaccacctaaccctccaggtcttggccatactcacccccatcctgggacatttgccagatctctgggagggagatcgtttgtttaggcgatgccccctggtggcatgacagcgtctgcctagacccctgacccctagcactcaactccctgggcctcctttgtgtgaagagccgcccctctgcttagcagcgtggttgggggccaaagggaaagccagccccagctgggcccccgggccccaccacttatctccttgctgggcagctccccttggcctttgggcctctccctgctcccctcggcccctcctcctgggccgcctcaatgaaggagccggatgccatcaagctgtttgtggggcagatcccgaggcatctggaggagaaggacctgaagcccatcttcgaacagtttggtcggatctttgagctgactgtcatcaaggacaagtacaccgggctgcacaagggatgtgccttcctgacatactgtgcccgggattcagccctgaaggcccagagcgccctgcacgaacagaagacgcttccagggatgaacaggccgatccaggtcaagccagccgacagcgagagccgaggagaagaccggaagctctttgtggggatgctagggaagcagcagacagatgaggacgtccggaagatgtttgagcccttcgggaccatcgacgagtgcactgtgctccgggggccagatggcaccagcaaaggctgcgccttcgtgaagttccagacccacgctgaggcccaggcggccatcaacacccttcacagcagccggaccctgccaggtgcctcgtccagcctggtggtgaagtttgctgacactgagaaggagcgaggtctccgccgcatgcagcaggtggccacccagttgggcatgttcagccccatcgccctccagtttggagcctacagcgcctacacccaggccctgatgcagcagcaggcggccctggtagcggctcacagtgcctacctcagccccatggccaccatggctgccgtgcagatgcagcacatggctgccatcaatgccaatggcctcatcgccacccccatcaccccatcctcaggaaccagcacccctcctgccatcgctgccacgcctgtctctgccattccggctgccctgggcgtcaacggctacagcccggtgcccacccagcccactgggcagcctgcccctgatgctctgtatcccaacggggttcacccctacccagcccagagccccgcggcccccgtggaccccctgcagcaggcctacgcggggatgcagcactacacagcagcctacccagcagcctacagcctggttgcacctgcgttcccgcagcctccagccctggtcgcccagcagcccccaccaccacctcaacagcagcagcagcagcagcagcagcaacagcagcagcagcaaagagaaggccctgatggctgcaacatcttcatctaccacctgccccaggagttcactgactcagagatcctccagatgtttgtcccctttggccacgtcatctcagccaaagtctttgttgaccgagccaccaatcaaagcaaatgttttggctttgtgagtttcgacaatccggccagtgcccaggctgccatccaggccatgaatggcttccagatcggcatgaagcgcctcaaagtccagctaaagcggcctaaggatgccaaccggccctactgagggcccccaggtctggagatcccagaggaaggggcgcctcacaccctcttcccacgactggccccggccctctccgcacacctgccctgggccttgactgggttctggggcaaacgctgcttcgtggcccccgggggcacaagacaccggcccctcccacccccctgcctctctgaagggccatggctatgcttccctggctccaagggcccatttcctcctagatgcccttttggcctttgtgagggagcgaggaacaggctcgaaggctccggggtatctgccttctgctgggctcctgtgacaggccttctgtacccagcgtttgtacttgcctcccccaacagtgggcctgttctacccgtgcaggccccaggagagccgcaggggcctgccacacactcccagctcaccctcaccccagcctcttccccacattaggggtttcttggaagctggctctcactcccctccaccctcagctagaggtaggatatccctgattcctgggctcccagccttaaaactcactgcctcccccaagggccccctctaaggagggtgtgggggagccctgagggctgcctctctgccagtcagccacagagaccctcctcctttcacgaggaaaagaccttcccctgaacccctaaaaatgtttacagtctctgctggttccctctgtgtaaataccactaccacccgtgcgttatccagcccgcccggcctggcccggacgctgccatctctctttctgggagtttagacaatgttgcccttggatttttttctctctcttaatttctccctttgctttggggggtaattgggtattgggaggaggggtgtggggaggggtcaaggggtttattacctgatcattttctttaggaagaggttttagggaaaagaaaatggggtgggggtgggggtggtaaggggagaccggggagtcagtttcagacagttctctatgcttaacttatttatttattgcattttacttttaaagagttggtcttttctgtctaaataaagaaaaaagtttaaaagcatcaaataagagtcttggaaggttgagggtaggggattgttccctacccac

SEQ ID NO: 2880 - protein, 465 aa, Homo sapiens; identical to SEQ ID NO: 131

SEQ ID NO: 2881 - DNA, 2462 bp, Homo sapiens
gggaggggggtgtggaggggggaggtttttgttgaggagagcgcggccggagagcagagctccgggacccaggtgaccgggaaagcaggcagccccagcggcgggagcagccggcagcagcccaggcccggggactggggtgggggtgggaggggggctgaggggaggacctgaaggggggcggcagggcaaaagggacccctggagccctgccgccatcagagatcaagcatctggcatcagggatcttcggacccagcagaaggatccgccacaggggaggtgtcctcccagggaagccaacgagagattcacctgccccacatcaggagtgggccccccttactgacgctgctggcaaccatagcaggccccttaacccctcagtctcctccccatcaccctcctcaggccctttccccgcctccagctctcatctcaactcccagttcccagccctctaagccctagcacccccggctaccacctaaccctccaggtcttggccatactcacccccatcctgggacatttgccagatctctgggagggagatcgtttgtttaggcgatgccccctggtggcatgacagcgtctgcctagacccctgacccctagcactcaactccctgggcctcctttgtgtgaagagccgcccctctgcttagcagcgtggttgggggccaaagggaaagccagccccagctgggcccccgggccccaccacttatctccttgctgggcagctccccttggcctttgggcctctccctgctcccctcggcccctcctcctgggccgcctcaatgaaggagccggatgccatcaagctgtttgtggggcagatcccgaggcatctggaggagaaggacctgaagcccatcttcgaacagtttggtcggatctttgagctgactgtcatcaaggacaagtacaccgggctgcacaagggatgtgccttcctgacatactgtgcccgggattcagccctgaaggcccagagcgccctgcacgaacagaagacgcttccagggatgaacaggccgatccaggtcaagccagccgacagcgagagccgaggagaagaccggaagctctttgtggggatgctagggaagcagcagacagatgaggacgtccggaagatgtttgagcccttcgggaccatcgacgagtgcactgtgctccgggggccagatggcaccagcaaaggctgcgccttcgtgaagttccagacccacgctgaggcccaggcggccatcaacacccttcacagcagccggaccctgccaggtgcctcgtccagcctggtggtgaagtttgctgacactgagaaggagcgaggtctccgccgcatgcagcaggtggccacccagttgggcatgttcagccccatcgccctccagtttggagcctacagcgcctacacccaggccctgatgcagcagcaggcggccctggtagcggctcacagtgcctacctcagccccatggccaccatggctgccgtgcagatgcagcacatggctgccatcaatgccaatggcctcatcgccacccccatcaccccatcctcagtgaagggccatggctatgcttccctggctccaagggcccatttcctcctagatgcccttttggcctttgtgagggagcgaggaacaggctcgaaggctccggggtatctgccttctgctgggctcctgtgacaggccttctgtacccagcgtttgtacttgcctcccccaacagtgggcctgttctacccgtgcaggccccaggagagccgcaggggcctgccacacactcccagctcaccctcaccccagcctcttccccacattaggggtttcttggaagctggctctcactcccctccaccctcagctagaggtaggatatccctgattcctgggctcccagccttaaaactcactgcctcccccaagggccccctctaaggagggtgtgggggagccctgagggctgcctctctgccagtcagccacagagaccctcctcctttcacgaggaaaagaccttcccctgaacccctaaaaatgtttacagtctctgctggttccctctgtgtaaataccactaccacccgtgcgttatccagcccgcccggcctggcccggacgctgccatctctctttctgggagtttagacaatgttgcccttggatttttttctctctcttaatttctccctttgctttggggggtaattgggtattgggaggaggggtgtggggaggggtcaaggggtttattacctgatcattttctttaggaagaggttttagggaaaagaaaatggggtgggggtgggggtggtaaggggagaccggggagtcagtttcagacagttctctatgcttaacttatttatttattgcattttacttttaaagagttggtcttttctgtctaaataaagaaaaaagtttaaaagcatc

SEQ ID NO: 2882 - protein, 300 aa, Homo sapiens; identical to SEQ ID NO: 2878

SEQ ID NO: 2883 - DNA, 3111 bp, Homo sapiens
gggaggggggtgtggaggggggaggtttttgttgaggagagcgcggccggagagcagagctccgggacccaggtgaccgggaaagcaggcagccccagcggcgggagcagccggcagcagcccaggcccggggactggggtgggggtgggaggggggctgaggggaggacctgaaggggggcggcagggcaaaagggacccctggagccctgccgccatcagagatcaagcatctggcatcagggatcttcggacccagcagaaggatccgccacaggggaggtgtcctcccagggaagccaacgagagattcacctgccccacatcaggagtgggccccccttactgacgctgctggcaaccatagcaggccccttaacccctcagtctcctccccatcaccctcctcaggccctttccccgcctccagctctcatctcaactcccagttcccagccctctaagccctagcacccccggctaccacctaaccctccaggtcttggccatactcacccccatcctgggacatttgccagatctctgggagggagatcgtttgtttaggcgatgccccctggtggcatgacagcgtctgcctagacccctgacccctagcactcaactccctgggcctcctttgtgtgaagagccgcccctctgcttagcagcgtggttgggggccaaagggaaagccagccccagctgggcccccgggccccaccacttatctccttgctgggcagctccccttggcctttgggcctctccctgctcccctcggcccctcctcctgggccgcctcaatgaaggagccggatgccatcaagctgtttgtggggcagatcccgaggcatctggaggagaaggacctgaagcccatcttcgaacagtttggtcggatctttgagctgactgtcatcaaggacaagtacaccgggctgcacaagggatgtgccttcctgacatactgtgcccgggattcagccctgaaggcccagagcgccctgcacgaacagaagacgcttccagggatgaacaggccgatccaggtcaagccagccgacagcgagagccgaggagaagaccggaagctctttgtggggatgctagggaagcagcagacagatgaggacgtccggaagatgtttgagcccttcgggaccatcgacgagtgcactgtgctccgggggccagatggcaccagcaaaggctgcgccttcgtgaagttccagacccacgctgaggcccaggcggccatcaacacccttcacagcagccggaccctgccaggtgcctcgtccagcctggtggtgaagtttgctgacactgagaaggagcgaggtctccgccgcatgcagcaggtggccacccagttgggcatgttcagccccatcgccctccagtttggagcctacagcgcctacacccaggccctgatgcagcagcaggcggccctggtagcggctcacagtgcctacctcagccccatggccaccatggctgccgtgcagatgcagcacatggctgccatcaatgccaatggcctcatcgccacccccatcaccccatcctcagcccagagccccgcggcccccgtggaccccctgcagcaggcctacgcggggatgcagcactacacagcagcctacccagcagcctacagcctggttgcacctgcgttcccgcagcctccagccctggtcgcccagcagcccccaccaccacctcaacagcagcagcagcagcagcagcagcaacagcagcagcagcaaagagaaggccctgatggctgcaacatcttcatctaccacctgccccaggagttcactgactcagagatcctccagatgtttgtcccctttggccacgtcatctcagccaaagtctttgttgaccgagccaccaatcaaagcaaatgttttggctttgtgagtttcgacaatccggccagtgcccaggctgccatccaggccatgaatggcttccagatcggcatgaagcgcctcaaagtccagctaaagcggcctaaggatgccaaccggccctactgagggcccccaggtctggagatcccagaggaaggggcgcctcacaccctcttcccacgactggccccggccctctccgcacacctgccctgggccttgactgggttctggggcaaacgctgcttcgtggcccccgggggcacaagacaccggcccctcccacccccctgcctctctgaagggccatggctatgcttccctggctccaagggcccatttcctcctagatgcccttttggcctttgtgagggagcgaggaacaggctcgaaggctccggggtatctgccttctgctgggctcctgtgacaggccttctgtacccagcgtttgtacttgcctcccccaacagtgggcctgttctacccgtgcaggccccaggagagccgcaggggcctgccacacactcccagctcaccctcaccccagcctcttccccacattaggggtttcttggaagctggctctcactcccctccaccctcagctagaggtaggatatccctgattcctgggctcccagccttaaaactcactgcctcccccaagggccccctctaaggagggtgtgggggagccctgagggctgcctctctgccagtcagccacagagaccctcctcctttcacgaggaaaagaccttcccctgaacccctaaaaatgtttacagtctctgctggttccctctgtgtaaataccactaccacccgtgcgttatccagcccgcccggcctggcccggacgctgccatctctctttctgggagtttagacaatgttgcccttggatttttttctctctcttaatttctccctttgctttggggggtaattgggtattgggaggaggggtgtggggaggggtcaaggggtttattacctgatcattttctttaggaagaggttttagggaaaagaaaatggggtgggggtgggggtggtaaggggagaccggggagtcagtttcagacagttctctatgcttaacttatttatttattgcattttacttttaaagagttggtcttttctgtctaaataaagaaaaaagtttaaaagcatc

SEQ ID NO: 2884 - protein, 415 aa, Homo sapiens
MKEPDAIKLFVGQIPRHLEEKDLKPIFEQFGRIFELTVIKDKYTGLHKGCAFLTYCARDSALKAQSALHEQKTLPGMNRPIQVKPADSESRGEDRKLFVGMLGKQQTDEDVRKMFEPFGTIDECTVLRGPDGTSKGCAFVKFQTHAEAQAAINTLHSSRTLPGASSSLVVKFADTEKERGLRRMQQVATQLGMFSPIALQFGAYSAYTQALMQQQAALVAAHSAYLSPMATMAAVQMQHMAAINANGLIATPITPSSAQSPAAPVDPLQQAYAGMQHYTAAYPAAYSLVAPAFPQPPALVAQQPPPPPQQQQQQQQQQQQQQQREGPDGCNIFIYHLPQEFTDSEILQMFVPFGHVISAKVFVDRATNQSKCFGFVSFDNPASAQAAIQAMNGFQIGMKRLKVQLKRPKDANRPY

SEQ ID NO: 2885 - DNA, 3261 bp, Homo sapiens
gggaggggggtgtggaggggggaggtttttgttgaggagagcgcggccggagagcagagctccgggacccaggtgaccgggaaagcaggcagccccagcggcgggagcagccggcagcagcccaggcccggggactggggtgggggtgggaggggggctgaggggaggacctgaaggggggcggcagggcaaaagggacccctggagccctgccgccatcagagatcaagcatctggcatcagggatcttcggacccagcagaaggatccgccacaggggaggtgtcctcccagggaagccaacgagagattcacctgccccacatcaggagtgggccccccttactgacgctgctggcaaccatagcaggccccttaacccctcagtctcctccccatcaccctcctcaggccctttccccgcctccagctctcatctcaactcccagttcccagccctctaagccctagcacccccggctaccacctaaccctccaggtcttggccatactcacccccatcctgggacatttgccagatctctgggagggagatcgtttgtttaggcgatgccccctggtggcatgacagcgtctgcctagacccctgacccctagcactcaactccctgggcctcctttgtgtgaagagccgcccctctgcttagcagcgtggttgggggccaaagggaaagccagccccagctgggcccccgggccccaccacttatctccttgctgggcagctccccttggcctttgggcctctccctgctcccctcggcccctcctcctgggccgcctcaatgaaggagccggatgccatcaagctgtttgtggggcagatcccgaggcatctggaggagaaggacctgaagcccatcttcgaacagtttggtcggatctttgagctgactgtcatcaaggacaagtacaccgggctgcacaagggatgtgccttcctgacatactgtgcccgggattcagccctgaaggcccagagcgccctgcacgaacagaagacgcttccagggatgaacaggccgatccaggtcaagccagccgacagcgagagccgaggagaagaccggaagctctttgtggggatgctagggaagcagcagacagatgaggacgtccggaagatgtttgagcccttcgggaccatcgacgagtgcactgtgctccgggggccagatggcaccagcaaaggctgcgccttcgtgaagttccagacccacgctgaggcccaggcggccatcaacacccttcacagcagccggaccctgccaggtgcctcgtccagcctggtggtgaagtttgctgacactgagaaggagcgaggtctccgccgcatgcagcaggtggccacccagttgggcatgttcagccccatcgccctccagtttggagcctacagcgcctacacccaggccctgatgcagcagcaggcggccctggtagcggctcacagtgcctacctcagccccatggccaccatggctgccgtgcagatgcagcacatggctgccatcaatgccaatggcctcatcgccacccccatcaccccatcctcaggaaccagcacccctcctgccatcgctgccacgcctgtctctgccattccggctgccctgggcgtcaacggctacagcccggtgcccacccagcccactgggcagcctgcccctgatgctctgtatcccaacggggttcacccctacccagcccagagccccgcggcccccgtggaccccctgcagcaggcctacgcggggatgcagcactacacagcagcctacccagcagcctacagcctggttgcacctgcgttcccgcagcctccagccctggtcgcccagcagcccccaccaccacctcaacagcagcagcagcagcagcagcagcaacagcagcagcagcaaagagaaggccctgatggctgcaacatcttcatctaccacctgccccaggagttcactgactcagagatcctccagatgtttgtcccctttggccacgtcatctcagccaaagtctttgttgaccgagccaccaatcaaagcaaatgttttggctttgtgagtttcgacaatccggccagtgcccaggctgccatccaggccatgaatggcttccagatcggcatgaagcgcctcaaagtccagctaaagcggcctaaggatgccaaccggccctactgagggcccccaggtctggagatcccagaggaaggggcgcctcacaccctcttcccacgactggccccggccctctccgcacacctgccctgggccttgactgggttctggggcaaacgctgcttcgtggcccccgggggcacaagacaccggcccctcccacccccctgcctctctgaagggccatggctatgcttccctggctccaagggcccatttcctcctagatgcccttttggcctttgtgagggagcgaggaacaggctcgaaggctccggggtatctgccttctgctgggctcctgtgacaggccttctgtacccagcgtttgtacttgcctcccccaacagtgggcctgttctacccgtgcaggccccaggagagccgcaggggcctgccacacactcccagctcaccctcaccccagcctcttccccacattaggggtttcttggaagctggctctcactcccctccaccctcagctagaggtaggatatccctgattcctgggctcccagccttaaaactcactgcctcccccaagggccccctctaaggagggtgtgggggagccctgagggctgcctctctgccagtcagccacagagaccctcctcctttcacgaggaaaagaccttcccctgaacccctaaaaatgtttacagtctctgctggttccctctgtgtaaataccactaccacccgtgcgttatccagcccgcccggcctggcccggacgctgccatctctctttctgggagtttagacaatgttgcccttggatttttttctctctcttaatttctccctttgctttggggggtaattgggtattgggaggaggggtgtggggaggggtcaaggggtttattacctgatcattttctttaggaagaggttttagggaaaagaaaatggggtgggggtgggggtggtaaggggagaccggggagtcagtttcagacagttctctatgcttaacttatttatttattgcattttacttttaaagagttggtcttttctgtctaaataaagaaaaaagtttaaaagcatc

SEQ ID NO: 2886 - protein, 465 aa, Homo sapiens; identical to SEQ ID NO: 131

SEQ ID NO: 2887 - DNA, 705 bp, Homo sapiens
cgagtccctcagagctgggatgagcaccctctgcaactataccccattccccaaccatcagcccctacagccattggaccctaagggtagcagaagtagtgttaggagctccagggaagggcggaagaagggctgggaaggcagccaggaggccctgaacatgccctcctcctgtgccctaccacccagaagaccggaagctctttgtggggatgctagggaagcagcagacagatgaggacgtccggaagatgtttgagcccttcgggaccatcgacgagtgcactgtgctccgggggccagatggcaccagcaaaggctgcgccttcgtgaagttccagacccacgctgaggcccaggcggccatcaacacccttcacagcagccggaccctgccaggtgcctcgtccagcctggtggtgaagtttgctgacactgagaaggagcgaggtctccgccgcatgcagcaggtggccacccagttgggcatgttcagccccatcgccctccagtttggagcctacagcgcctacacccaggccctgatgcagcagcaggcggccctggtagcggctcacagtgcctacctcagccccatggccaccatggctgccgtgcagatgcagcacatggctgccatcaatgccaatggcctcatcgccacccccatcaccccatcctcaggaaccagcacccctcctgcca

SEQ ID NO: 2888 - protein, 163 aa, Homo sapiens
MLGKQQTDEDVRKMFEPFGTIDECTVLRGPDGTSKGCAFVKFQTHAEAQAAINTLHSSRTLPGASSSLVVKFADTEKERGLRRMQQVATQLGMFSPIALQFGAYSAYTQALMQQQAALVAAHSAYLSPMATMAAVQMQHMAAINANGLIATPITPSSGTSTPP

SEQ ID NO: 2889 - DNA, 1772 bp, Homo sapiens
atcacttctgctgctccacacacccagagaaggagtggggtggggggtggttaacagggtatgctgggggtggaggatttggtgggggctgggaggtgggggaggggcccagaaaaccttcctgattctggagggaggcttgcagagcaggccctgcaggggccatcccatcccttctcctgcctccctcctccagagcaaatccttggtgcctggagggctctaaaggaggagttgctgtcccgtgctccttcgcaatttaccctgtgcacggaagtcctccagagctctaacctctccccgacccctgcagtatctccctttgttcagtcttcagtggaaatggagaaattcctagttccactctccatgttcttgtctggtgagaggacttggaaattactcctgcaggttgattttcttaaccagggtggggagtattataggaactggagaaagaggagaaggacttagtatttagtgtctgaaaatattttgctcttgaggactctgacagctggaaccacacctggttgccccactcatctgatggtggggcagtagttccagtgaccagaaaaattaaacctcaatttacattctgagggtgaggctagaggtaccctcaggaaaggtactggactgggagtcaggagacctggatttgaggactagccctgccctgccacttactagctgggcgaccttggacaagccactagtcccctctggacctcaacttccttatctgtaaaacaagggggtgggccaggcgatgtctaatcaggttccggtcagctccaggctccagcatgtggagatcctgtgtgtggcatcacttagcgccgagaagtgcagaagtcacagttgcccctgccccttctcaccctggatcctcacccaggtgtcgcatcatgccagtcagtctggccgactccaccaatggagatgggaacctgggacccagagagaaaggatgcagttccctcctggcataggctcccaggcacaaaaatagcatctcgagaaatacccacggctgatgtggattcgcacaaagagacacacaagtgtacagaccacagcaaggaccgtgctgacggggctctgagatagggagacaacagaaaaagacaaacagcgatggagatgaaaactgttgatttgtgaggggcctccacagagaaaaacagggaaggtaacaagaaatgcatgcatctacagcaagaaagatggatgctacagagagagagggggacttcctggtgatgagaggaggtggaaattatgctcagtgtcaggagggtgagtgaagacatctgcagcagaatttatgagagtgcacaaagaattgattctataaccttcctgccctcaagtggcttccacctcaagtggaagattcagactcggattgctaacgaaaagtacctaaggacccacaaagaagtagagtggctcataagtggtttcttcagagaaatatttttgaaaagaccagacaacatcctagaatttgctgcagactacttcacggatccaagacttcccaacaagattcacatgcagctaattaaagacaagaaagcggcttaattagcaaaatcatgatgctcagctgttgggagagaccagacggaatccagcctcgggggtcatctggaggcatgagagccctactgccatcagtgtgggtttccaagctgccttgggctctgtctactgtcgcaaaagcttttaaagatattcattaaacacggaccttcctgctc

SEQ ID NO: 2890 - protein, 102 aa, Homo sapiens
MLSVRRVSEDICSRIYESAQRIDSITFLPSSGFHLKWKIQTRIANEKYLRTHKEVEWLISGFFREIFLKRPDNILEFAADYFTDPRLPNKIHMQLIKDKKAA

SEQ ID NO: 2891 - DNA, 1973 bp, Homo sapiens
atcacttctgctgctccacacacccagagaaggagtggggtggggggtggttaacagggtatgctgggggtggaggatttggtgggggctgggaggtgggggaggggcccagaaaaccttcctgattctggagggaggcttgcagagcaggccctgcaggggccatcccatcccttctcctgcctccctcctccagagcaaatccttggtgcctggagggctctaaaggaggagttgctgtcccgtgctccttcgcaatttaccctgtgcacggaagtcctccagagctctaacctctccccgacccctgcagtatctccctttgttcagtcttcagtggaaatggagaaattcctagttccactctccatgttcttgtctggtgagaggacttggaaattactcctgcaggttgattttcttaaccagggtggggagtattataggaactggagaaagaggagaaggacttagtatttagtgtctgaaaatattttgctcttgaggactctgacagctggaaccacacctggttgccccactcatctgatggtggggcagtagttccagtgaccagaaaaattaaacctcaatttacattctgagggtgaggctagaggtaccctcaggaaaggtactggactgggagtcaggagacctggatttgaggactagccctgccctgccacttactagctgggcgaccttggacaagccactagtcccctctggacctcaacttccttatctgtaaaacaagggggtgggccaggcgatgtctaatcaggttccggtcagctccaggctccagcatgtggagatcctgtgtgtggcatcacttagcgccgagaagtgcagaagtcacagttgcccctgccccttctcaccctggatcctcacccaggtgtcgcatcatgccagtcagtctggccgactccaccaatggagatgggaacctgggacccagagagaaaggatgcagttccctcctggcataggctcccaggcacaaaaatagcatctcgagaaatacccacggctgatgtggattcgcacaaagagacacacaagtgtacagaccacagcaaggaccgtgctgacggggctctgagatagggagacaacagaaaaagacaaacagcgatggagatgaaaactgttgatttgtgaggggcctccacagagaaaaacagggaaggtaacaagaaatgcatgcatctacagcaagaaagatggatgctacagagagagagggggacttcctggtgatgagaggaggtggaaattatgctcagtgtcaggagggtgagtgaagacatctgcagcagaatttatgagagtgcacaaagaattgattctataaccttcctgccctcaagtggcttccacctcaagtggaagattcagactcggattgctaacgaaaagtacctaaggacccacaaagaagtagagtggctcataagtggtttcttcagagaaatatttttgaaaagaccagacaacatcctagaatttgctgcagactacttcacggatccaagacttcccaacaagattcacatgcagctaattaaagacaagaaagcggcttaattagcaaaatcatgatgctcagctgttgggagagaccagacggaatccagcctcgggggtcatctggaggcatgagagccctactgccatcagtgtgggtttccaagctgccttgggctctgtctactgtcgcaaaagcttttaaagatattcattaaacacggaccttcctgctctctctgctttatttcactcaagaggaggaagccatccttcaggggagggctgctgtgccccactttgacgtgtgaggcagccggcctgtttctgctttcagggcggccaggggcctcttgctgggtcagtgggctgtcgtgcccaccccctgggaagaacacagctgatcacgggggcacagaaacaagcaagtccatgct

SEQ ID NO: 2892 - protein, 102 aa, Homo sapiens; identical to SEQ ID NO: 2890

SEQ ID NO: 2893 - DNA, 455 bp, Homo sapiens
atggagacgctgccaggcttgctgcagcggcccgaccccggggcgcttagcgcagcgcagctggagcagctgcgaaaattcaagattcagactcggattgctaacgaaaagtacctaaggacccacaaagaagtagagtggctcataagtggtttcttcagagaaatatttttgaaaagaccagacaacatcctagaatttgctgcagactacttcacggatccaagacttcccaacaagattcacatgcagctaattaaagacaagaaagcggcttaattagcaaaatcatgatgctcagctgttgggagagaccagacggaatccagcctcgggggtcatctggaggcatgagagccctactgccatcagtgtgggtttccaagctgccttgggctctgtctactgtcgcaaaagcttttaaagatattcattaaacacggaccttcctgctc

SEQ ID NO: 2894 - protein, 92 aa, Homo sapiens
METLPGLLQRPDPGALSAAQLEQLRKFKIQTRIANEKYLRTHKEVEWLISGFFREIFLKRPDNILEFAADYFTDPRLPNKIHMQLIKDKKAA

SEQ ID NO: 2895 - DNA, 656 bp, Homo sapiens
atggagacgctgccaggcttgctgcagcggcccgaccccggggcgcttagcgcagcgcagctggagcagctgcgaaaattcaagattcagactcggattgctaacgaaaagtacctaaggacccacaaagaagtagagtggctcataagtggtttcttcagagaaatatttttgaaaagaccagacaacatcctagaatttgctgcagactacttcacggatccaagacttcccaacaagattcacatgcagctaattaaagacaagaaagcggcttaattagcaaaatcatgatgctcagctgttgggagagaccagacggaatccagcctcgggggtcatctggaggcatgagagccctactgccatcagtgtgggtttccaagctgccttgggctctgtctactgtcgcaaaagcttttaaagatattcattaaacacggaccttcctgctctctctgctttatttcactcaagaggaggaagccatccttcaggggagggctgctgtgccccactttgacgtgtgaggcagccggcctgtttctgctttcagggcggccaggggcctcttgctgggtcagtgggctgtcgtgcccaccccctgggaagaacacagctgatcacgggggcacagaaacaagcaagtccatgct

SEQ ID NO: 2896 - protein, 92 aa, Homo sapiens; identical to SEQ ID NO: 2894

SEQ ID NO: 2897 - DNA, 470 bp, Homo sapiens
gggactcggccagagaaatgggccgaaattactgccagacacatccgaccttagtaaaggcccctcatcctgaacaagcggcagaatgatattttatctattcagactcggattgctaacgaaaagtacctaaggacccacaaagaagtagagtggctcataagtggtttcttcagagaaatatttttgaaaagaccagacaacatcctagaatttgctgcagactacttcacggatccaagacttcccaacaagattcacatgcagctaattaaagacaagaaagcggcttaattagcaaaatcatgatgctcagctgttgggagagaccagacggaatccagcctcgggggtcatctggaggcatgagagccctactgccatcagtgtgggtttccaagctgccttgggctctgtctactgtcgcaaaagcttttaaagatattcattaaacacggaccttcctgctc

SEQ ID NO: 2898 - protein, 48 aa, Homo sapiens
MMLSCWERPDGIQPRGSSGGMRALLPSVWVSKLPWALSTVAKAFKDIH

SEQ ID NO: 2899 - DNA, 671 bp, Homo sapiens
gggactcggccagagaaatgggccgaaattactgccagacacatccgaccttagtaaaggcccctcatcctgaacaagcggcagaatgatattttatctattcagactcggattgctaacgaaaagtacctaaggacccacaaagaagtagagtggctcataagtggtttcttcagagaaatatttttgaaaagaccagacaacatcctagaatttgctgcagactacttcacggatccaagacttcccaacaagattcacatgcagctaattaaagacaagaaagcggcttaattagcaaaatcatgatgctcagctgttgggagagaccagacggaatccagcctcgggggtcatctggaggcatgagagccctactgccatcagtgtgggtttccaagctgccttgggctctgtctactgtcgcaaaagcttttaaagatattcattaaacacggaccttcctgctctctctgctttatttcactcaagaggaggaagccatccttcaggggagggctgctgtgccccactttgacgtgtgaggcagccggcctgtttctgctttcagggcggccaggggcctcttgctgggtcagtgggctgtcgtgcccaccccctgggaagaacacagctgatcacgggggcacagaaacaagcaagtccatgct

SEQ ID NO: 2900 - protein, 48 aa, Homo sapiens; identical to SEQ ID NO: 2898

SEQ ID NO: 2901 - DNA, 352 bp, Homo sapiens
tttgggccccaagatgggcctggagcagaaaacccagagaatccctgagccctctgatggctctctgtgcgtcagcaggcggaggagcaaacggtgcgactcgggactacttcacggatccaagacttcccaacaagattcacatgcagctaattaaagacaagaaagcggcttaattagcaaaatcatgatgctcagctgttgggagagaccagacggaatccagcctcgggggtcatctggaggcatgagagccctactgccatcagtgtgggtttccaagctgccttgggctctgtctactgtcgcaaaagcttttaaagatattcattaaacacggaccttcctgctc

SEQ ID NO: 2902 - protein, 48 aa, Homo sapiens; identical to SEQ ID NO: 2898

SEQ ID NO: 2903 - DNA, 553 bp, Homo sapiens
tttgggccccaagatgggcctggagcagaaaacccagagaatccctgagccctctgatggctctctgtgcgtcagcaggcggaggagcaaacggtgcgactcgggactacttcacggatccaagacttcccaacaagattcacatgcagctaattaaagacaagaaagcggcttaattagcaaaatcatgatgctcagctgttgggagagaccagacggaatccagcctcgggggtcatctggaggcatgagagccctactgccatcagtgtgggtttccaagctgccttgggctctgtctactgtcgcaaaagcttttaaagatattcattaaacacggaccttcctgctctctctgctttatttcactcaagaggaggaagccatccttcaggggagggctgctgtgccccactttgacgtgtgaggcagccggcctgtttctgctttcagggcggccaggggcctcttgctgggtcagtgggctgtcgtgcccaccccctgggaagaacacagctgatcacgggggcacagaaacaagcaagtccatgct

SEQ ID NO: 2904 - protein, 48 aa, Homo sapiens; identical to SEQ ID NO: 2898

SEQ ID NO: 2905 - DNA, 902 bp, Homo sapiens
caggttaattcccatcagataacatccaccacagaaaaggtaccaaccaagcagatggaatgacttagccaaataatgttaaccaggctttgttgctggcaccccaatgctggcaaagtgatcaatgaacggaggagccatggtggagcaaatgcaagggttcaacgtcatggactcatcaagtctgatctaactactgcatcagtgaatgtccagcttgccagcaacagagaccaacacttagcctgatgtcaccattcctcaaggaaaccgtctagccacttggtgcagcaaacctctgtgactcaaggaaatctcagttggatgtcctgtctcatctactcaagaccagtaagcaacacttacttaaaaagaacatattctctttatttctgcttgggatacaaatgttcagtttggatgatgagaatgaggcaagtactggagacaatggctggctctcctgtttgtcccaataaactccaatggaggaagaagctaaacaggttttggatggtttcggtctactgcatctagcttatcaaatctacagcctggtacttctggaacaggacttccctgccccagtgatgacagttaaagatggcaaaaatgaagaattcaacatgtatacgcagtgcagtctgatgtcttcagatgttctctaaaattctgtatttggtcagagctgggagtgagatcagggtgcttgcacatttctgctccactgctcccgattctgctttgctgccttggagggagagtagatttagatctgggggctggtgggggccatagccttggcagcttgctgggctaaccagtacttatatcttttggtcttgggcttctcaaagttcacgacagacataggcactctcacagtatcaagcccatttacc

SEQ ID NO: 2906 - protein, 70 aa, Homo sapiens
MSCLIYSRPVSNTYLKRTYSLYFCLGYKCSVWMMRMRQVLETMAGSPVCPNKLQWRKKLNRFWMVSVYCI

SEQ ID NO: 2907 - DNA, 1882 bp, Homo sapiens
ccaagtagtgtatttaggaggaaggaggactggtcagtatgtttaagggccagtctttccataatctctgccaaatggaccttctttcatccagtttttatggtcttctgtccagtactgagaccctccccagagggaactgtcgcggccttaccatagttgcttttttttctacggtttacatagcttgtgatttagaattctcctttattagcttaaatactgcagtataatgattaagggtcaggctcctcctggagctggcagagttttccaagggatcccatcctttaccacttttaggtagatttgaagtaaggaaaagtgagagcatcattcattctccggtcagtatccagtcatcacagaacgttagaattaaaagttagcccagcaactggagctacagcaaagcccacactttcaagaggaagagcgtcttttccggcgtcagtccacctaacactcattccattatcagtcagtaattctaggcgtccgtcacctctgccaaaaagcaaaaataggcaagccgcggtgccatctgttccccggcccgctccccatactttcgctcagccgtaccggcgcgccgcaggcagcactggcgggggcctttcctgccgccgacgccggggtcctccctcaggtctcattctgtgcctgtgaacatggcggcgcccgttgtcacggccccgggcagagctctgctgcgggcgggcgctggacggctgcttcggggaggcgtccaggagctactgcggccgcgacatgaagggaacgcccctgacctggcctgcaacttcagcctttctcaaaatcggggcacggtcatcgtggagcgctggtggaaggtaccgctggccggggagggccggaagccgcgcctgcaccggcgacatcgcgtctataagctggtggaggacacgaagcatcggcccaaagaaaacctggagctcatcctgacgcagtcggtggagaatgttggagtccggggtgacctggtctcagtgaagaaatctttaggccggaatcgactccttcctcagggactggctgtatatgcatcccctgaaaacaagaagctgtttgaagaggagaaattgctgagacaagaaggaaaattagagaagatccagaccaaggcaggtgaggcgacagtgaaatttctaaaaagctgtcgcctggaggtagggatgaagaacaatgtcaaatgggagctgaaccctgaaatagttgcccgccacttctttaagaatcttggtgttgtggttgccccacatacattaaagttaccagaagagcctatcacacggtggggcgagtattggtgtgaggtgacggtaaatgggcttgatactgtgagagtgcctatgtctgtcgtgaactttgagaagcccaagaccaaaagatataagtactggttagcccagcaagctgccaaggctatggcccccaccagcccccagatctaaatctactctccctccaaggcagcaaagcagaatcgggagcagtggagcagaaatgtgcaagcaccctgatctcactcccagctctgaccaaatacagaattttagagaacatctgaagacatcagactgcactgcgtatacatgttgaattcttcatttttgccatctttaactgtcatcactggggcagggaagtcctgttccagaagtaccaggctgtagatttgataagctagatgcagtagaccgaaaccatccaaaacctgtttagcttcttcctccattggagtttattgggacaaacaggagagccagccattgtctccagtacttgcctcattctcatcatccaaactgaacatttgtatcccaagcagaaataaagagaatatgttctttttaagtaa

SEQ ID NO: 2908 - protein, 267 aa, Homo sapiens [sequence omitted]

SEQ ID NO: 2909 - DNA, 1917 bp, Homo sapiens
ccaagtagtgtatttaggaggaaggaggactggtcagtatgtttaagggccagtctttccataatctctgccaaatggaccttctttcatccagtttttatggtcttctgtccagtactgagaccctccccagagggaactgtcgcggccttaccatagttgcttttttttctacggtttacatagcttgtgatttagaattctcctttattagcttaaatactgcagtataatgattaagggtcaggctcctcctggagctggcagagttttccaagggatcccatcctttaccacttttaggtagatttgaagtaaggaaaagtgagagcatcattcattctccggtcagtatccagtcatcacagaacgttagaattaaaagttagcccagcaactggagctacagcaaagcccacactttcaagaggaagagcgtcttttccggcgtcagtccacctaacactcattccattatcagtcagtaattctaggcgtccgtcacctctgccaaaaagcaaaaataggcaagccgcggtgccatctgttccccggcccgctccccatactttcgctcagccgtaccggcgcgccgcaggcagcactggcgggggcctttcctgccgccgacgccggggtcctccctcaggtctcattctgtgcctgtgaacatggcggcgcccgttgtcacggccccgggcagagctctgctgcgggcgggcgctggacggctgcttcggggaggcgtccaggagctactgcggccgcgacatgaagggaacgcccctgacctggcctgcaacttcagcctttctcaaaatcggggcacggtcatcgtggagcgctggtggaaggtaccgctggccggggagggccggaagccgcgcctgcaccggcgacatcgcgtctataagctggtggaggacacgaagcatcggcccaaagaaaacctggagctcatcctgacgcagtcggtggagagtaaggcccgggccgaggcgcttcctctcaggctgatgttggagtccggggtgacctggtctcagtgaagaaatctttaggccggaatcgactccttcctcagggactggctgtatatgcatcccctgaaaacaagaagctgtttgaagaggagaaattgctgagacaagaaggaaaattagagaagatccagaccaaggcaggtgaggcgacagtgaaatttctaaaaagctgtcgcctggaggtagggatgaagaacaatgtcaaatgggagctgaaccctgaaatagttgcccgccacttctttaagaatcttggtgttgtggttgccccacatacattaaagttaccagaagagcctatcacacggtggggcgagtattggtgtgaggtgacggtaaatgggcttgatactgtgagagtgcctatgtctgtcgtgaactttgagaagcccaagaccaaaagatataagtactggttagcccagcaagctgccaaggctatggcccccaccagcccccagatctaaatctactctccctccaaggcagcaaagcagaatcgggagcagtggagcagaaatgtgcaagcaccctgatctcactcccagctctgaccaaatacagaattttagagaacatctgaagacatcagactgcactgcgtatacatgttgaattcttcatttttgccatctttaactgtcatcactggggcagggaagtcctgttccagaagtaccaggctgtagatttgataagctagatgcagtagaccgaaaccatccaaaacctgtttagcttcttcctccattggagtttattgggacaaacaggagagccagccattgtctccagtacttgcctcattctcatcatccaaactgaacatttgtatcccaagcagaaataaagagaatatgttctttttaagtaa

SEQ ID NO: 2910 - protein, 125 aa, Homo sapiens
MAAPVVTAPGRALLRAGAGRLLRGGVQELLRPRHEGNAPDLACNFSLSQNRGTVIVERWWKVPLAGEGRKPRLHRRHRVYKLVEDTKHRPKENLELILTQSVESKARAEALPLRLMLESGVTWSQ

SEQ ID NO: 2911 - DNA, 1687 bp, Homo sapiens
ccaagtagtgtatttaggaggaaggaggactggtcagtatgtttaagggccagtctttccataatctctgccaaatggaccttctttcatccagtttttatggtcttctgtccagtactgagaccctccccagagggaactgtcgcggccttaccatagttgcttttttttctacggtttacatagcttgtgatttagaattctcctttattagcttaaatactgcagtataatgattaagggtcaggctcctcctggagctggcagagttttccaagggatcccatcctttaccacttttaggtagatttgaagtaaggaaaagtgagagcatcattcattctccggtcagtatccagtcatcacagaacgttagaattaaaagttagcccagcaactggagctacagcaaagcccacactttcaagaggaagagcgtcttttccggcgtcagtccacctaacactcattccattatcagtcagtaattctaggcgtccgtcacctctgccaaaaagcaaaaataggcaagccgcggtgccatctgttccccggcccgctccccatactttcgctcagccgtaccggcgcgccgcaggcagcactggcgggggcctttcctgccgccgacgccggggtcctccctcaggtctcattctgtgcctgtgaacatggcggcgcccgttgtcacggccccgggcagagctctgctgcgggcgggcgctggacggctgcttcggggaggcgtccaggagctactgcggccgcgacatgaagggaacgcccctgacctggcctgcaacttcagcctttctcaaaatcggggcacggtcatcgtggagcgctggtggaaggtaccgctggccggggagggccggaagccgcgcctgcaccggcgacatcgcgtctataagctggtggaggacacgaagcatcggcccaaagaaaacctggagctcatcctgacgcagtcggtggagaatgttggagtccggggtgacctggtctcagtgaagaaatctttaggccggaatcgactccttcctcagggactggctgtatatgcatcccctgaaaacaagaagctgtttgaagaggagaaattgctgagacaagaaggaaaattagagaagatccagaccaaggcaggtaaatgggcttgatactgtgagagtgcctatgtctgtcgtgaactttgagaagcccaagaccaaaagatataagtactggttagcccagcaagctgccaaggctatggcccccaccagcccccagatctaaatctactctccctccaaggcagcaaagcagaatcgggagcagtggagcagaaatgtgcaagcaccctgatctcactcccagctctgaccaaatacagaattttagagaacatctgaagacatcagactgcactgcgtatacatgttgaattcttcatttttgccatctttaactgtcatcactggggcagggaagtcctgttccagaagtaccaggctgtagatttgataagctagatgcagtagaccgaaaccatccaaaacctgtttagcttcttcctccattggagtttattgggacaaacaggagagccagccattgtctccagtacttgcctcattctcatcatccaaactgaacatttgtatcccaagcagaaataaagagaatatgttctttttaagta

SEQ ID NO: 2912 - protein, 163 aa, Homo sapiens
MAAPVVTAPGRALLRAGAGRLLRGGVQELLRPRHEGNAPDLACNFSLSQNRGTVIVERWWKVPLAGEGRKPRLHRRHRVYKLVEDTKHRPKENLELILTQSVENVGVRGDLVSVKKSLGRNRLLPQGLAVYASPENKKLFEEEKLLRQEGKLEKIQTKAGKWA

SEQ ID NO: 2913 - DNA, 1779 bp, Homo sapiens
ccaagtagtgtatttaggaggaaggaggactggtcagtatgtttaagggccagtctttccataatctctgccaaatggaccttctttcatccagtttttatggtcttctgtccagtactgagaccctccccagagggaactgtcgcggccttaccatagttgcttttttttctacggtttacatagcttgtgatttagaattctcctttattagcttaaatactgcagtataatgattaagggtcaggctcctcctggagctggcagagttttccaagggatcccatcctttaccacttttaggtagatttgaagtaaggaaaagtgagagcatcattcattctccggtcagtatccagtcatcacagaacgttagaattaaaagttagcccagcaactggagctacagcaaagcccacactttcaagaggaagagcgtcttttccggcgtcagtccacctaacactcattccattatcagtcagtaattctaggcgtccgtcacctctgccaaaaagcaaaaataggcaagccgcggtgccatctgttccccggcccgctccccatactttcgctcagccgtaccggcgcgccgcaggcagcactggcgggggcctttcctgccgccgacgccggggtcctccctcaggtctcattctgtgcctgtgaacatggcggcgcccgttgtcacggccccgggcagagctctgctgcgggcgggcgctggacggctgcttcggggaggcgtccaggagctactgcggccgcgacatgaagggaacgcccctgacctggcctgcaacttcagcctttctcaaaatcggggcacggtcatcgtggagcgctggtggaaggtaccgctggccggggagggccggaagccgcgcctgcaccggcgacatcgcgtctataagctggtggaggacacgaagcatcggcccaaagaaaacctggagctcatcctgacgcagtcggtggagaatgttggagtccggggtgacctggtctcagtgaagaaatctttaggccggaatcgactccttcctcagggactggctgtatatgcatcccctgaaaacaagaagctgtttgaagaggagaaattgctgagacaagaaggaaaattagagaagatccagaccaaggcaggtgaggcgcttggtgttgtggttgccccacatacattaaagttaccagaagagcctatcacacggtggggcgagtattggtgtgaggtgacggtaaatgggcttgatactgtgagagtgcctatgtctgtcgtgaactttgagaagcccaagaccaaaagatataagtactggttagcccagcaagctgccaaggctatggcccccaccagcccccagatctaaatctactctccctccaaggcagcaaagcagaatcgggagcagtggagcagaaatgtgcaagcaccctgatctcactcccagctctgaccaaatacagaattttagagaacatctgaagacatcagactgcactgcgtatacatgttgaattcttcatttttgccatctttaactgtcatcactggggcagggaagtcctgttccagaagtaccaggctgtagatttgataagctagatgcagtagaccgaaaccatccaaaacctgtttagcttcttcctccattggagtttattgggacaaacaggagagccagccattgtctccagtacttgcctcattctcatcatccaaactgaacatttgtatcccaagcagaaataaagagaatatgttctttttaagta

SEQ ID NO: 2914 - protein, 233 aa, Homo sapiens
MAAPVVTAPGRALLRAGAGRLLRGGVQELLRPRHEGNAPDLACNFSLSQNRGTVIVERWWKVPLAGEGRKPRLHRRHRVYKLVEDTKHRPKENLELILTQSVENVGVRGDLVSVKKSLGRNRLLPQGLAVYASPENKKLFEEEKLLRQEGKLEKIQTKAGEALGVVVAPHTLKLPEEPITRWGEYWCEVTVNGLDTVRVPMSVVNFEKPKTKRYKYWLAQQAAKAMAPTSPQI

SEQ ID NO: 2915 - DNA, 1622 bp, Homo sapiens
ccaagtagtgtatttaggaggaaggaggactggtcagtatgtttaagggccagtctttccataatctctgccaaatggaccttctttcatccagtttttatggtcttctgtccagtactgagaccctccccagagggaactgtcgcggccttaccatagttgcttttttttctacggtttacatagcttgtgatttagaattctcctttattagcttaaatactgcagtataatgattaagggtcaggctcctcctggagctggcagagttttccaagggatcccatcctttaccacttttaggtagatttgaagtaaggaaaagtgagagcatcattcattctccggtcagtatccagtcatcacagaacgttagaattaaaagttagcccagcaactggagctacagcaaagcccacactttcaagaggaagagcgtcttttccggcgtcagtccacctaacactcattccattatcagtcagtaattctaggcgtccgtcacctctgccaaaaagcaaaaataggcaagccgcggtgccatctgttccccggcccgctccccatactttcgctcagccgtaccggcgcgccgcaggcagcactggcgggggcctttcctgccgccgacgccggggtcctccctcaggtctcattctgtgcctgtgaacatggcggcgcccgttgtcacggccccgggcagagctctgctgcgggcgggcgctggacggctgcttcggggaggcgtccaggagctactgcggccgcgacatgaagggaacgcccctgacctggcctgcaacttcagcctttctcaaaatcggatgttggagtccggggtgacctggtctcagtgaagaaatctttaggccggaatcgactccttcctcagggactggctgtatatgcatcccctgaaaacaagaagctgtttgaagaggagaaattgctgagacaagaaggaaaattagagaagatccagaccaaggcaggtgaggcgcttggtgttgtggttgccccacatacattaaagttaccagaagagcctatcacacggtggggcgagtattggtgtgaggtgacggtaaatgggcttgatactgtgagagtgcctatgtctgtcgtgaactttgagaagcccaagaccaaaagatataagtactggttagcccagcaagctgccaaggctatggcccccaccagcccccagatctaaatctactctccctccaaggcagcaaagcagaatcgggagcagtggagcagaaatgtgcaagcaccctgatctcactcccagctctgaccaaatacagaattttagagaacatctgaagacatcagactgcactgcgtatacatgttgaattcttcatttttgccatctttaactgtcatcactggggcagggaagtcctgttccagaagtaccaggctgtagatttgataagctagatgcagtagaccgaaaccatccaaaacctgtttagcttcttcctccattggagtttattgggacaaacaggagagccagccattgtctccagtacttgcctcattctcatcatccaaactgaacatttgtatcccaagcagaaataaagagaatatgttctttttaagta

SEQ ID NO: 2916 - protein, 61 aa, Homo sapiens
MAAPVVTAPGRALLRAGAGRLLRGGVQELLRPRHEGNAPDLACNFSLSQNRMLESGVTWSQ

SEQ ID NO: 2917 - DNA, 1164 bp, Homo sapiens
ccaagtagtgtatttaggaggaaggaggactggtcagtatgtttaagggccagtctttccataatctctgccaaatggaccttctttcatccagtttttatggtcttctgtccagtactgagaccctccccagagggaactgtcgcggccttaccatagttgcttttttttctacggtttacatagcttgtgatttagaattctcctttattagcttaaatactgcagtataatgattaagggtcaggctcctcctggagctggcagagttttccaagggatcccatcctttaccacttttaggtagatttgaagtaaggaaaagtgagagcatcattcattctccggtcagtatccagtcatcacagaacgttagaattaaaagttagcccagcaactggagctacagcaaagcccacactttcaagaggaagagcgtcttttccggcgtcagtccacctaacactcattccattatcagtcagtaattctaggcgtccgtcacctctgccaaaaagcaaaaataggcaagccgcggtgccatctgttccccggcccgctccccatactttcgctcagccgtaccggcgcgccgcaggcagcactggcgggggcctttcctgccgccgacgccggggtcctccctcaggtctcattctgtgcctgtgaacatggcggcgcccgttgtcacggccccgggcagagctctgctgcgggcgggcgctggacggctgcttcggggaggcgtccaggagctactgcggccgcgacatgaagggaacgcccctgacctggcctgcaacttcagcctttctcaaaatcggggcacggtcatcgtggagcgctggtggaaggtaccgctggccggggagggccggaagccgcgcctgcaccggcgacatcgcgtctataagctggtggaggacacgaagcatcggcccaaagaaaacctggagctcatcctgacgcagtcggtggagaatgttggagtccggggtgacctggtctcagtgaagaaatctttaggccggaatcgactccttcctcagggactggctgtatatgcatcccctgaaaacaagaagctgtttgaagaggagaaattggtgagctcaaaggaaggacagagagacttggggagataaaacttcttttctcttgcag

SEQ ID NO: 2918 - protein, 157 aa, Homo sapiens
MAAPVVTAPGRALLRAGAGRLLRGGVQELLRPRHEGNAPDLACNFSLSQNRGTVIVERWWKVPLAGEGRKPRLHRRHRVYKLVEDTKHRPKENLELILTQSVENVGVRGDLVSVKKSLGRNRLLPQGLAVYASPENKKLFEEEKLVSSKEGQRDLGR

SEQ ID NO: 2919 - DNA, 1345 bp, Homo sapiens
ccaagtagtgtatttaggaggaaggaggactggtcagtatgtttaagggccagtctttccataatctctgccaaatggaccttctttcatccagtttttatggtcttctgtccagtactgagaccctccccagagggaactgtcgcggccttaccatagttgcttttttttctacggtttacatagcttgtgatttagaattctcctttattagcttaaatactgcagtataatgattaagggtcaggctcctcctggagctggcagagttttccaagggatcccatcctttaccacttttaggtagatttgaagtaaggaaaagtgagagcatcattcattctccggtcagtatccagtcatcacagaacgttagaattaaaagttagcccagcaactggagctacagcaaagcccacactttcaagaggaagagcgtcttttccggcgtcagtccacctaacactcattccattatcagtcagtaattctaggcgtccgtcacctctgccaaaaagcaaaaataggcaagccgcggtgccatctgttccccggcccgctccccatactttcgctcagccgtaccggcgcgccgcaggcagcactggcgggggcctttcctgccgccgacgccggggtcctccctcaggtctcattctgtgcctgtgaacatggcggcgcccgttgtcacggccccgggcagagctctgctgcgggcgggcgctggacggctgcttcggggaggcgtccaggagctactgcggccgcgacatgaagggaacgcccctgacctggcctgcaacttcagcctttctcaaaatcggggcacggtcatcgtggagcgctggtggaaggtaccgctggccggggagggccggaagccgcgcctgcaccggcgacatcgcgtctataagctggtggaggacacgaagcatcggcccaaagaaaacctggagctcatcctgacgcagtcggtggagagtaaggcccgggccgaggcgcttcctctcaggctggtccggtttggcatcagctttttctagcccgtccccctcaactatttgccttgctttttctttgtggaaacaatccaactctatatgtgagaagaggaagccataaaaactattgtgattgtgacactggcctccagcattgaaaattaaaacataaaggcagcaacatcattaacagtgtgtggggagaggagcctgacaatttgtgccacagatactgaaatcctccatgggacgacaactccctctatacaggggatattaaatttatacatcaagttctaaagaaactaattagcagtctcttaaatcttgttcctagtgaatat

SEQ ID NO: 2920 - protein, 123 aa, Homo sapiens
MAAPVVTAPGRALLRAGAGRLLRGGVQELLRPRHEGNAPDLACNFSLSQNRGTVIVERWWKVPLAGEGRKPRLHRRHRVYKLVEDTKHRPKENLELILTQSVESKARAEALPLRLVRFGISFF

SEQ ID NO: 2921 - DNA, 1039 bp, Homo sapiens
tgatgttgctgcctttatgttttaattttcaatgctggaggccagtgtcacaatcacaatagtttttatggcttcctcttctcacatatagagttggattgtttccacaaagaaaaagcaaggcaaatagttgagggggacgggctagaaaaagctgatgccaaaccggaccagcctgagaggaagcgcctcggcccgggccttactctccaccgactgcgtcaggatgagctccaggttttctttgggccgatgcttcgtgtcctccaccagcttatagacgcgatgtcgccggtgcaggcgcggcttccggccctccccggccagcggtaccttccaccagcgctccacgatgaccgtgccctggcggccaggaaagcgacgcatcacttataaggaagaggaggacttgacactccagccccgttcctgcctccagtgctcctgagtccctagtaggcctccaggagggcaaaagcaccgagcagggtaaccacgaccagcttaaagaactgtattcggctgggaacttgacggtgctggctactgaccccctgctccaccaggacccagtacagttagactttcacttccgccttacctcccagacctctgcccattggcacggccttctctgtgaccgtcgactcttcttggatatcccatatcaggccttggatcaaggcaaccgggaaagtttgactgcaaccctggagtacgtggaagagaagacaaatgtggactctgtgtttgtgaacttccagaatgatcggaacgacagaggtgccctgctgcgggccttcagctacatgggctttgaggtggtcagaccagatcaccctgccctccctcccttggacaatgtcatctttatggtgtatccccttgaaagggatgttggccacctgcccagtgagcctccttgaacatgcttattccaacgctttgaggggctggaagccttgacacatggaatcaggggcccgggatgtgattcaggacactttccatcctaggaataaagggtagtgcaatcatc

SEQ ID NO: 2922 - protein, 66 aa, Homo sapiens
MIGTTEVPCCGPSATWALRWSDQITLPSLPWTMSSLWCIPLKGMLATCPVSLLEHAYSNALRGWKP

SEQ ID NO: 2923 - DNA, 863 bp, Homo sapiens
tgatgttgctgcctttatgttttaattttcaatgctggaggccagtgtcacaatcacaatagtttttatggcttcctcttctcacatatagagttggattgtttccacaaagaaaaagcaaggcaaatagttgagggggacgggctagaaaaagctgatgccaaaccggaccagcctgagaggaagcgcctcggcccgggccttactctccaccgactgcgtcaggatgagctccaggttttctttgggccgatgcttcgtgtcctccaccagcttatagacgcgatgtcgccggtgcaggcgcggcttccggccctccccggccagcggtaccttccaccagcgctccacgatgaccgtgccctggcggccaggaaagcgacgcatcacttataaggaagaggaggacttgacactccagccccgttcctgcctccagtgctcctgagtccctagtaggcctccaggagggcaaaagcaccgagcagggtaaccacgaccagcttaaagaactgtattcgtttgactgcaaccctggagtacgtggaagagaagacaaatgtggactctgtgtttgtgaacttccagaatgatcggaacgacagaggtgccctgctgcgggccttcagctacatgggctttgaggtggtcagaccagatcaccctgccctccctcccttggacaatgtcatctttatggtgtatccccttgaaagggatgttggccacctgcccagtgagcctccttgaacatgcttattccaacgctttgaggggctggaagccttgacacatggaatcaggggcccgggatgtgattcaggacactttccatcctaggaataaagggtagtgcaatcatc

SEQ ID NO: 2924 - protein, 66 aa, Homo sapiens; identical to SEQ ID NO: 2922

SEQ ID NO: 2925 - DNA, 382 bp, Homo sapiens
actgaggagtgtctctgcccagccgcgaccccatctgggaggtgaggagcatctctgcccgtccgccctgtctgagaagtgaggagcccctccgcccggcagccgcctcgtctgggaagtgaggggcgtctccgcccggcagctgccccgtccgggaggctcagtcacctttcccggttgccttgatccaaggcctgatatgggatatccaagaagagtcgacggtcacagagaaggccgtgccaatgggcagaggtctgggaggtctcattctgtgcctgtgaacatggcggcgcccgttgtcacggccccgggcagagctctgctgcgggcgggcgctggacggctgcttcggggaggcgtccaggagctactgcggccg

SEQ ID NO: 2926 - protein, 60 aa, Homo sapiens
MGYPRRVDGHREGRANGQRSGRSHSVPVNMAAPVVTAPGRALLRAGAGRLLRGGVQELLR

SEQ ID NO: 2927 - DNA, 741 bp, Homo sapiens
gttcacaggcacagaatgagacctgagggaggaccccggcgtcggcggcaggaaaggcccccgccagtgctgcctgcggcgcgccgcatcacttataaggaagaggaggacttgacactccagccccgttcctgcctccagtgctcctgagtccctagtaggcctccaggagggcaaaagcaccgagcagggtaaccacgaccagcttaaagaactgtattcggctgggaacttgacggtgctggctactgaccccctgctccaccaggacccagtacagttagactttcacttccgccttacctcccagacctctgcccattggcacggccttctctgtgaccgtcgactcttcttggatatcccatatcaggccttggatcaaggcaaccgggaaagtttgactgcaaccctggagtacgtggaagagaagacaaatgtggactctgtgtttgtgaacttccagaatgatcggaacgacagaggtgccctgctgcgggccttcagctacatgggctttgaggtggtcagaccagatcaccctgccctccctcccttggacaatgtcatctttatggtgtatccccttgaaagggatgttggccacctgcccagtgagcctccttgaacatgcttattccaacgctttgaggggctggaagccttgacacatggaatcaggggcccgggatgtgattcaggacactttccatcctaggaataaagggtagtgcaatcatc

SEQ ID NO: 2928 - protein, 66 aa, Homo sapiens; identical to SEQ ID NO: 2922

SEQ ID NO: 2929 - DNA, 3790 bp, Homo sapiens
gaaagtatggggagcgggccggggaacagatggcaccgcggcttgcctatttttgctttttggcagaggtgacggacgcctagaattactgactgataatggaatgagtgttaggtggactgacgccggaaaagacgctcttcctcttgaaagtgtgggctttgctgtagctccagttgctgggctaacttttaattctaacgttctgtgatgactggatactgaccggagaatgaatgatgctctcacttttccttacttcaaatctacctaaaagtggtaaaggatgggatcccttggaaaactctgccagctccaggaggagcctgacccttaatcattatactgcagtatttaagctaataaaggagaattctaaatcacaagctatgtaaaccgtagaaaaaaaagcaactatggtaaggccgcgacagttccctctggggagggtctcagtactggacagaagaccataaaaactggatgaaagaaggtccatttggcagagattatggaaagactggcccttaaacatactgaccagtcctccttcctcctaaatacactacttggcctcctggacaccggtcttcttcagtctcgtttgctgatttctccttttctccccgcttcttagaatgccctcgggactccgtttttgaacctttactcttctcagtatacactcactgttgatctcatccagtctcgtggcttacaataccatttataagccaatgactcccaaatttctagttccatcctagacatctcccaaactcgtctcaaatattcaactgtttattcgtcattttcctcttacgtatccaaaggacacctcaaagttaactgtcccaaactaatttatttattcccccctcgcccccaaaactgccccatctgcagcctttttcctctcagttgacagaaactccattctttccattctaactcttttctctcatactccatcaggaaatcctgtgggttctacctttaaattacagatagtccctgacttggatttacaatttttgagtttgtgatggtgtgaaagtgatgtgcactcagtaggacatcaataagttacatgaaatattcaacactttattataaaataggctttgtgttagatgattttacccaactgtcggataagttgtctgagcatgtttaagataggctaggctaagctatggtgtttggtaggtgtattatatgcattttcaacttatgatactttcaacatacgatgggtttatcaggacataaccctattttaagtcaaggagcacttgtatttccagaatccagccacttgtcaccacctccaatgctctaccttggaataagacactactttctcctggattactgcaatagtcccctaaaagatatcccttaattctctacagtttataattctatgtagcttatttatagcagccagaatgatctttttaaagcataagtcagatcatgtcattcttccacccaaaactttgtaatgacttcctcctttactcaaggtaaaagaaaaaggccatcagatggtctacaaggccatacatactctgaccccattagctcctctctaatttacactgctccacccacagtggcctccttgtttcttgaaaacaccaggcacgtttcctgctcagggcttttgcactggctgcttttgcgttggatgctcttatcctcagatgctggcttggttaacaacctcacatcctccaagtgtttaattaaatgtcagtttttttcagtgagagatcaccctatttcttactgtaaccctgacccatccccttcacattccttatcttcctttatcttgctctattccccccaccccatagcagttaccttctaacatactaaacaatttactatgtttattttctaggtttgtcctctcacttttagaagatacgttccatagggcagggatttgttttgttcactgatgtatcatctcaagcacctagaatagtgcctggctaatagtagaccctcaataaatatttgttgaatggataaatatgcagaggtctcaaagtggcagtcccagaaccaaattttgcttacaatgttgtttttttatcaacaattttttagtagttgatttttttttttttttgagttggagtctcgctatgttgcccaggctggagtgcagtggcacgatctcagctcactgcaagctccgcctcctgggttcacgccattctcctgcctcagcctcccgtgtagctgggaatacaggcgcctgccaccacgcccggctaattttttgtatttttagtacagacagagtttcatcgtgttagccaggatggtctcgatctcctgacctcgtgatccgcccgcctcggcctcccaaagcgctgggattacagacgtgagccaccgtgcccggcccagtagtcgatattttttaaaattggtgagatttactacaaaactgtctttccagtttctgttcaaaaatcatacgatacagcaccatcaagtctgcattcttgcatggaactggatggaattgagttgtgtggacttcctttagataacgtgtgagctttcctattttgctacagccctaccctgccactccactaatttccataagctgtctaggcccctgaaggggcctagacaattagtttgcaattcctaccctacaaggatcctgggttattaagggtagggatgataataaaaatactcaactggtatgaactgggaaccaactaatcaggtcaccactggatcagagccttggaagagtcagataccaactctttacttgctggattttgggggaaggggagtgtccacagaggagcagggtgggtgggcacaagtgctcaggcagggcttttggccaaccagtacagaagtcttcaagttctattttttaatcattcatacagccataacatgcatactagtcgaatatgagccttggataagggattagggtagataagcagcagagtggagtcctgaggtgacataagggctgaccccttatccatgtcatagtgcccactgggtcacaatgccaccaggttgcctaaacctctgccacccacctgtgaacttcactttgccacagggaggcactgaactgaaaaactgccttgtaagaggtgtcgcccctctgtctactccctttcttatatcaagaggggaaaaacacgtaactacctctacccgatctggtcaccatacgcctattacctttactgttacaagtaccggatcactctccgggagaagatgctgcctcgttgttataaaagcatcacttataaggaagaggaggacttgacactccagccccgttcctgcctccagtgctcctgagtccctagtaggcctccaggagggcaaaagcaccgagcagggtaaccacgaccagcttaaagaactgtattcgtttgactgcaaccctggagtacgtggaagagaagacaaatgtggactctgtgtttgtgaacttccagaatgatcggaacgacagaggtgccctgctgcgggccttcagctacatgggctttgaggtggtcagaccagatcaccctgccctccctcccttggacaatgtcatctttatggtgtatccccttgaaagggatgttggccacctgcccagtgagcctccttgaacatgcttattccaacgctttgaggggctggaagccttgacacatggaatcaggggcccgggatgtgattcaggacactttccatcctaggaataaagggtagtgcaatcatc

SEQ ID NO: 2930 - protein, 90 aa, Homo sapiens
MPPGCLNLCHPPVNFTLPQGGTELKNCLVRGVAPLSTPFLISRGEKHVTTSTRSGHHTPITFTVTSTGSLSGRRCCLVVIKASLIRKRRT

SEQ ID NO: 2931 - DNA, 424 bp, Homo sapiens
gtaaagagttggtatctgactcttccaaggctctgatccagtggtgacctgattagttggttcccagttcataccagttgagtatttttattatcatccctacccttaataacccaggatccttgtagggtaggaattgcaaactaattgtctaggccccttcaggggcctagacagcttatggaaattagtggagtggcagggtagggctgtagcaaaataggaaagctcacacgttatctaaaggaagtccacacaactcaattccatccagttccatgcaagaatgcagacttgatggtgctgtatcgtatgatttttgaacagaaactggaaagacagttttgtagtaaatctcaccaattttaaaaaatatcgactactgggcaacatagcgagactccaactcaaaaaaaaaaaaaaa

SEQ ID NO: 2932 - protein, 35 aa, Homo sapiens
FLNRNWKDSFVVNLTNFKKYRLLGNIARLQLKKKK

SEQ ID NO: 2933 - DNA, 889 bp, Homo sapiens
gttgcctaaacctctgccacccacctgtgaacttcactttgccacagggaggcactgaactgaaaaactgccttgtaagaggtgtcgcccctctgtctactccctttcttatatcaagaggggaaaaacacgtaactacctctacccgatctggtcaccatacgcctattacctttactgttacaagtaccggatcactctccgggagaagatgctgcctcgttgttataaaagcatcacttataaggaagaggaggacttgacactccagccccgttcctgcctccagtgctcctgagtccctagtaggcctccaggagggcaaaagcaccgagcagggtaaccacgaccagcttaaagaactgtattcggctgggaacttgacggtgctggctactgaccccctgctccaccaggacccagtacagttagactttcacttccgccttacctcccagacctctgcccattggcacggccttctctgtgaccgtcgactcttcttggatatcccatatcaggccttggatcaaggcaaccgggaaagtttgactgcaaccctggagtacgtggaagagaagacaaatgtggactctgtgtttgtgaacttccagaatgatcggaacgacagaggtgccctgctgcgggccttcagctacatgggctttgaggtggtcagaccagatcaccctgccctccctcccttggacaatgtcatctttatggtgtatccccttgaaagggatgttggccacctgcccagtgagcctccttgaacatgcttattccaacgctttgaggggctggaagccttgacacatggaatcaggggcccgggatgtgattcaggacactttccatcctaggaataaagggtagtgcaatcatc

SEQ ID NO: 2934 - protein, 66 aa, Homo sapiens; identical to SEQ ID NO: 2922

SEQ ID NO: 2935 - DNA, 314 bp, Homo sapiens
cccctctgtctactccctttcttatatcaagaggggaaaaacacgtaactacctctacccgatctggtcaccatacgcctattacctttactgttacaagtaccggatcactctccgggagaagatgctgcctcgttgttataaaagcatcacttataaggaagaggaggacttgacactccagccccgttcctgcctccttgaacatgcttattccaacgctttgaggggctggaagccttgacacatggaatcaggggcccgggatgtgattcaggacactttccatcctaggaataaagggtagtgcaatc

SEQ ID NO: 2936 - protein, 39 aa, Homo sapiens
MLPRCYKSITYKEEEDLTLQPRSCLLEHAYSNALRGWKP

SEQ ID NO: 2937 - DNA, 483 bp, Homo sapiens
gggcaaaagcaccgagcagggtaaccacgaccagcttaaagaactgtattcgacctctgcccattggcacggccttctctgtgaccgtcgactcttcttggatatcccatatcaggccttggatcaaggcaaccgggaaagtttgactgcaaccctggagtacgtggaagagaagacaaatgtggactctgtgtttgtgaacttccagaatgatcggaacgacagaggtgccctgctgcgggccttcagctacatgggctttgaggtggtcagaccagatcaccctgccctccctcccttggacaatgtcatctttatggtgtatccccttgaaagggatgttggccacctgcccagtgagcctccttgaacatgcttattccaacgctttgaggggctggaagccttgacacatggaatcaggggcccgggatgtgattcaggacactttccatcctaggaataaagggtagtgcaatcatc

SEQ ID NO: 2938 - protein, 66 aa, Homo sapiens; identical to SEQ ID NO: 2922

SEQ ID NO: 2939 - DNA, 318 bp, Homo sapiens
ctctgtgaccgtcgactcttcttggatatcccatatcaggccttggatcaaggcaaccgggaaaggtgccctgctgcgggccttcagctacatgggctttgaggtggtcagaccagatcaccctgccctccctcccttggacaatgtcatctttatggtgtatccccttgaaagggatgttggccacctgcccagtgagcctccttgaacatgcttattccaacgctttgaggggctggaagccttgacacatggaatcaggggcccgggatgtgattcaggacactttccatcctaggaataaagggtagtgcaatc

SEQ ID NO: 2940 - protein, 38 aa, Homo sapiens
MGFEVVRPDHPALPPLDNVIFMVYPLERDVGHLPSEPP

SEQ ID NO: 2941 - DNA, 2315 bp, Homo sapiens
cggctgaagcgccgccggcggggctcactgtggtggtgtgagtgggaggcggcggcgctggtggctgcagctggggtgaggcgcgaggcggcgcactcgacggctgactggagcagcggtaaaggcgaggatggagaccgaaggatataagtcaaagagtacagcagaaaatgtctactgaacggacttcttggacaagcctgtccaccattcagaaaatagccctgggccttgggatcccagccagtgcaacagttgcctatatcctataccgcaggtatagggaaagcagagaagagcggctgacatttgttggggaagatgacattgagatagagatgcgggttccccaggaggctgtgaaactcatcattggccggcaaggagccaatattaaacagctgcggaaacagacaggtgctcggattgatgtggacacagaggatgtaggcgatgagcgagtgctgcttatcagtggttttcctgttcaggtgtgcaaggccaaagcagcaatccatcagatcctgacagagaataccccagtgtctgagcagctttcagttccccagagatctgtgggcagaatcatagggagaggcggcgagacaattcgttctatctgtaaggcatctggagccaaaattacctgtgacaaagaatcagaagggacattactactatcaagacttataaaaatctcaggaacacagaaggaagtggcagcagccaagcatttgatactggagaaagtttcagaagatgaagaacttcggaagagaattgctcattctgcagaaaccagggtcccacgcaaacagccaatcagtgtgagaagagaagacatgacagagccaggtggagctggagagccagcattatggaaaaacaccagttctagcatggagccgactgcacccctggtgactcctccacccaaaggaggaggcgacatggctgtggtagtgtcaaaggaaggttcctgggagaaacctagtgatgacagctttcagaagtctgaagcccaggccatcccagagatgcccatgtttgaaatccccagtcctgacttcagttttcatgctgatgagtacctagaagtctacgtttctgcttctgagcaccctaaccacttctggatccagatcgttggctcccgcagcctgcaattggataagcttgtcaatgagatgacccagcactatgagaatagtgtgcctgaagacttgactgtgcatgtaggagacattgtagcagcacctttacctacaaatggttcctggtatcgagcccgggtcctcggcaccttggagaatgggaacttggacctctattttgttgactttggagataatggagattgcccactgaaggacctcagggctctcaggagtgacttcctaagccttccatttcaagcaatagaatgtagtctggcacggattgctccctcaggtgaccagtgggaagaggaagctttggatgagtttgatagactcactcattgtgctgactggaagcctctggtagccaagatctctagctatgtccagactgggatctcaacttggccaaagatctacttatatgatactagcaatgggaagaaacttgatattgggctagaattagtacacaaaggatacgcaattgagcttcctgaagacatagaagaaaacagagctgtcccagacatgttgaaggacatggccacagaaacagatgcctctctcagcacgttgctcactgagaccaaaaagagctctggagagataacacataccctgtcctgcctcagcttatcagaagctgcttccatgtctggtgatgataaccttgaagatgactacttactctgaagtctgggcttcagtttgctcagccatctgctttgctgtatgttgcctgcaatgaactcgctgaagcatgctcagccctggaactggtgctaccagagttccgtagggaacctttactctttagaggttccctgatataaatcattcataagacttcctaccctggaaaatgagtaatgtctcattcttacctgcagtttgttactatgtataaaagtctttttctttaatatgcctttaagtcttacctgtttacagcccattctgatgggttctttgtcattctgttagtataacccagtacttttcctgctgcctggaatgccctcttctatgttacctattctgtccgttgagatcccccaacttgggccaaagccaagagatctatgtgccttctctggttttctccacatctatagcacctcaactgaaatatatggataaaaacagcctaac

SEQ ID NO: 2942 - protein, 561 aa, Homo sapiens
MSTERTSWTSLSTIQKIALGLGIPASATVAYILYRRYRESREERLTFVGEDDIEIEMRVPQEAVKLIIGRQGANIKQLRKQTGARIDVDTEDVGDERVLLISGFPVQVCKAKAAIHQILTENTPVSEQLSVPQRSVGRIIGRGGETIRSICKASGAKITCDKESEGTLLLSRLIKISGTQKEVAAAKHLILEKVSEDEELRKRIAHSAETRVPRKQPISVRREDMTEPGGAGEPALWKNTSSSMEPTAPLVTPPPKGGGDMAVVVSKEGSWEKPSDDSFQKSEAQAIPEMPMFEIPSPDFSFHADEYLEVYVSASEHPNHFWIQIVGSRSLQLDKLVNEMTQHYENSVPEDLTVHVGDIVAAPLPTNGSWYRARVLGTLENGNLDLYFVDFGDNGDCPLKDLRALRSDFLSLPFQAIECSLARIAPSGDQWEEEALDEFDRLTHCADWKPLVAKISSYVQTGISTWPKIYLYDTSNGKKLDIGLELVHKGYAIELPEDIEENRAVPDMLKDMATETDASLSTLLTETKKSSGEITHTLSCLSLSEAASMSGDDNLEDDYLL

SEQ ID NO: 2943 - DNA, 2020 bp, Homo sapiens
ggctgaagcgccgccggcggggctcactgtggtggtgtgagtgggaggcggcggcgctggtggctgcagctggggtgaggcgcgaggcggcgcactcgacggctgactggagcagcggtaaaggcgaggatggagaccgaaggatataagtcaaagagtacagcagaaaatgtctactgaacggacttcttggacaagcctgtccaccattcagaaaatagccctgggccttgggatcccagccagtgcaacagttgcctatatcctataccgcaggtatagggaaagcagagaagagcggctgacatttgttggggaagatgacattgagatagagatgcgggttccccaggaggctgtgaaactcatcattggccggcaaggagccaatattaaacagctgcggaaacagacaggtgctcggattgatgtggacacagaggatgtaggcgatgagcgagtgctgcttatcagtggttttcctgttcaggtgtgcaaggccaaagcagcaatccatcagatcctgacagagaataccccagtgtctgagcagctttcagttccccagagatctgtgggcagaatcatagggagaggcggcgagacaattcgttctatctgtaaggcatctggagccaaaattacctgtgacaaagaatcagaagggacattactactatcaagacttataaaaatctcaggaacacagaaggaagtggcagcagccaagcatttgatactggagaaagtttcagaagatgaagaacttcggaagagaattgctcattctgcagaaaccagggtcccacgcaaacagccaatcagtgtgagaagagaagacatgacagagccaggtggagctggagagccagcattatggaaaaacaccagttctagcatggagccgactgcacccctggtgactcctccacccaaaggaggaggcgacatggctgtggtagtgtcaaaggaaggttcctgggagaaacctagtgatgacagctttcagaagtctgaagcccaggccatcccagagatgcccatgtttgaaatccccagtcctgacttcagttttcatgctgatgagtacctagaagtctacgtttctgcttctgagcaccctaaccacttctggatccagatcgttggctcccgcagcctgcaattggataagcttgtcaatgagatgacccagcactatgagaatagtgtgcctgaagacttgactgtgcatgtaggagacattgtagcagcacctttacctacaaatggttcctggtatcgagcccgggtcctcggcaccttggagaatgggaacttggacctctattttgttgactttggagataatggagattgcccactgaaggacctcagggctctcaggagtgacttcctaagccttccatttcaagcaatagaatgtagtctggcacggattgctccctcaggtgaccagtgggaagaggaagctttggatgagtttgatagactcactcattgtgctgactggaagcctctggtagccaagatctctagctatgtccagactgggatctcaacttggccaaagatctacttatatgatactagcaatgggaagaaacttgatattgggctagaattagtacacaaaggatacgcaattgagcttcctgaagacatagaagaaaacagagctgtcccagacatgttgaaggacatggccacagaaacagatgcctctctcagcacgttgctcactgagaccaaaaagagctctggagagataacacataccctgtcctgcctcagcttatcagaagctgcttccatgtctggtgatgataaccttgaagatgactacttactctgaagtctgggcttcagtttgctcagccatctgctttgctgtatgttgcctgcaatgaactcgctgaagcatgctcagccctggaactggtgctaccagagttccgtagggaacctttactctttagaggttccctgatataaatcattcataagacttcctaccctg

SEQ ID NO: 2944 - protein, 561 aa, Homo sapiens; identical to SEQ ID NO: 2942

SEQ ID NO: 2945 - DNA, 2656 bp, Homo sapiens
gtgtgagtgggaggcggcggcgctggtggctgcagctggggtgaggcgcgaggcggcgcactcgacggctgactggagcagcggtaaaggcgaggatggagaccgaaggatataagtcaaagagtacagcagaaaatgtctactgaacggacttcttggacaagcctgtccaccattcagaaaatagccctgggccttgggatcccagccagtgcaacagttgcctatatcctataccgcaggtatagggaaagcagagaagagcggctgacatttgttggggaagatgacattgagatagagatgcgggttccccaggaggctgtgaaactcatcattggccggcaaggagccaatattaaacagctgcggaaacagacaggtgctcggattgatgtggacacagaggatgtaggcgatgagcgagtgctgcttatcagtggttttcctgttcaggcatctggagccaaaattacctgtgacaaagaatcagaagggacattactactatcaagacttataaaaatctcaggaacacagaaggaagtggcagcagccaagcatttgatactggagaaagtttcagaagatgaagaacttcggaagagaattgctcattctgcagaaaccagggtcccacgcaaacagccaatcagtgtgagaagagaagacatgacagagccaggtggagctggagagccagcattatggaaaaacaccagttctagcatggagccgactgcacccctggtgactcctccacccaaaggaggaggcgacatggctgtggtagtgtcaaaggaaggttcctgggagaaacctagtgatgacagctttcagaagtctgaagcccaggccatcccagagatgcccatgtttgaaatccccagtcctgacttcagttttcatgctgatgagtacctagaagtctacgtttctgcttctgagcaccctaaccacttctggatccagatcgttggctcccgcagcctgcaattggataagcttgtcaatgagatgacccagcactatgagaatagtgtgcctgaagacttgactgtgcatgtaggagacattgtagcagcacctttacctacaaatggttcctggtatcgagcccgggtcctcggcaccttggagaatgggaacttggacctctattttgttgactttggagataatggagattgcccactgaaggacctcagggctctcaggagtgacttcctaagccttccatttcaagcaatagaatgtagtctggcacggattgctccctcaggtgaccagtgggaagaggaagctttggatgagtttgatagactcactcattgtgctgactggaagcctctggtagccaagatctctagctatgtccagactgggatctcaacttggccaaagatctacttatatgatactagcaatgggaagaaacttgatattgggctagaattagtacacaaaggatacgcaattgagcttcctgaagacatagaagaaaacagagctgtcccagacatgttgaaggacatggccacagaaacagatgcctctctcagcacgttgctcactgagaccaaaaagagctctggagagataacacataccctgtcctgcctcagcttatcagaagctgcttccatgtctggtgatgataaccttgaagatgactacttactctgaagtctgggcttcagtttgctcagccatctgctttgctgtgtgagtgcagctatcatctatctgtagcaacaggaaagtaatgagggcgacagtggggcacttgctttgattccctctttcccatgccctgtcttaatatacttctctgcagctgctttcctgcagcttaacttgctctcagattgagcactttcaagctttttgtgtatttctgtctttggcaggatttggcataggaattggtgcatggaggagaggagtgtatgataaaggatccatgcagtccttcctttattacacatatagtctggcttgctgtggaccaaattaatattctcctcccatcagactacaaaaaaattggactaccacgctacaagtgtgtctcccccattccacctccggatccctccccaaccctccagtgtttgaatactgctgtgttacttccaggccgttcaacgtcaggctcagtcccctctaccagtcatgattcacattactactaggctgtatcctttttgaggctgggaaacagtcaggctttcgtcattggaagtgattctgcagacttctgactcaccttatcaggtgactctggttaaggaaagcttttgagtggtgaactcaaagactccagttgaatcaggaggcaaaggcaaaaattagcataattatatttaaaagcctcaggaagtgggaagagaatactgcctcccagcctcaattgctgatatgttattggagacaggcttttgaaactgctccagctatttctctgtaacctttagttaaaatataagtagaaaggagacaggaggctcaggaaattttctaaattgctagtataatatctatatgtatacacacatatacacccgtggagagagaggaagagtatacagtcctgtttgaatcatttggaggatttttttgctgaataaagttctcaagaaaattttctaaaacc

SEQ ID NO: 2946 - protein, 516 aa, Homo sapiens
MSTERTSWTSLSTIQKIALGLGIPASATVAYILYRRYRESREERLTFVGEDDIEIEMRVPQEAVKLIIGRQGANIKQLRKQTGARIDVDTEDVGDERVLLISGFPVQASGAKITCDKESEGTLLLSRLIKISGTQKEVAAAKHLILEKVSEDEELRKRIAHSAETRVPRKQPISVRREDMTEPGGAGEPALWKNTSSSMEPTAPLVTPPPKGGGDMAVVVSKEGSWEKPSDDSFQKSEAQAIPEMPMFEIPSPDFSFHADEYLEVYVSASEHPNHFWIQIVGSRSLQLDKLVNEMTQHYENSVPEDLTVHVGDIVAAPLPTNGSWYRARVLGTLENGNLDLYFVDFGDNGDCPLKDLRALRSDFLSLPFQAIECSLARIAPSGDQWEEEALDEFDRLTHCADWKPLVAKISSYVQTGISTWPKIYLYDTSNGKKLDIGLELVHKGYAIELPEDIEENRAVPDMLKDMATETDASLSTLLTETKKSSGEITHTLSCLSLSEAASMSGDDNLEDDYLL

SEQ ID NO: 2947 - DNA, 2826 bp, Homo sapiens
cggctgaagcgccgccggcggggctcactgtggtggtgtgagtgggaggcggcggcgctggtggctgcagctggggtgaggcgcgaggcggcgcactcgacggctgactggagcagcggtaaaggcgaggatggagaccgaaggatataagtcaaagagtacagcagaaaatgtctactgaacggacttcttggacaagcctgtccaccattcagaaaatagccctgggccttgggatcccagccagtgcaacagttgcctatatcctataccgcaggtatagggaaagcagagaagagcggctgacatttgttggggaagatgacattgagatagagatgcgggttccccaggaggctgtgaaactcatcattggccggcaaggagccaatattaaacagctgcggaaacagacaggtgctcggattgatgtggacacagaggatgtaggcgatgagcgagtgctgcttatcagtggttttcctgttcaggtgtgcaaggccaaagcagcaatccatcagatcctgacagagaataccccagtgtctgagcagctttcagttccccagagatctgtgggcagaatcatagggagaggcggcgagacaattcgttctatctgtaaggcatctggagccaaaattacctgtgacaaagaatcagaagggacattactactatcaagacttataaaaatctcaggaacacagaaggaagtggcagcagccaagcatttgatactggagaaagtttcagaagatgaagaacttcggaagagaattgctcattctgcagaaaccagggtcccacgcaaacagccaatcagtgtgagaagagaagacatgacagagccaggtggagctggagagccagcattatggaaaaacaccagttctagcatggagccgactgcacccctggtgactcctccacccaaaggaggaggcgacatggctgtggtagtgtcaaaggaaggttcctgggagaaacctagtgatgacagctttcagaagtctgaagcccaggccatcccagagatgcccatgtttgaaatccccagtcctgacttcagttttcatgctgatgagtacctagaagtctacgtttctgcttctgagcaccctaaccacttctggatccagatcgttggctcccgcagcctgcaattggataagcttgtcaatgagatgacccagcactatgagaatagtgtgcctgaagacttgactgtgcatgtaggagacattgtagcagcacctttacctacaaatggttcctggtatcgagcccgggtcctcggcaccttggagaatgggaacttggacctctattttgttgactttggagataatggagattgcccactgaaggacctcagggctctcaggagtgacttcctaagccttccatttcaagcaatagaatgtagtctggcacggattgctccctcaggtgaccagtgggaagaggaagctttggatgagtttgatagactcactcattgtgctgactggaagcctctggtagccaagatctctagctatgtccagactgggatctcaacttggccaaagatctacttatatgatactagcaatgggaagaaacttgatattgggctagaattagtacacaaaggatacgcaattgagcttcctgaagacatagaagaaaacagagctgtcccagacatgttgaaggacatggccacagaaacagatgcctctctcagcacgttgctcactgagaccaaaaagagctctggagagataacacataccctgtcctgcctcagcttatcagaagctgcttccatgtctggtgatgataaccttgaagatgactacttactctgaagtctgggcttcagtttgctcagccatctgctttgctgtgtgagtgcagctatcatctatctgtagcaacaggaaagtaatgagggcgacagtggggcacttgctttgattccctctttcccatgccctgtcttaatatacttctctgcagctgctttcctgcagcttaacttgctctcagattgagcactttcaagctttttgtgtatttctgtctttggcaggatttggcataggaattggtgcatggaggagaggagtgtatgataaaggatccatgcagtccttcctttattacacatatagtctggcttgctgtggaccaaattaatattctcctcccatcagactacaaaaaaattggactaccacgctacaagtgtgtctcccccattccacctccggatccctccccaaccctccagtgtttgaatactgctgtgttacttccaggccgttcaacgtcaggctcagtcccctctaccagtcatgattcacattactactaggctgtatcctttttgaggctgggaaacagtcaggctttcgtcattggaagtgattctgcagacttctgactcaccttatcaggtgactctggttaaggaaagcttttgagtggtgaactcaaagactccagttgaatcaggaggcaaaggcaaaaattagcataattatatttaaaagcctcaggaagtgggaagagaatactgcctcccagcctcaattgctgatatgttattggagacaggcttttgaaactgctccagctatttctctgtaacctttagttaaaatataagtagaaaggagacaggaggctcaggaaattttctaaattgctagtataatatctatatgtatacacacatatacacccgtggagagagaggaagagtatacagtcctgtttgaatcatttggaggatttttttgctgaataaagttctcaagaaaattttctaaaacc

SEQ ID NO: 2948 - protein, 561 aa, Homo sapiens; identical to SEQ ID NO: 2942

SEQ ID NO: 2949 - DNA, 687 bp, Homo sapiens
ggcggcgctggtggctgcagctggggtgaggcgcgaggcggcgcactcgacggctgactggagcagcggtaaaggcgaggatggagaccgaaggatataagtcaaagagtacagcagaaaatgtctactgaacggacttcttggacaagcctgtccaccattcagaaaatagccctgggccttgggatcccagccagtgcaacagttgcctatatcctataccgcaggtatagggaaagcagagaagagcggctgacatttgttggggaagatgacattgagatagagatgcgggttccccaggaggctgtgaaactcatcattggccggcaaggagccaatattaaacagctgcggaaacagacaggtgctcggattgatgtggacacagaggatgtaggcgatgagcgagtgctgcttatcagtggttttcctgttcaggtgtgcaaggccaaagcagcaatccatcagatcctgacagagaataccccagtgtctgagcagctttcagttccccagagatctgtgggcagaatcataggtaccactggatggcttcctctattgtttcctttattctttacctttgcccctctttcacaccttcccagggttttttctggcctagttccccttcaccatgtgaggggaaaaaaagggacattgagaccagaggtttactgtttg

SEQ ID NO: 2950 - protein, 188 aa, Homo sapiens
MSTERTSWTSLSTIQKIALGLGIPASATVAYILYRRYRESREERLTFVGEDDIEIEMRVPQEAVKLIIGRQGANIKQLRKQTGARIDVDTEDVGDERVLLISGFPVQVCKAKAAIHQILTENTPVSEQLSVPQRSVGRIIGTTGWLPLLFPLFFTFAPLSHLPRVFSGLVPLHHVRGKKGTLRPEVYC

SEQ ID NO: 2951 - DNA, 371 bp, Homo sapiens
tgggaggcggcggcgctggtggctgcagctggggtgaggcgcgaggcggcgcactcgacggctgactggagcagcggtaaaggcgaggatggagaccgaaggatataagtcaaagagtacagcagaaaatgtctactgaacggacttcttggacaagcctgtccaccattcagaaaatagccctgggccttgggatcccagccagtgcaacagttgcctatatcctataccgcaggtatagggaaagcagaggtacgtgaaccctatgactgtgtgtgtgaaaatgttcagacatgctcctgccttgttaaattgaaaaaaactctttccttgccaggtattgtgtgtgttttgttttggggttttttgtg

SEQ ID NO: 2952 - protein, 43 aa, Homo sapiens
MSTERTSWTSLSTIQKIALGLGIPASATVAYILYRRYRESRGT

SEQ ID NO: 2953 - DNA, 991 bp, Homo sapiens
aaaatctgcgctccagcagctgggaccgaggcatgagagcgttgaatcatgagtggcaccgttcgcaaaaattggtgtctttgtacaaagacagtgccacaacacaactcagtgaccatcgggagagcagcctcatgatgggcgatgctccatcagttttctcttgcgatcttttgcatagatcggtcccgccccgcatatggcgatgaggactcaagagacacggaaaacgttttctttctggaaaacatgaaataggctttgtagatggacaggaagtcaagggacaagcggtgcgccgcagagagcgaggacccactcttctattcctttgcggaggcacggacacacggtgtggcccgaaacagcggcaggagagtgagacccgggctccgaccgcggtgacggagtctcactctgtcacccaggctggagtgcagtggcacgatctcggctcactggaacctccaactccctggttcaagcgattctcctgcctcagcctcccgaatagctgggactacaggtgcccaccaccacacctggctaattttttgtatttttagtagagacggggtttcaccgtgttagccaggatggtctcggtctcctgacctggtgatccgcccgcctcggcctcccaaagtgctgggattacaggcatgagccactgcgcccggcctaaaaattttttaaattgtatacattatggtttttttttttaccacaatttaaaaaattaatttataatatacatgcagaaaaatgcacaaatgacaagtatatatcttgatgaattttcacaaatggaatacatttgtgtaaccagcagcagatcaagaaacagaacattgctagtgccccagaagccacttgtgtgttccctctcagtcactgctcttctcaaggacaaccactcttctgactcctgataccataaactaattttgcctgttcttgctttttatataaagagaatcacagagtatgt

SEQ ID NO: 2954 - protein, 58 aa, Homo sapiens [sequence omitted]

SEQ ID NO: 2955 - DNA, 3145 bp, Homo sapiens
cagtttctccccaggtggagcagtccctcagtgaggactgtgaacgaatcttcaggaacccccactgtaggagcctcaaactgagccccacgggagatgctctagactgagaacttcccataaatgatacccacggggaacgtttagatttagaggttgcacagaattgctccacatctgggagaccaaaagacagtcctctggaaggtggctggcccaagctccccagtgggggaatcaggatgtcagagagatcctctagaacctgctgttcttgctattgcatgacccctccctggcaccagagcctccctcctggctccctcccctgtcacttgccagcctgtagtggtgcttgctgcagccctccctggttgctttatttatttattttgcaccaacagggttgctgcagactcattcttgcctggtttaaaaagagagagagagagagaggaaaaaaaaaaaggagaaatgctttctggctcttttctccacctcagtcttggcagcagcggccgcagcagcaacagcagcagcagcagcggcaggcagcagccgggcagccaggcagcgggggttgaggcacacagggaaggtgcaggggcctgaggtgcagctcgaatgggacagggcccccagcgctggacagatgcagtgccaaacttgatgccaccttccagcttctccggactgaagagggaatggatgcagccacagctccaaagcaagcctggcccccatggcccccgctccttttcctcctcctcctacctggagggagcggtggcagctgccctgctgtgtgtgactgcacctcccagccccaggctgtgctctgtggccacaggcaactggaggctgtacctggaggactcccactggacactgagctcctggacctgagtgggaaccgcctgtgggggctccagcagggaatgctctcccgcctgagcctgctccaggaattggacctcagctacaaccagctctcaacccttgagcctggggccttccatggcctacaaagcctactcaccctgaggctgcagggcaatcggctcagaatcatggggcctggggtcttctcaggcctctctgctctgaccctgctggacctccgcctcaaccagattgttctcttcctagatggagcttttggggagctaggcagcctccagaagctggaggttggggacaaccacctggtatttgtggctccgggggcctttgcagggctagccaagttgagcaccctcaccctggagcgctgcaacctcagcacagtgcctggcctagcccttgcccgtctcccggcactagtggccctaaggcttagagaactggatattgggaggctgccagctggggccctgcgggggctggggcagctcaaggagctggagatccacctctggccatctctggaggctctggaccctgggagcctggttgggctcaatctcagcagcctggccatcactcgctgcaatctgagctcggtgcccttccaagcactgtaccacctcagcttcctcagggtcctggatctgtcccagaatcccatctcagccatcccagcccgaaggctcagccccctggtgcggctccaggagctacgcctgtcaggggcatgcctcacctccattgctgcccatgccttccatggcttgactgccttccacctcctggatgtggcagataacgcccttcagacactagaggaaacagctttcccttctccagacaaactggtcaccttgaggctgtctggcaaccccctaacctgtgactgccgcctcctctggctgctccggctccgccgccacctggactttggcatgtccccccctgcctgtgctggcccccatcatgtccaggggaagagcctgaaggagttttcagacatcctgcctccagggcacttcacctgcaaaccagccctgatccgaaagtcggggcctcgatgggtcattgcagaggagggcgggcatgcggttttctcctgctctggagatggagacccagcccccactgtctcctggatgaggcctcatggggcttggctgggcagggctgggagagtaagggtcctagaggatgggacactggagatccgctcagtgcagctacgggacagaggggcctatgtctgtgtggttagcaatgtcgctgggaatgactccctgaggacctggctggaagtcatccaggtggaaccaccaaacggcacactttctgaccccaacatcaccgtgccagggatcccagggcctttttttctggatagcagaggtgtggccatggtgctggcagtcggcttcctccccttcctcacctcagtgaccctctgctttggcctgattgccctttggagcaagggcaaaggtcgggtcaaacatcacatgacctttgactttgtggcacctcggccctctggggataaaaactctgggggtaaccgggtcactgccaagctcttctgacctttccttccccagtggggaacccaccaagtccgcttcagataccaaaggggaagacagaaccaaggctgcttgaaccagaacctagtcccgagcagcaccgctctcctgcacctcccgcctgcgttgtgcctcctgccggagagtctgcttcctgagcttttccggtctgaggatagcattgtcatttcttctctgagggtcccagggagctgcagatgcagaccccgtcgttagtccagcccctgcttcaccccctccacacacaaaacaggaaacataatcaaagcgctagtcagctagtctaaccactaggctttcttcacacatgcttatatcctttaataaccaattgccaaccacggctataagattatttcagaggtggggctgggaagtgccacttgctccttagagtctgtttgtcaaccaggcagagtccctttcttttctgctccccaccccaaccctgcccctatgtacaggaataagagcaaaggacccacaggctacagagaagaggatggggacagagtgtgggatggagaggacagaccatatactgcactgtgtttgcatgagcctctaccaccttcctctatctaccagatcattaaacctgctgtcaaagggccacaacagtagcagccaaaactaaa

SEQ ID NO: 2956 - protein, 93 aa, Homo sapiens
MGQGPQRWTDAVPNLMPPSSFSGLKREWMQPQLQSKPGPHGPRSFSSSSYLEGAVAAALLCVTAPPSPRLCSVATGNWRLYLEDSHWTLSSWT

SEQ ID NO: 2957 - DNA, 1619 bp, Homo sapiens
agcgggaccctcctccctccctgcagtccatgtgggagatgtgggaacggtgtgcccaccacctcaccgaggccattcagtaccctgtgtagccagcatgtggaaaggctgcagatcttccagcacctccaccccatcgtggtccaagccgctttccctccactctacaaggagctcttcagcactgaaaccgagtcacctgtggggctgtccaagtgacctggaagagggactccttgcctctccctatggcctgctggcccacctccctggaccccgttccaccctcacccttttcctttcccatgaaccctggagggtggtccccaccagctctttggaagtgagcagatgctgcggctggctttctgtcagcaggccggcctggcagtgggacaatcgccagagggtggggctggcagaacaccatctccagcctcagctttgacctgtctcatttcccatattccttcacacccagcttctggaaggcatggggtggctgggatttaaggacttctgggggaccaagacatcctcaagaaaacaggggcatccagggctccctggatgaatagaatgcaattcattcagaagctcagaagctaagaataagcctttgaaatacctcattgcatttccctttgggcttcggcttggggagatggatcaagctcagagactggcagtgagagcccagaaggacctgtataaaatgaatctggagctttacattttctgcctctgccttcctcccagctcagcaaggaagtatttgggcaccctaccctttacctggggtctaaccaaaaatggatgggatgaggatgagaggctggagataattgttttatgggatttgggtgtgggactagggtacaatgaaggccaagagcatctcagacatagagttaaaactcaaacctcttatgtgcactttaaagatagactttaggggctggcacaaatctgatcagagacacatatccatacacaggtgaaacacatacagactcaacagcaatcatgcagttccagagacacatgaacctgacacaatctctcttatccttgaggccacagcttggaggagcctagaggcctcaggggaaagtcccaatcctgagggaccctcccaaacatttccatggtgctccagtccactgatcttgggtctggggtgatccaaataccaccccagctccagctgtcttctaccactagaagacccaagagaagcagaagtcgctcgcactggtcagtcggaaggcaagatcagatcctggaggactttcctggcctgcccgccagccctgctcttgttgtggagaaggaagcagatgtgatcacatcaccccgtcattgggcaccgctgactccagcatggaggacaccagggagcagggcctgggcctgtttccccagctgtgatcttgcccagaacctctcttggcttcataaacagctgtgaaccctcccctgagggattaacagcaatgatgggcagtcgtggagttgggggggttgggggtgggattgtgtcctctaaggggacgggttcatctgagtaaacataaaccccaacttgtgccattctttataaaatgattttaaaggca

SEQ ID NO: 2958 - protein, 116 aa, Homo sapiens
MWKGCRSSSTSTPSWSKPLSLHSTRSSSALKPSHLWGCPSDLEEGLLASPYGLLAHLPGPRSTLTLFLSHEPWRVVPTSSLEVSRCCGWLSVSRPAWQWDNRQRVGLAEHHLQPQL

SEQ ID NO: 2959 - DNA, 5027 bp, Homo sapiens
gcggagcaggataggccaggctgagaagtgcccttgcatgggtaggcgtaggagctggctgagatcaagccatgccttccttctccggccccagagcacctggtgcagagcgtctgcaagtcctacagggagacatgccagctgcggctggaggacctgctgcggcagcgctccaacatcttctcccgggaggaagtgactggctaccagaggaaggtgaggccaggagacctgcaggaagggaacgtatcccacccccaccgggagagttcagagatggctacctgcgcacgactgggtcctggggcagggcgggacatcacagacacaggctggccaacaagcatgtgcacaccttttatgtacagttgcgaatgtgtgtatctgtctacaccccagcagatggatgagcgcttttccttagttcttgcctattaaaattgtacctggccttcatcctacctcctctaccatgcagaccttggtgcaccctccttcctcctcttccatcaacaataacaataatcagaaccctgattaccatttgttaaacaccccttctctgccaggcattgtgctaaacgctttatgtaaattatcctcagcccctaccacaaccaacctatgagggtggcatttattcctacttttaacagacagaaactgagcctagaggggttaataggtttcctcaaagtcacaaagtggtggaaccaaagtcaaattcagattcatcaggctccaaagtttatgctgccttttcgatcacactctcataccacctgctctaaacacactcgtttggcacttcacatttgcttctccaggttattgagaccttgggcataacctttgtgggggaaggggcagctgtatgtcctgttcacctcaacgagatataccttgttggagggcaaagctgtatctcatactttttggattccctcacaacagctaactcggtgtcagcagccggtaggtgctcagtgtgtgggactcactggcaggaatctgtgcatttgtgctaagaccaggcttttgaaaatgctagttgagaacataggagttcagagcctaccccttgcagtttattaggtggggctccagggctcaggaggatcacagggccacacagagcgctacagcgggaccctcctccctccctgcagtccatgtgggagatgtgggaacggtgtgcccaccacctcaccgaggccattcagtacgtggtggagttcgccaagaggctctcaggctttatggagctctgccagaatgaccagattgtgcttctcaaagcaggtgcccagggatgggtgggcaggcctggggacaaggggacagagccaagtggagggaggtggcttaaggaaatcagggggacagagtcagatcctggctttgcttgacactgtccctgcatcttctctccccactgcccaggagcaatggaagtggtgctggttaggatgtgccgggcctacaatgctgacaaccgcacggtcttttttgaaggcaaatacggtggcatggagctgttccgagccttgggtgaggggcagggagaaatgagagggaagattctgatgccaaccccaggcaaagctttgtgacccagggcaccctcttttcagggcgaattgccccctctgctctaaacacaataagggcggtgtcctcgggcaccatcgctccagccactctctcacttttctcatttccactccatcaggctgcagcgagctcatcagctccatctttgacttctcccactccctaagtgccttgcacttttccgaggatgagattgccctctacacagcccttgttctcatcaatgcccgtgagtgttgctgggcttgggtgaaggacattcaggtggcaggggcatggcagatattgaagaagagtctagaccttcagatgtagttaaatctgggaaattgctttaaatagcagaatgagccctactcagtattgctataaaataaaatgagttaaaataaagattcagaggactctcagagagggacaagagcagcataaggtggggttgtgggaagtggggagaaatgaggttgagaggaaatgagccactttcctgacagaaatgtgtctgattgttagtctatggcagtgatttcattgtagcacacatcagaatcacctggggagctttaaaaactattgctgcctgggtcccacttccagagattccagtgtacatgtgctccatgacttatgatggggttatgtcccaataaacctatcgtaagttgaaaatatggtaagttgaaattgcatttaacacgcctaacttactgaacaccatagcttagcctagcctaccttaaatgtgctcagaatgcttacattagcctacagtctggcaaaagcatataacacaaagcctattttataataaagtgttgaatagctcatgtaatttattgaatatggttctaaaagtgaacagcaggatggttgcatgggtattcaaagtatggtttctactgaatgcaagtggctttctcaccaacataaaatcaaaaaatagtaagtcaactcatcataagactgggaccatctgtaattgataaggggtgcactgaattttaacagccacccccaggccaccaagattaagaatcactgctctgtgtgaactaattttaaggctgtatgcctataataggaagactctggatatcctatccactcccctggcatggagtagctgggctgagccagatgaatactaaatattcagagaacctagggaagtgggtcaagctgctaacctgagtttgcagatcgagactatcagtcttctggctctgccagtgagtggacacctaaatatgcccttcaaactagaagataaaaactttaaagatgacttctggatattttatagaatcagggcaaaagttagtcacagattgctgcaagccccctggtgcaggcctgggcaccttcaggaaggccacctcctatcaggagcccttttcgtacatgggggagctcttttccaactcttgttacccctatgacagaatcctagtgcctagcattgaatgagctatgtggaatatcaggttaccagggagaaggtagcttggagtcaggagatcagaaattctcatacctttcatctcttcccagttttccttgtagacagctagccaagcccaacgtccagagcttaccattatcaaaccaaggcacacacatgcacgcgctcagcttagaagacctctatccagcacagatgtccacaaagatacacccttttgttgggagttaatgtccatgttctttcttgttctcattacggtcccaccccctcctccagatcggccagggctccaagagaaaaggaaagtagaacagctgcagtacaatctggagctggcctttcatcatcatctctgcaagactcatcgccaaagcatcctggcaaagctgccacccaaggggaagcttcggagcctgtgtagccagcatgtggaaaggctgcagatcttccagcacctccaccccatcgtggtccaagccgctttccctccactctacaaggagctcttcagcactgaaaccgagtcacctgtggggctgtccaagtgacctggaagagggactccttgcctctccctatggcctgctggcccacctccctggaccccgttccaccctcacccttttcctttcccatgaaccctggagggtggtccccaccagctctttggaagtgagcagatgctgcggctggctttctgtcagcaggccggcctggcagtgggacaatcgccagagggtggggctggcagaacaccatctccagcctcagctttgacctgtctcatttcccatattccttcacacccagcttctggaaggcatggggtggctgggatttaaggacttctgggggaccaagacatcctcaagaaaacaggggcatccagggctccctggatgaatagaatgcaattcattcagaagctcagaagctaagaataagcctttgaaatacctcattgcatttccctttgggcttcggcttggggagatggatcaagctcagagactggcagtgagagcccagaaggacctgtataaaatgaatctggagctttacattttctgcctctgccttcctcccagctcagcaaggaagtatttgggcaccctaccctttacctggggtctaaccaaaaatggatgggatgaggatgagaggctggagataattgttttatgggatttgggtgtgggactagggtacaatgaaggccaagagcatctcagacatagagttaaaactcaaacctcttatgtgcactttaaagatagactttaggggctggcacaaatctgatcagagacacatatccatacacaggtgaaacacatacagactcaacagcaatcatgcagttccagagacacatgaacctgacacaatctctcttatccttgaggccacagcttggaggagcctagaggcctcaggggaaagtcccaatcctgagggaccctcccaaacatttccatggtgctccagtccactgatcttgggtctggggtgatccaaataccaccccagctccagctgtcttctaccactagaagacccaagagaagcagaagtcgctcgcactggtcagtcggaaggcaagatcagatcctggaggactttcctggcctgcccgccagccctgctcttgttgtggagaaggaagcagatgtgatcacatcaccccgtcattgggcaccgctgactccagcatggaggacaccagggagcagggcctgggcctgtttccccagctgtgatcttgcccagaacctctcttggcttcataaacagctgtgaaccctcccctgagggattaacagcaatgatgggcagtcgtggagttgggggggttgggggtgggattgtgtcctctaaggggacgggttcatctgagtaaacataaaccccaacttgtgccattctttataaaatgattttaaaggca

SEQ ID NO: 2960 - protein, 106 aa, Homo sapiens
MSMFFLVLITVPPPPPDRPGLQEKRKVEQLQYNLELAFHHHLCKTHRQSILAKLPPKGKLRSLCSQHVERLQIFQHLHPIVVQAAFPPLYKELFSTETESPVGLSK

SEQ ID NO: 2961 - DNA, 3049 bp, Homo sapiens
agaagcactgggggagagagctaggtgcagagcttcaggctgaggcgctgctgagagggcctcgccccgcctctgccgccagctgcaccccactcctggaccaccccctgctgagaaggacagggagccaaggccggcagagccaaggctcagtcatgagaacacaaattgaagtgatcccttgcaaaatctgtggggacaagtcgtctgggatccactacggggttatcacctgtgaggggtgcaagggcttcttccgccggagccagcgctgtaacgcggcctactcctgcacccgtcagcagaactgccccatcgaccgcaccagccgaaaccgatgccagcactgccgcctgcagaaatgcctggcgctgggcatgtcccgagatgctgtcaagttcggccgcatgtccaagaagcagagggacagcctgcatgcagaagtgcagaaacagctgcagcagcggcaacagcagcaacaggaaccagtggtcaagacccctccagcaggggcccaaggagcagataccctcacctacaccttggggctcccagacgggcagctgcccctgggctcctcgcctgacctgcctgaggcttctgcctgtccccctggcctcctgaaagcctcaggctctgggccctcatattccaacaacttggccaaggcagggctcaatggggcctcatgccaccttgaatacagccctgagcggggcaaggctgagggcagagagagcttctatagcacaggcagccagctgacccctgaccgatgtggacttcgttttgaggaacacaggcatcctgggcttggggaactgggacagggcccagacagctacggcagccccagtttccgcagcacaccggaggcaccctatgcctccctgacagagatagagcacctggtgcagagcgtctgcaagtcctacagggagacatgccagctgcggctggaggacctgctgcggcagcgctccaacatcttctcccgggaggaagtgactggctaccagaggaagtccatgtgggagatgtgggaacggtgtgcccaccacctcaccgaggccattcagtacgtggtggagttcgccaagaggctctcaggctttatggagctctgccagaatgaccagattgtgcttctcaaagcaggagcaatggaagtggtgctggttaggatgtgccgggcctacaatgctgacaaccgcacggtcttttttgaaggcaaatacggtggcatggagctgttccgagccttgggctgcagcgagctcatcagctccatctttgacttctcccactccctaagtgccttgcacttttccgaggatgagattgccctctacacagcccttgttctcatcaatgcccatcggccagggctccaagagaaaaggaaagtagaacagctgcagtacaatctggagctggcctttcatcatcatctctgcaagactcatcgccaaagcatcctggcaaagctgccacccaaggggaagcttcggagcctgtgtagccagcatgtggaaaggctgcagatcttccagcacctccaccccatcgtggtccaagccgctttccctccactctacaaggagctcttcagcactgaaaccgagtcacctgtggggctgtccaagtgacctggaagagggactccttgcctctccctatggcctgctggcccacctccctggaccccgttccaccctcacccttttcctttcccatgaaccctggagggtggtccccaccagctctttggaagtgagcagatgctgcggctggctttctgtcagcaggccggcctggcagtgggacaatcgccagagggtggggctggcagaacaccatctccagcctcagctttgacctgtctcatttcccatattccttcacacccagcttctggaaggcatggggtggctgggatttaaggacttctgggggaccaagacatcctcaagaaaacaggggcatccagggctccctggatgaatagaatgcaattcattcagaagctcagaagctaagaataagcctttgaaatacctcattgcatttccctttgggcttcggcttggggagatggatcaagctcagagactggcagtgagagcccagaaggacctgtataaaatgaatctggagctttacattttctgcctctgccttcctcccagctcagcaaggaagtatttgggcaccctaccctttacctggggtctaaccaaaaatggatgggatgaggatgagaggctggagataattgttttatgggatttgggtgtgggactagggtacaatgaaggccaagagcatctcagacatagagttaaaactcaaacctcttatgtgcactttaaagatagactttaggggctggcacaaatctgatcagagacacatatccatacacaggtgaaacacatacagactcaacagcaatcatgcagttccagagacacatgaacctgacacaatctctcttatccttgaggccacagcttggaggagcctagaggcctcaggggaaagtcccaatcctgagggaccctcccaaacatttccatggtgctccagtccactgatcttgggtctggggtgatccaaataccaccccagctccagctgtcttctaccactagaagacccaagagaagcagaagtcgctcgcactggtcagtcggaaggcaagatcagatcctggaggactttcctggcctgcccgccagccctgctcttgttgtggagaaggaagcagatgtgatcacatcaccccgtcattgggcaccgctgactccagcatggaggacaccagggagcagggcctgggcctgtttccccagctgtgatcttgcccagaacctctcttggcttcataaacagctgtgaaccctcccctgagggattaacagcaatgatgggcagtcgtggagttgggggggttgggggtgggattgtgtcctctaaggggacgggttcatctgagtaaacataaaccccaacttgtgccattctttataaaatgattttaaaggca

SEQ ID NO: 2962 - protein, 497 aa, Homo sapiens; identical to SEQ ID NO: 143

SEQ ID NO: 2963 - DNA, 3065 bp, Homo sapiens
gccaggtgctcccgccttccaccctccgccctcctccctcccctgggccctgctccctgccctcctgggcagccagggcagccaggacggcaccaagggagctgccccatggacagggccccacagagacagcaccgagcctcacgggagctgctggctgcaaagaagacccacacctcacaaattgaagtgatcccttgcaaaatctgtggggacaagtcgtctgggatccactacggggttatcacctgtgaggggtgcaagggcttcttccgccggagccagcgctgtaacgcggcctactcctgcacccgtcagcagaactgccccatcgaccgcaccagccgaaaccgatgccagcactgccgcctgcagaaatgcctggcgctgggcatgtcccgagatgctgtcaagttcggccgcatgtccaagaagcagagggacagcctgcatgcagaagtgcagaaacagctgcagcagcggcaacagcagcaacaggaaccagtggtcaagacccctccagcaggggcccaaggagcagataccctcacctacaccttggggctcccagacgggcagctgcccctgggctcctcgcctgacctgcctgaggcttctgcctgtccccctggcctcctgaaagcctcaggctctgggccctcatattccaacaacttggccaaggcagggctcaatggggcctcatgccaccttgaatacagccctgagcggggcaaggctgagggcagagagagcttctatagcacaggcagccagctgacccctgaccgatgtggacttcgttttgaggaacacaggcatcctgggcttggggaactgggacagggcccagacagctacggcagccccagtttccgcagcacaccggaggcaccctatgcctccctgacagagatagagcacctggtgcagagcgtctgcaagtcctacagggagacatgccagctgcggctggaggacctgctgcggcagcgctccaacatcttctcccgggaggaagtgactggctaccagaggaagtccatgtgggagatgtgggaacggtgtgcccaccacctcaccgaggccattcagtacgtggtggagttcgccaagaggctctcaggctttatggagctctgccagaatgaccagattgtgcttctcaaagcaggagcaatggaagtggtgctggttaggatgtgccgggcctacaatgctgacaaccgcacggtcttttttgaaggcaaatacggtggcatggagctgttccgagccttgggctgcagcgagctcatcagctccatctttgacttctcccactccctaagtgccttgcacttttccgaggatgagattgccctctacacagcccttgttctcatcaatgcccatcggccagggctccaagagaaaaggaaagtagaacagctgcagtacaatctggagctggcctttcatcatcatctctgcaagactcatcgccaaagcatcctggcaaagctgccacccaaggggaagcttcggagcctgtgtagccagcatgtggaaaggctgcagatcttccagcacctccaccccatcgtggtccaagccgctttccctccactctacaaggagctcttcagcactgaaaccgagtcacctgtggggctgtccaagtgacctggaagagggactccttgcctctccctatggcctgctggcccacctccctggaccccgttccaccctcacccttttcctttcccatgaaccctggagggtggtccccaccagctctttggaagtgagcagatgctgcggctggctttctgtcagcaggccggcctggcagtgggacaatcgccagagggtggggctggcagaacaccatctccagcctcagctttgacctgtctcatttcccatattccttcacacccagcttctggaaggcatggggtggctgggatttaaggacttctgggggaccaagacatcctcaagaaaacaggggcatccagggctccctggatgaatagaatgcaattcattcagaagctcagaagctaagaataagcctttgaaatacctcattgcatttccctttgggcttcggcttggggagatggatcaagctcagagactggcagtgagagcccagaaggacctgtataaaatgaatctggagctttacattttctgcctctgccttcctcccagctcagcaaggaagtatttgggcaccctaccctttacctggggtctaaccaaaaatggatgggatgaggatgagaggctggagataattgttttatgggatttgggtgtgggactagggtacaatgaaggccaagagcatctcagacatagagttaaaactcaaacctcttatgtgcactttaaagatagactttaggggctggcacaaatctgatcagagacacatatccatacacaggtgaaacacatacagactcaacagcaatcatgcagttccagagacacatgaacctgacacaatctctcttatccttgaggccacagcttggaggagcctagaggcctcaggggaaagtcccaatcctgagggaccctcccaaacatttccatggtgctccagtccactgatcttgggtctggggtgatccaaataccaccccagctccagctgtcttctaccactagaagacccaagagaagcagaagtcgctcgcactggtcagtcggaaggcaagatcagatcctggaggactttcctggcctgcccgccagccctgctcttgttgtggagaaggaagcagatgtgatcacatcaccccgtcattgggcaccgctgactccagcatggaggacaccagggagcagggcctgggcctgtttccccagctgtgatcttgcccagaacctctcttggcttcataaacagctgtgaaccctcccctgagggattaacagcaatgatgggcagtcgtggagttgggggggttgggggtgggattgtgtcctctaaggggacgggttcatctgagtaaacataaaccccaacttgtgccattctttataaaatgattttaaaggca

SEQ ID NO: 2964 - protein, 518 aa, Homo sapiens; identical to SEQ ID NO: 145

SEQ ID NO: 2965 - DNA, 991 bp, Homo sapiens
gcatccagggctccctggatgaatagaatgcaattcattcagaagctcagaagctaagaataagcctttgaaatacctcattgcatttccctttgggcttcggcttggggagatggatcaagctcagagactggcagtgagagcccagaaggacctgtataaaatgaatctggagctttacattttctgcctctgccttcctcccagctcagcaaggaagtatttgggcaccctaccctttacctggggtctaaccaaaaatggatgggatgaggatgagaggctggagataattgttttatgggatttgggtgtgggactagggtacaatgaaggccaagagcatctcagacatagagttaaaactcaaacctcttatgtgcactttaaagatagactttaggggctggcacaaatctgatcagagacacatatccatacacaggtgaaacacatacagactcaacagcaatcatgcagttccagagacacatgaacctgacacaatctctcttatccttgaggccacagcttggaggagcctagaggcctcaggggaaagtcccaatcctgagggaccctcccaaacatttccatggtgctccagtccactgatcttgggtctggggtgatccaaataccaccccagctccagctgtcttctaccactagaagacccaagagaagcagaagtcgctcgcactggtcagtcggaaggcaagatcagatcctggaggactttcctggcctgcccgccagccctgctcttgttgtggagaaggaagcagatgtgatcacatcaccccgtcattgggcaccgctgactccagcatggaggacaccagggagcagggcctgggcctgtttccccagctgtgatcttgcccagaacctctcttggcttcataaacagctgtgaaccctcccctgagggattaacagcaatgatgggcccaacttgtgccattctttataaaatgattttaaaggc

SEQ ID NO: 2966 - protein, 107 aa, Homo sapiens
MVLQSTDLGSGVIQIPPQLQLSSTTRRPKRSRSRSHWSVGRQDQILEDFPGLPASPALVVEKEADVITSPRHWAPLTPAWRTPGSRAWACFPSCDLAQNLSWLHKQL

SEQ ID NO: 2967 - DNA, 4141 bp, Homo sapiens
gcggagcaggataggccaggctgagaagtgcccttgcatgggtaggcgtaggagctggctgagatcaagccatgccttccttctccggccccagagcacctggtgcagagcgtctgcaagtcctacagggagacatgccagctgcggctggaggacctgctgcggcagcgctccaacatcttctcccgggaggaagtgactggctaccagaggaaggtgaggccaggagacctgcaggaagggaacgtatcccacccccaccgggagagttcagagatggctacctgcgcacgactgggtcctggggcagggcgggacatcacagacacaggctggccaacaagcatgtgcacaccttttatgtacagttgcgaatgtgtgtatctgtctacaccccagcagatggatgagcgcttttccttagttcttgcctattaaaattgtacctggccttcatcctacctcctctaccatgcagaccttggtgcaccctccttcctcctcttccatcaacaataacaataatcagaaccctgattaccatttgttaaacaccccttctctgccaggcattgtgctaaacgctttatgtaaattatcctcagcccctaccacaaccaacctatgagggtggcatttattcctacttttaacagacagaaactgagcctagaggggttaataggtttcctcaaagtcacaaagtggtggaaccaaagtcaaattcagattcatcaggctccaaagtttatgctgccttttcgatcacactctcataccacctgctctaaacacactcgtttggcacttcacatttgcttctccaggttattgagaccttgggcataacctttgtgggggaaggggcagctgtatgtcctgttcacctcaacgagatataccttgttggagggcaaagctgtatctcatactttttggattccctcacaacagctaactcggtgtcagcagccggtaggtgctcagtgtgtgggactcactggcaggaatctgtgcatttgtgctaagaccaggcttttgaaaatgctagttgagaacataggagttcagagcctaccccttgcagtttattaggtggggctccagggctcaggaggatcacagggccacacagagcgctacagcgggaccctcctccctccctgcagtccatgtgggagatgtgggaacggtgtgcccaccacctcaccgaggccattcagtacgtggtggagttcgccaagaggctctcaggctttatggagctctgccagaatgaccagattgtgcttctcaaagcaggtgcccagggatgggtgggcaggcctggggacaaggggacagagccaagtggagggaggtggcttaaggaaatcagggggacagagtcagatcctggctttgcttgacactgtccctgcatcttctctccccactgcccaggagcaatggaagtggtgctggttaggatgtgccgggcctacaatgctgacaaccgcacggtcttttttgaaggcaaatacggtggcatggagctgttccgagccttgggtgaggggcagggagaaatgagagggaagattctgatgccaaccccaggcaaagctttgtgacccagggcaccctcttttcagggcgaattgccccctctgctctaaacacaataagggcggtgtcctcgggcaccatcgctccagccactctctcacttttctcatttccactccatcaggctgcagcgagctcatcagctccatctttgacttctcccactccctaagtgccttgcacttttccgaggatgagattgccctctacacagcccttgttctcatcaatgcccgtgagtgttgctgggcttgggtgaaggacattcaggtggcaggggcatggcagatattgaagaagagtctagaccttcagatgtagttaaatctgggaaattgctttaaatagcagaatgagccctactcagtattgctataaaataaaatgagttaaaataaagattcagaggactctcagagagggacaagagcagcataaggtggggttgtgggaagtggggagaaatgaggttgagaggaaatgagccactttcctgacagaaatgtgtctgattgttagtctatggcagtgatttcattgtagcacacatcagaatcacctggggagctttaaaaactattgctgcctgggtcccacttccagagattccagtgtacatgtgctccatgacttatgatggggttatgtcccaataaacctatcgtaagttgaaaatatggtaagttgaaattgcatttaacacgcctaacttactgaacaccatagcttagcctagcctaccttaaatgtgctcagaatgcttacattagcctacagtctggcaaaagcatataacacaaagcctattttataataaagtgttgaatagctcatgtaatttattgaatatggttctaaaagtgaacagcaggatggttgcatgggtattcaaagtatggtttctactgaatgcaagtggctttctcaccaacataaaatcaaaaaatagtaagtcaactcatcataagactgggaccatctgtaattgataaggggtgcactgaattttaacagccacccccaggccaccaagattaagaatcactgctctgtgtgaactaattttaaggctgtatgcctataataggaagactctggatatcctatccactcccctggcatggagtagctgggctgagccagatgaatactaaatattcagagaacctagggaagtgggtcaagctgctaacctgagtttgcagatcgagactatcagtcttctggctctgccagtgagtggacacctaaatatgcccttcaaactagaagataaaaactttaaagatgacttctggatattttatagaatcagggcaaaagttagtcacagattgctgcaagccccctggtgcaggcctgggcaccttcaggaaggccacctcctatcaggagcccttttcgtacatgggggagctcttttccaactcttgttacccctatgacagaatcctagtgcctagcattgaatgagctatgtggaatatcaggttaccagggagaaggtagcttggagtcaggagatcagaaattctcatacctttcatctcttcccagttttccttgtagacagctagccaagcccaacgtccagagcttaccattatcaaaccaaggcacacacatgcacgcgctcagcttagaagacctctatccagcacagatgtccacaaagatacacccttttgttgggagttaatgtccatgttctttcttgttctcattacggtcccaccccctcctccagatcggccagggctccaagagaaaaggaaagtagaacagctgcagtacaatctggagctggcctttcatcatcatctctgcaagactcatcgccaaagcatcctggcaaagctgccacccaaggggaagcttcggagcctgtgtagccagcatgtggaaaggctgcagatcttccagcacctccaccccatcgtggtccaagccgctttccctccactctacaaggagctcttcagcactgaaaccgagtcacctgtggggctgtccaagtgacctggaagagggactccttgcctctccctatggcctgctggcccacctccctggaccccgttccaccctcacccttttcctttcccatgaaccctggagggtggtccccaccagctctttggaagtgagcagatgctgcggctggctttctgtcagcaggccggcctggcagtgggacaatcgccagagggtggggctggcagaacaccatctccagcctcagctttgacctgtctcatttcccatattccttcacacccagcttctggaaggcatggggtggctgggatttaaggacttctgggggaccaagacatcctcaagaaaacaggggcatccagggctccctggatgaatagaatgcaattcattcagaagctcagaagctaagaataagcctttgaaatacctcattgcatttccctttgggcttcggcttggggagatggatcaagctcagagactggcagtgagagcccagaaggacctgtataaaatgaatctggagctttac

SEQ ID NO: 2968 - protein, 106 aa, Homo sapiens; identical to SEQ ID NO: 2960

SEQ ID NO: 2969 - DNA, 2163 bp, Homo sapiens
agaagcactgggggagagagctaggtgcagagcttcaggctgaggcgctgctgagagggcctcgccccgcctctgccgccagctgcaccccactcctggaccaccccctgctgagaaggacagggagccaaggccggcagagccaaggctcagtcatgagaacacaaattgaagtgatcccttgcaaaatctgtggggacaagtcgtctgggatccactacggggttatcacctgtgaggggtgcaagggcttcttccgccggagccagcgctgtaacgcggcctactcctgcacccgtcagcagaactgccccatcgaccgcaccagccgaaaccgatgccagcactgccgcctgcagaaatgcctggcgctgggcatgtcccgagatgctgtcaagttcggccgcatgtccaagaagcagagggacagcctgcatgcagaagtgcagaaacagctgcagcagcggcaacagcagcaacaggaaccagtggtcaagacccctccagcaggggcccaaggagcagataccctcacctacaccttggggctcccagacgggcagctgcccctgggctcctcgcctgacctgcctgaggcttctgcctgtccccctggcctcctgaaagcctcaggctctgggccctcatattccaacaacttggccaaggcagggctcaatggggcctcatgccaccttgaatacagccctgagcggggcaaggctgagggcagagagagcttctatagcacaggcagccagctgacccctgaccgatgtggacttcgttttgaggaacacaggcatcctgggcttggggaactgggacagggcccagacagctacggcagccccagtttccgcagcacaccggaggcaccctatgcctccctgacagagatagagcacctggtgcagagcgtctgcaagtcctacagggagacatgccagctgcggctggaggacctgctgcggcagcgctccaacatcttctcccgggaggaagtgactggctaccagaggaagtccatgtgggagatgtgggaacggtgtgcccaccacctcaccgaggccattcagtacgtggtggagttcgccaagaggctctcaggctttatggagctctgccagaatgaccagattgtgcttctcaaagcaggagcaatggaagtggtgctggttaggatgtgccgggcctacaatgctgacaaccgcacggtcttttttgaaggcaaatacggtggcatggagctgttccgagccttgggctgcagcgagctcatcagctccatctttgacttctcccactccctaagtgccttgcacttttccgaggatgagattgccctctacacagcccttgttctcatcaatgcccatcggccagggctccaagagaaaaggaaagtagaacagctgcagtacaatctggagctggcctttcatcatcatctctgcaagactcatcgccaaagcatcctggcaaagctgccacccaaggggaagcttcggagcctgtgtagccagcatgtggaaaggctgcagatcttccagcacctccaccccatcgtggtccaagccgctttccctccactctacaaggagctcttcagcactgaaaccgagtcacctgtggggctgtccaagtgacctggaagagggactccttgcctctccctatggcctgctggcccacctccctggaccccgttccaccctcacccttttcctttcccatgaaccctggagggtggtccccaccagctctttggaagtgagcagatgctgcggctggctttctgtcagcaggccggcctggcagtgggacaatcgccagagggtggggctggcagaacaccatctccagcctcagctttgacctgtctcatttcccatattccttcacacccagcttctggaaggcatggggtggctgggatttaaggacttctgggggaccaagacatcctcaagaaaacaggggcatccagggctccctggatgaatagaatgcaattcattcagaagctcagaagctaagaataagcctttgaaatacctcattgcatttccctttgggcttcggcttggggagatggatcaagctcagagactggcagtgagagcccagaaggacctgtataaaatgaatctggagctttac

SEQ ID NO: 2970 - protein, 497 aa, Homo sapiens; identical to SEQ ID NO: 143

SEQ ID NO: 2971 - DNA, 2179 bp, Homo sapiens
gccaggtgctcccgccttccaccctccgccctcctccctcccctgggccctgctccctgccctcctgggcagccagggcagccaggacggcaccaagggagctgccccatggacagggccccacagagacagcaccgagcctcacgggagctgctggctgcaaagaagacccacacctcacaaattgaagtgatcccttgcaaaatctgtggggacaagtcgtctgggatccactacggggttatcacctgtgaggggtgcaagggcttcttccgccggagccagcgctgtaacgcggcctactcctgcacccgtcagcagaactgccccatcgaccgcaccagccgaaaccgatgccagcactgccgcctgcagaaatgcctggcgctgggcatgtcccgagatgctgtcaagttcggccgcatgtccaagaagcagagggacagcctgcatgcagaagtgcagaaacagctgcagcagcggcaacagcagcaacaggaaccagtggtcaagacccctccagcaggggcccaaggagcagataccctcacctacaccttggggctcccagacgggcagctgcccctgggctcctcgcctgacctgcctgaggcttctgcctgtccccctggcctcctgaaagcctcaggctctgggccctcatattccaacaacttggccaaggcagggctcaatggggcctcatgccaccttgaatacagccctgagcggggcaaggctgagggcagagagagcttctatagcacaggcagccagctgacccctgaccgatgtggacttcgttttgaggaacacaggcatcctgggcttggggaactgggacagggcccagacagctacggcagccccagtttccgcagcacaccggaggcaccctatgcctccctgacagagatagagcacctggtgcagagcgtctgcaagtcctacagggagacatgccagctgcggctggaggacctgctgcggcagcgctccaacatcttctcccgggaggaagtgactggctaccagaggaagtccatgtgggagatgtgggaacggtgtgcccaccacctcaccgaggccattcagtacgtggtggagttcgccaagaggctctcaggctttatggagctctgccagaatgaccagattgtgcttctcaaagcaggagcaatggaagtggtgctggttaggatgtgccgggcctacaatgctgacaaccgcacggtcttttttgaaggcaaatacggtggcatggagctgttccgagccttgggctgcagcgagctcatcagctccatctttgacttctcccactccctaagtgccttgcacttttccgaggatgagattgccctctacacagcccttgttctcatcaatgcccatcggccagggctccaagagaaaaggaaagtagaacagctgcagtacaatctggagctggcctttcatcatcatctctgcaagactcatcgccaaagcatcctggcaaagctgccacccaaggggaagcttcggagcctgtgtagccagcatgtggaaaggctgcagatcttccagcacctccaccccatcgtggtccaagccgctttccctccactctacaaggagctcttcagcactgaaaccgagtcacctgtggggctgtccaagtgacctggaagagggactccttgcctctccctatggcctgctggcccacctccctggaccccgttccaccctcacccttttcctttcccatgaaccctggagggtggtccccaccagctctttggaagtgagcagatgctgcggctggctttctgtcagcaggccggcctggcagtgggacaatcgccagagggtggggctggcagaacaccatctccagcctcagctttgacctgtctcatttcccatattccttcacacccagcttctggaaggcatggggtggctgggatttaaggacttctgggggaccaagacatcctcaagaaaacaggggcatccagggctccctggatgaatagaatgcaattcattcagaagctcagaagctaagaataagcctttgaaatacctcattgcatttccctttgggcttcggcttggggagatggatcaagctcagagactggcagtgagagcccagaaggacctgtataaaatgaatctggagctttac

SEQ ID NO: 2972 - protein, 518 aa, Homo sapiens; identical to SEQ ID NO: 145

SEQ ID NO: 2973 - DNA, 530 bp, Homo sapiens
ccatagcttagcctagcctaccttaaatgtgctcagaatgcttacattagcctacagtctggcaaaagcatataacacaaagcctattttataataaagtgttgaatagctcatgtaatttattgaatatggttctaaaagtgaacagcaggatggttgcatgggtattcaaagtatggtttctactgaatgcaagtggctttctcaccaacataaaatcaaaaaataaaaaaaaaaaatctccttgtagctatcaggagacttcagtgacttaaatgcaagattgaatcccagtgctctttgcgctctttctatccctgtgtcccctatgtataactataataagtgacaccaggaaaatgttatgagagtataaaacagggattaaaaataatttgggggtaaaaggagtgggtcataaatacttcccagggaagatgacatttatactaggccatgaatgatgtaagattttaacaggcattcatgggggtggggcaggcattccaggcttagggaacaataggagc

SEQ ID NO: 2974 - protein, 48 aa, Homo sapiens
MVLKVNSRMVAWVFKVWFLLNASGFLTNIKSKNKKKKSPCSYQETSVT

SEQ ID NO: 2975 - DNA, 506 bp, Homo sapiens
ttccttccttctgggagtgtttgaatgaagattagactctccttgaccatgaatgaagagcaaccagttttttagtatacagtgatttagactctgggtctagagtgtagatatcatgggcactgtgaaagcacagaaggagaaaaggtttttattttggtggggctttgtgtctgaattctggccaatggaaccacgtggaggcctggcccagaacatctccctgtggattctctcatctggcaactggatgcctacacgaagggtgattttggagtcatgtgttggagatcacaaagcttttgtcagccaggttcctgaatgactgctagacaccatgggctgaactttatgagctccagcaccacctccagccttcagtgactgtctggagcaggcatccggatggaagagaagggggacaaccatgaacttggtgacccacggtcagcctgatttcccttgtggacacatttatgcccagtgtgcattcctcctgaggtctg

SEQ ID NO: 2976 - protein, 69 aa, Homo sapiens
MGTVKAQKEKRFLFWWGFVSEFWPMEPRGGLAQNISLWILSSGNWMPTRRVILESCVGDHKAFVSQVPE

SEQ ID NO: 2977 - DNA, 2503 bp, Homo sapiens
agcctcgcctagctctctgaaagaaagcctgcaacagaagggagagaagcggccccaagtgcagctgaaagcactccttgggagtcagccaagaccctccatccaagcagggctggatccttgcacttggccatgataaggagatgcttccaggtggcagcaagacttggccaccacagaggccttcttgaggccccccgtatcctgcccagactcaaccctgcctcagcatttggatcctccacagactccatgttctcaagattcttgccagagaagacagacttgaaggattatgctcttcccaatgccagctggtgttcggacatgctgagcctgtaccaagaatttctggagaagactaagtctagcggctggatcaagctgccctccttcaagtccaacagagaccacatccggggactcaagctcccatctggactggcagtttcctcagacaaaggtgactgtcgcatcttcaccaggtgcatccaagtggaaggacaaggctttgagtatgtcatctttttccagccaacccagaagaagtcggtctgtcttttccaaccaggctcctacctggaggggcccccagggtttgctcacggcgggtccctggcagccatgatggacgagaccttttctaaaactgccttcctggctggagaggggctgttcacactaagtctcaacatcaggttcaaaaacttgatccccgtggactctctggttgtaatggacgtagaactggacaagattgaggaccagaagctttacatgtcctgcatcgcccacagcagagaccagcagacagtttatgccaagtcctcaggtgttttccttcagctgcagttggaagaagagtctccccagtaacagtcactgtgcctgcaggagagccactgcctcccctgcctgcctcctgcctcctgcctcccctgcctgcctcctgcctcctgcctcccctgcctgcctcctgcctcccctgcctgcctcctgcctcctgcctcccctgcctgcctcctgcctcctgcctcccctgcctgcctgggacccatcaaagagcagggaggggtcctcaagcagcaattggtgaggcgagggaaaggacccttttctctgagtaaataaagtctcacagtcccattctcggcccagggcctttctgtggttggaaatcaaaatccttccagggcatctcacatacccaccttcccattcagcaccgactgaaaagatttactgagtacccgccaggtgtcaggcactgtgtgaggcaccaggcacccagaagtgaaagacagggccccggtctcaagatgcacaatgcgggagccaggtgccaagtcagagtgccctatcacgctcctcccacacccaccctggcttccatcatgagtgcagtgtcatctcagcgggaggaagggctaattttactctacaaaagcaatcagaaaacatcttctagaagaagctcttcctgaactgtctcaaaagttaagtggtgttcattaggcaggcaggggagaggaggatatcccaggcagaagggaagtaagaagtaagacaaaggtgcagaggtgtgaaagtgtacagggactttggagaagagcaaggtgttgaggagggcaggcgtttagggaaagagaaggtgggcaggagcaaaccacaggaaggcttcataatccctgatggagagctggaactttgtcttgcaggcaacagggagcctccaaagggcttgggctggggagtgacagagctttgttatttagaaagatgactcagtggcagtaaggcgtcagcaagactgaaggcaggagtactagttaggagatccccacaggctttacactagagacagtaagggcctgcaggggtcagagctgcgaagctgagagatatgagaaaatgttacaaatacaggaagtgcaggactgtgccactagttatacaatgtggatctgtgaagacgagctccaagtttctggcttatgagtttccaggtggttatcactggaaatacagaaagaggtgggggtaaacaatgagctcagttttacatgcatcgagcttgaagtgcccatggaacttgtaccatgtggcaagtgccagcaggaacgtggatattgtgatatggagcttggagagataagctactgactcaaatcgtgagccaatataaaatgtgacatgaggccggacacggtggctcatgcctgtaatcccagcactttgggaggccgatgcgggctgatcacttgagtgattcgagagtcgagaggctggtcgggagttcgagaccagcctgaccaacatggagaaaccctatctctactaaaaacacaaaaaattagccgggtgtggtggcgcatgcctgtaatcccagctactcaggaggctgaggcaggagaatcacttgaacccgagaggcggaggttgcagtgagccgagatcacaccattgcactccagcctgggcaacaagagcaaaactccgtccc

SEQ ID NO: 2978 - protein, 247 aa, Homo sapiens
MIRRCFQVAARLGHHRGLLEAPRILPRLNPASAFGSSTDSMFSRFLPEKTDLKDYALPNASWCSDMLSLYQEFLEKTKSSGWIKLPSFKSNRDHIRGLKLPSGLAVSSDKGDCRIFTRCIQVEGQGFEYVIFFQPTQKKSVCLFQPGSYLEGPPGFAHGGSLAAMMDETFSKTAFLAGEGLFTLSLNIRFKNLIPVDSLVVMDVELDKIEDQKLYMSCIAHSRDQQTVYAKSSGVFLQLQLEEESPQ

SEQ ID NO: 2979 - DNA, 480 bp, Homo sapiens
cctcgaggactcagaagtggccctgggctcagggcctttttgtcagctcccaaagttggacagcagaggctgtgtcctggccagggactagaggaattgcttgggagtgggctggggaaggagagtggcaggcagggctcctacaccccagctgccgaggatggccacttccagggatgaaaaggtctgtgactttggccaatgccccaggggcccatacttactttttgaacctgatgttgagacttagtgtgaacagccccttctgggagcagaggcacagttgctgtcctcacagagcctttctgtctagggcagaaacatgcaggaagtgccctggctgagaatggagataggatcagggccagggcaagactttaagagaccataagcattgaaaattgaaaatgtaattactcatgtaactcacatataattcaaaagaataatagtaaacagtaaaataagagcagaaaagtc

SEQ ID NO: 2980 - protein, 55 aa, Homo sapiens
MKRSVTLANAPGAHTYFLNLMLRLSVNSPFWEQRHSCCPHRAFLSRAETCRKCPG

SEQ ID NO: 2981 - DNA, 611 bp, Homo sapiens
cattgccagagctgactgacctgggatggccaagccagaggaagacccacatcctggaagccctgtctctagtgcccaactccagttctcaagttgcaagggcccagcagacatgggggcactgcaggggtgaagctggcagttccttctcccagaaattctgagagagcctgggaaagtgccccaggagatggctgggctcacagctctacaagttacaggtctggcaatggccaccctctattcccagtcttccaacaaatcctgaaacttaagagagtggactcttacaataattatatttcacatgttaaaaaatatgactccgaaggatcccttgaaaccaggagttcaagaccagcccggtcaacatggcaagaccccatttctacaaaagaagaattttgaaaattagccaggcatggtgacatgcgcctgtagttccagctacttgggaggctgaagtggaaggattgcttgagcccaggagttcatggttgcagtgagctatgaacatgccactgcactccaacctgggcaacagagcaagaccctgtctcaaaaatgaagaagaagaagaagaagaggaagaggaagaggaagaggaagaa

SEQ ID NO: 2982 - protein, 35 aa, Homo sapiens
MLKNMTPKDPLKPGVQDQPGQHGKTPFLQKKNFEN

SEQ ID NO: 2983 - DNA, 1161 bp, Homo sapiens
atctcattctcgcccctccagaagaagcagttgtcccccaaatactctgctccctcactgctgaatccctgtagggagaagcctgccaacagtgaccttccgaaacagccttctgaatacaaagaggattcagtttccatcttctcaactttttaacacagaaatacttcctgcgagcatatcgacaactctcgggccaggcgctgtggctcacacgcctgtagtcccagctactcaggaggctgaggcaggagaattgcttgaacccaggaggaagaggttgcagtgagccaagatcatgccacatcactccaacctgggcaacagaacaagaacccatctcaaacaaacaaacaaacaaaaaaaaaaaactcttgtctccttaggatatgttacctgctccactgcagactagagaaataaatgtgtattgaaccttttactgcaaacttgaaaatgctagaaaaccaagcatgaagaataaatacatggtgggaaacacacaggcatgtgcatatgcatatacattgtaagttagtaagttagaaagctagctttgttgtatctgaacacatgaatcttttttggtcagtgtaggaagcacagccagatcctataggaatgaatacctcaaatctgttgtctgagattctagagattaaaccactgtgccatttttaacccaggctgtactgttgtttcttaccaacagcataggttttcatcactggaaggagcctgtgttcatttcctagggctgctgtagcaaagtagtacaaactggattgtttaaaccaacaaaaactcattgtctctcagttctggaggccagaagttcaaaatcaaggtgttgaccaaggccattctcctgaaagtgctagggaaggagctgtccacgcctccctcctggcttctgggagcctcaggtgttccttggcttctagatgcatcattccagtcctccatcttcacatggcattccctctgtgtgtctccacagtgtcttccctctgtgcagatctatctctgtgtccaagtctcctctttttataaggaaaccagtcataatggacccacctgaatgacctcattttaacttgattacctctgtaaaaaatgtatttccaaataaagtgaccttatgaggtattggagattagg

SEQ ID NO: 2984 - protein, 46 aa, Homo sapiens
MHHSSPPSSHGIPSVCLHSVFPLCRSISVSKSPLFIRKPVIMDPPE

SEQ ID NO: 2985 - DNA, 2432 bp, Homo sapiens
gggcgcctgtaatcccagctactcaggaggctgaggcaggagaatcgcttgaacccgggaggcggaggttgcggtgagctgagatcacgccattgcactacagcctgggcaataagagtgaaactctgtcaaaaaaaaaaaaaaaaaaaaagaagcctggttacaacccacaatctgatttcatgaaccctaatggttctcactgccagttttgggggcttagagtcacaatcacttgagtgttgggctgaactgaccctgttgctgattcagactcaactcatgtctgccagggaaacctcctttctgttacattttttattttctgtaaattgcatttaaaccacagttcttccaagaaggatttccgtctttaccgtaccattttattcagtatattgttagcgtttatatactatattcctgattgccatgtgtgggtacttcattttgatttcatgtctgtttactctgtccccagttggactgttaattccacaagggcaaagatcctatcttctgtttcattgagacgctcccattcctttcaattttgcaccctgtggacatttgaatcaatcatctattgacatgtgattctagcagggtacaggtgcttggctctgccatggcatttctctcacccttgtttctcatttgccatccacctcattttctatagacccaaagcttatgaaagaagaacaaatgtcacaggcccagctcttcaccagaagctttgatgatggcctgggctttgaatacgtgatgttctacaatgacattgagaaaaggatggtttgcttatttcaaggaggcccttacctggaaggaccacctggattcattcatggaggtgccattgcaaccatgattgatgctactgttggtatgtgtgcaatgatggctgggggaatcgtcatgactgccaatctcaacatcaattataaaagacctatccctctttgttctgttgttatgataaatagccaacttgataaagttgaaggaaggaaattttttgtttcctgtaatgttcagagtgttgatgagaagaccctatactcagaggcgacaagcttatttataaagctgaatcctgctaaaagtctgacataaagagctgctggtgaactccatctcattctcgcccctccagaagaagcagttgtcccccaaatactctgctccctcactgctgaatccctgtagggagaagcctgccaacagtgaccttccgaaacagccttctgaatacaaagaggattcagtttccatcttctcaactttttaacacagaaatacttcctgcgagcatatcgacaactctcgggccaggcgctgtggctcacacctataatcccagcactttaggaggccgaggcaggcggattgcctgagctcaggagttcaagatcagtctgggcaacacgatgaaactccgtctctactaaaatacaaaaaattatccaggcatggtggcgtacgcctgtagtcccagctactcaggaggctgaggcaggagaattgcttgaacccaggaggaagaggttgcagtgagccaagatcatgccacatcactccaacctgggcaacagaacaagaacccatctcaaacaaacaaacaaacaaaaaaaaaaaactcttgtctccttaggatatgttacctgctccactgcagactagagaaataaatgtgtattgaaccttttactgcaaacttgaaaatgctagaaaaccaagcatgaagaataaatacatggtgggaaacacacaggcatgtgcatatgcatatacattgtaagttagtaagttagaaagctagctttgttgtatctgaacacatgaatcttttttggtcagtgtaggaagcacagccagatcctataggaatgaatacctcaaatctgttgtctgagattctagagattaaaccactgtgccatttttaacccaggctgtactgttgtttcttaccaacagcataggttttcatcactggaaggagcctgtgttcatttcctagggctgctgtagcaaagtagtacaaactggattgtttaaaccaacaaaaactcattgtctctcagttctggaggccagaagttcaaaatcaaggtgttgaccaaggccattctcctgaaagtgctagggaaggagctgtccacgcctccctcctggcttctgggagcctcaggtgttccttggcttctagatgcatcattccagtcctccatcttcacatggcattccctctgtgtgtctccacagtgtcttccctctgtgcagatctatctctgtgtccaagtctcctctttttataaggaaaccagtcataatggacccacctgaatgacctcattttaacttgattacctctgtaaaaaatgtatttccaaataaagtgaccttatgaggtattggagattagg

SEQ ID NO: 2986 - protein, 141 aa, Homo sapiens
MKEEQMSQAQLFTRSFDDGLGFEYVMFYNDIEKRMVCLFQGGPYLEGPPGFIHGGAIATMIDATVGMCAMMAGGIVMTANLNINYKRPIPLCSVVMINSQLDKVEGRKFFVSCNVQSVDEKTLYSEATSLFIKLNPAKSLT

SEQ ID NO: 2987 - DNA, 3208 bp, Homo sapiens
ctttgaactggctttcacatagttaagcattgctagagaaaatcaccccatctagcagataagtttggtgattgtgatttttgtagtttcatctcctgtctccattcttatcctcctcaaagcccttcttccactcaactgtcagaatgattcaaaatgcaaatctcatcatgttattccaatgctattttcagtgctatcccatttcttaaaatactcttgcctttcagacttaaaaatgaatatgaagcacctaggaatcttgttaaaatgcaagttctgcttcagaaggtcagaagtagaacctgagattctgcatttccaacaaacttctttcaccatcacaaaggacaaacacatcctcttgagagtagtagcttttggtctttattttgaaatgacctacattttaactcaacccagaccttatttttctcatttttatgaaataagctcaaggtttgccaatctagaccagaaatctcaaactcctaagtaaaacaattataagcacttaacacctatcttatcctgaagtcctggaatgtcagagttggaagagatcttagagctcattttgttttatctcctcattgtatggataaagtgtagtgcaaaagagtgagttctaggccagaggtaggccaataatttaattttcccaactcacgggccaaggttctttccactgcaccataatactgatccccaattttaaggttccttgtctgtccttctaaaccatcaattcactcaacaactgcttaagtgtatatagtatgtgcacatctgtgccatttgttgggtatgcaaagtctaaaagacagggtgcctgccctgagatgctcatgacctaattcaaatgcatccttcctgtccctctccccacttctcctggatcttctcatctgtatctttttccacgtttgtaaatataaattcaatagaaataaacagttttatatatggcaaatcatgatgagctatgaaagaaaggtgagtagggggattaaattttaaaatagatacaaaaggataaatgcactatttcttgagagcaatggctttcaatctttattttgaagtgacctatattttgattcaatccagttcccccaacttgctcacaattgtgtaagtgaaaaaaaactgtgtctaaacaagtgcactattacttacccagagtatatggttctgttaactaagtgttctgtttctttttaaagcctggttaatggccgggcgctgtggctcacgcctataatcccagcactttgggaggccaaggcaggcggatccctgagttcgggagttcaagaccagcctgaccaacacggagaaaccccgtctctactaaaaatacagaattagtcaggcgtggtggtgggcgcctgtaatcccagctactcaggaggctgaggcaggagaatcgcttgaacccgggaggcggaggttgcgacccaaagcttatgaaagaagaacaaatgtcacaggcccagctcttcaccagaagctttgatgatggcctgggctttgaatacgtgatgttctacaatgacattgagaaaaggatggtttgcttatttcaaggaggcccttacctggaaggaccacctggattcattcatggaggtgccattgcaaccatgattgatgctactgttggtatgtgtgcaatgatggctgggggaatcgtcatgactgccaatctcaacatcaattataaaagacctatccctctttgttctgttgttatgataaatagccaacttgataaagttgaaggaaggaaattttttgtttcctgtaatgttcagagtgttgatgagaagaccctatactcagaggcgacaagcttatttataaagctgaatcctgctaaaagtctgacataaagagctgctggtgaactccatctcattctcgcccctccagaagaagcagttgtcccccaaatactctgctccctcactgctgaatccctgtagggagaagcctgccaacagtgaccttccgaaacagccttctgaatacaaagaggattcagtttccatcttctcaactttttaacacagaaatacttcctgcgagcatatcgacaactctcgggccaggcgctgtggctcacacctataatcccagcactttaggaggccgaggcaggcggattgcctgagctcaggagttcaagatcagtctgggcaacacgatgaaactccgtctctactaaaatacaaaaaattatccaggcatggtggcgtacgcctgtagtcccagctactcaggaggctgaggcaggagaattgcttgaacccaggaggaagaggttgcagtgagccaagatcatgccacatcactccaacctgggcaacagaacaagaacccatctcaaacaaacaaacaaacaaaaaaaaaaaactcttgtctccttaggatatgttacctgctccactgcagactagagaaataaatgtgtattgaaccttttactgcaaacttgaaaatgctagaaaaccaagcatgaagaataaatacatggtgggaaacacacaggcatgtgcatatgcatatacattgtaagttagtaagttagaaagctagctttgttgtatctgaacacatgaatcttttttggtcagtgtaggaagcacagccagatcctataggaatgaatacctcaaatctgttgtctgagattctagagattaaaccactgtgccatttttaacccaggctgtactgttgtttcttaccaacagcataggttttcatcactggaaggagcctgtgttcatttcctagggctgctgtagcaaagtagtacaaactggattgtttaaaccaacaaaaactcattgtctctcagttctggaggccagaagttcaaaatcaaggtgttgaccaaggccattctcctgaaagtgctagggaaggagctgtccacgcctccctcctggcttctgggagcctcaggtgttccttggcttctagatgcatcattccagtcctccatcttcacatggcattccctctgtgtgtctccacagtgtcttccctctgtgcagatctatctctgtgtccaagtctcctctttttataaggaaaccagtcataatggacccacctgaatgacctcattttaacttgattacctctgtaaaaaatgtatttccaaataaagtgaccttatgaggtattggagattagg

SEQ ID NO: 2988 - protein, 141 aa, Homo sapiens; identical to SEQ ID NO: 2986

SEQ ID NO: 2989 - DNA, 2226 bp, Homo sapiens
gcgcgggttccggggctgaggggctgaggggcccaaggcgataaccgggatccgctccggccgcgctcctcttgcctttgagaagccccggaagtggcccggctgttggccgcagcgggaggtcttcggaaagaaaaggccggaaccagaagatagactcaacagcgatgccctacccggaccccgccggcctcacaccccggccagccagccgccagtagtgcgcaccgcctcctccccaagccccgccctgcgtccaccccaggggttaactcgcacgcgcgctcttgtggcggaggtagagtgcgccgtccagggctagagcaagcgcggccccgcggcccggagccatgctgaggagctgcgccgcgcgcctccgcacgctgggggctctgtgcctgccgccagtaggccggcgcctgccgggaagcgagccgcgacccgagctgaggtcattttcttctgaggaagtcattcttaaggactgttctgtccccaaccccagctggaacaaggacctaagactgctctttgaccagtttatgaagaaatgtgaagacggctcctggaaacgtttgccttcatataaacgtacacctactgaatggattcaagacttcaaaacccattttcttgattcattcatggaggtgccattgcaaccatgattgatgctactgttggtatgtgtgcaatgatggctgggggaatcgtcatgactgccaatctcaacatcaattataaaagacctatccctctttgttctgttgttatgataaatagccaacttgataaagttgaaggaaggaaattttttgtttcctgtaatgttcagagtgttgatgagaagaccctatactcagaggcgacaagcttatttataaagctgaatcctgctaaaagtctgacataaagagctgctggtgaactccatctcattctcgcccctccagaagaagcagttgtcccccaaatactctgctccctcactgctgaatccctgtagggagaagcctgccaacagtgaccttccgaaacagccttctgaatacaaagaggattcagtttccatcttctcaactttttaacacagaaatacttcctgcgagcatatcgacaactctcgggccaggcgctgtggctcacacctataatcccagcactttaggaggccgaggcaggcggattgcctgagctcaggagttcaagatcagtctgggcaacacgatgaaactccgtctctactaaaatacaaaaaattatccaggcatggtggcgtacgcctgtagtcccagctactcaggaggctgaggcaggagaattgcttgaacccaggaggaagaggttgcagtgagccaagatcatgccacatcactccaacctgggcaacagaacaagaacccatctcaaacaaacaaacaaacaaaaaaaaaaaactcttgtctccttaggatatgttacctgctccactgcagactagagaaataaatgtgtattgaaccttttactgcaaacttgaaaatgctagaaaaccaagcatgaagaataaatacatggtgggaaacacacaggcatgtgcatatgcatatacattgtaagttagtaagttagaaagctagctttgttgtatctgaacacatgaatcttttttggtcagtgtaggaagcacagccagatcctataggaatgaatacctcaaatctgttgtctgagattctagagattaaaccactgtgccatttttaacccaggctgtactgttgtttcttaccaacagcataggttttcatcactggaaggagcctgtgttcatttcctagggctgctgtagcaaagtagtacaaactggattgtttaaaccaacaaaaactcattgtctctcagttctggaggccagaagttcaaaatcaaggtgttgaccaaggccattctcctgaaagtgctagggaaggagctgtccacgcctccctcctggcttctgggagcctcaggtgttccttggcttctagatgcatcattccagtcctccatcttcacatggcattccctctgtgtgtctccacagtgtcttccctctgtgcagatctatctctgtgtccaagtctcctctttttataaggaaaccagtcataatggacccacctgaatgacctcattttaacttgattacctctgtaaaaaatgtatttccaaataaagtgaccttatgaggtattggagattagg

SEQ ID NO: 2990 - protein, 105 aa, Homo sapiens
MLRSCAARLRTLGALCLPPVGRRLPGSEPRPELRSFSSEEVILKDCSVPNPSWNKDLRLLFDQFMKKCEDGSWKRLPSYKRTPTEWIQDFKTHFLDSFMEVPLQP

SEQ ID NO: 2991 - DNA, 2386 bp, Homo sapiens
gcgcgggttccggggctgaggggctgaggggcccaaggcgataaccgggatccgctccggccgcgctcctcttgcctttgagaagccccggaagtggcccggctgttggccgcagcgggaggtcttcggaaagaaaaggccggaaccagaagatagactcaacagcgatgccctacccggaccccgccggcctcacaccccggccagccagccgccagtagtgcgcaccgcctcctccccaagccccgccctgcgtccaccccaggggttaactcgcacgcgcgctcttgtggcggaggtagagtgcgccgtccagggctagagcaagcgcggccccgcggcccggagccatgctgaggagctgcgccgcgcgcctccgcacgctgggggctctgtgcctgccgccagtaggccggcgcctgccgggaagcgagccgcgacccgagctgaggtcattttcttctgaggaagtcattcttaaggactgttctgtccccaaccccagctggaacaaggacctaagactgctctttgaccagtttatgaagaaatgtgaagacggctcctggaaacgtttgccttcatataaacgtacacctactgaatggattcaagacttcaaaacccattttcttgacccaaagcttatgaaagaagaacaaatgtcacaggcccagctcttcaccagaagctttgatgatggcctgggctttgaatacgtgatgttctacaatgacattgagaaaaggatggtttgcttatttcaaggaggcccttacctggaaggaccacctggattcattcatggaggtgccattgcaaccatgattgatgctactgttggtatgtgtgcaatgatggctgggggaatcgtcatgactgccaatctcaacatcaattataaaagacctatccctctttgttctgttgttatgataaatagccaacttgataaagttgaaggaaggaaattttttgtttcctgtaatgttcagagtgttgatgagaagaccctatactcagaggcgacaagcttatttataaagctgaatcctgctaaaagtctgacataaagagctgctggtgaactccatctcattctcgcccctccagaagaagcagttgtcccccaaatactctgctccctcactgctgaatccctgtagggagaagcctgccaacagtgaccttccgaaacagccttctgaatacaaagaggattcagtttccatcttctcaactttttaacacagaaatacttcctgcgagcatatcgacaactctcgggccaggcgctgtggctcacacctataatcccagcactttaggaggccgaggcaggcggattgcctgagctcaggagttcaagatcagtctgggcaacacgatgaaactccgtctctactaaaatacaaaaaattatccaggcatggtggcgtacgcctgtagtcccagctactcaggaggctgaggcaggagaattgcttgaacccaggaggaagaggttgcagtgagccaagatcatgccacatcactccaacctgggcaacagaacaagaacccatctcaaacaaacaaacaaacaaaaaaaaaaaactcttgtctccttaggatatgttacctgctccactgcagactagagaaataaatgtgtattgaaccttttactgcaaacttgaaaatgctagaaaaccaagcatgaagaataaatacatggtgggaaacacacaggcatgtgcatatgcatatacattgtaagttagtaagttagaaagctagctttgttgtatctgaacacatgaatcttttttggtcagtgtaggaagcacagccagatcctataggaatgaatacctcaaatctgttgtctgagattctagagattaaaccactgtgccatttttaacccaggctgtactgttgtttcttaccaacagcataggttttcatcactggaaggagcctgtgttcatttcctagggctgctgtagcaaagtagtacaaactggattgtttaaaccaacaaaaactcattgtctctcagttctggaggccagaagttcaaaatcaaggtgttgaccaaggccattctcctgaaagtgctagggaaggagctgtccacgcctccctcctggcttctgggagcctcaggtgttccttggcttctagatgcatcattccagtcctccatcttcacatggcattccctctgtgtgtctccacagtgtcttccctctgtgcagatctatctctgtgtccaagtctcctctttttataaggaaaccagtcataatggacccacctgaatgacctcattttaacttgattacctctgtaaaaaatgtatttccaaataaagtgaccttatgaggtattggagattagg

SEQ ID NO: 2992 - protein, 240 aa, Homo sapiens; identical to SEQ ID NO: 151

SEQ ID NO: 2993 - DNA, 2618 bp, Homo sapiens
gcgcgggttccggggctgaggggctgaggggcccaaggcgataaccgggatccgctccggccgcgctcctcttgcctttgagaagccccggaagtggcccggctgttggccgcagcgggaggtcttcggaaagaaaaggccggaaccagaagatagactcaacagcgatgccctacccggaccccgccggcctcacaccccggccagccagccgccagtagtgcgcaccgcctcctccccaagccccgccctgcgtccaccccaggggttaactcgcacgcgcgctcttgtggcggaggtagagtgcgccgtccagggctagagcaagcgcggccccgcggcccggagccatgctgaggagctgcgccgcgcgcctccgcacgctgggggctctgtgcctgccgccagtaggccggcgcctgccgggaagcgagccgcgacccgagctgaggtcattttcttctgaggaagtcattcttaaggactgttctgtccccaaccccagctggaacaaggacctaagactgctctttgaccagtttatgaagaaatgtgaagacggctcctggaaacgtttgccttcatataaacgtacacctactgaatggattcaagacttcaaaacccattttcttgcctggttaatggccgggcgctgtggctcacgcctataatcccagcactttgggaggccaaggcaggcggatccctgagttcgggagttcaagaccagcctgaccaacacggagaaaccccgtctctactaaaaatacagaattagtcaggcgtggtggtgggcgcctgtaatcccagctactcaggaggctgaggcaggagaatcgcttgaacccgggaggcggaggttgcgacccaaagcttatgaaagaagaacaaatgtcacaggcccagctcttcaccagaagctttgatgatggcctgggctttgaatacgtgatgttctacaatgacattgagaaaaggatggtttgcttatttcaaggaggcccttacctggaaggaccacctggattcattcatggaggtgccattgcaaccatgattgatgctactgttggtatgtgtgcaatgatggctgggggaatcgtcatgactgccaatctcaacatcaattataaaagacctatccctctttgttctgttgttatgataaatagccaacttgataaagttgaaggaaggaaattttttgtttcctgtaatgttcagagtgttgatgagaagaccctatactcagaggcgacaagcttatttataaagctgaatcctgctaaaagtctgacataaagagctgctggtgaactccatctcattctcgcccctccagaagaagcagttgtcccccaaatactctgctccctcactgctgaatccctgtagggagaagcctgccaacagtgaccttccgaaacagccttctgaatacaaagaggattcagtttccatcttctcaactttttaacacagaaatacttcctgcgagcatatcgacaactctcgggccaggcgctgtggctcacacctataatcccagcactttaggaggccgaggcaggcggattgcctgagctcaggagttcaagatcagtctgggcaacacgatgaaactccgtctctactaaaatacaaaaaattatccaggcatggtggcgtacgcctgtagtcccagctactcaggaggctgaggcaggagaattgcttgaacccaggaggaagaggttgcagtgagccaagatcatgccacatcactccaacctgggcaacagaacaagaacccatctcaaacaaacaaacaaacaaaaaaaaaaaactcttgtctccttaggatatgttacctgctccactgcagactagagaaataaatgtgtattgaaccttttactgcaaacttgaaaatgctagaaaaccaagcatgaagaataaatacatggtgggaaacacacaggcatgtgcatatgcatatacattgtaagttagtaagttagaaagctagctttgttgtatctgaacacatgaatcttttttggtcagtgtaggaagcacagccagatcctataggaatgaatacctcaaatctgttgtctgagattctagagattaaaccactgtgccatttttaacccaggctgtactgttgtttcttaccaacagcataggttttcatcactggaaggagcctgtgttcatttcctagggctgctgtagcaaagtagtacaaactggattgtttaaaccaacaaaaactcattgtctctcagttctggaggccagaagttcaaaatcaaggtgttgaccaaggccattctcctgaaagtgctagggaaggagctgtccacgcctccctcctggcttctgggagcctcaggtgttccttggcttctagatgcatcattccagtcctccatcttcacatggcattccctctgtgtgtctccacagtgtcttccctctgtgcagatctatctctgtgtccaagtctcctctttttataaggaaaccagtcataatggacccacctgaatgacctcattttaacttgattacctctgtaaaaaatgtatttccaaataaagtgaccttatgaggtattggagattagg

SEQ ID NO: 2994 - protein, 141 aa, Homo sapiens; identical to SEQ ID NO: 2986

SEQ ID NO: 2995 - DNA, 1273 bp, Homo sapiens
gcttatttataaagctgaatcctgctaaaagtctgacataaagagctgctggtgaactccatctcattctcgcccctccagaagaagcagttgtcccccaaatactctgctccctcactgctgaatccctgtagggagaagcctgccaacagtgaccttccgaaacagccttctgaatacaaagaggattcagtttccatcttctcaactttttaacacagaaatacttcctgcgagcatatcgacaactctcgggccaggcgctgtggctcacacctataatcccagcactttaggaggccgaggcaggcggattgcctgagctcaggagttcaagatcagtctgggcaacacgatgaaactccgtctctactaaaatacaaaaaattatccaggcatggtggcgtacgcctgtagtcccagctactcaggaggctgaggcaggagaattgcttgaacccaggaggaagaggttgcagtgagccaagatcatgccacatcactccaacctgggcaacagaacaagaacccatctcaaacaaacaaacaaacaaaaaaaaaaaactcttgtctccttaggatatgttacctgctccactgcagactagagaaataaatgtgtattgaaccttttactgcaaacttgaaaatgctagaaaaccaagcatgaagaataaatacatggtgggaaacacacaggcatgtgcatatgcatatacattgtaagttagtaagttagaaagctagctttgttgtatctgaacacatgaatcttttttggtcagtgtaggaagcacagccagatcctataggaatgaatacctcaaatctgttgtctgagattctagagattaaaccactgtgccatttttaacccaggctgtactgttgtttcttaccaacagcataggttttcatcactggaaggagcctgtgttcatttcctagggctgctgtagcaaagtagtacaaactggattgtttaaaccaacaaaaactcattgtctctcagttctggaggccagaagttcaaaatcaaggtgttccttggcttctagatgcatcattccagtcctccatcttcacatggcattccctctgtgtgtctccacagtgtcttccctctgtgcagatctatctctgtgtccaagtctcctctttttataaggaaaccagtcataatggacccacctgaatgacctcattttaacttgattacctctgtaaaaaatgtatttccaaataaagtgaccttatgaggtattggagatta

SEQ ID NO: 2996 - protein, 46 aa, Homo sapiens; identical to SEQ ID NO: 2984

SEQ ID NO: 2997 - DNA, 1950 bp, Homo sapiens
gggcgcctgtaatcccagctactcaggaggctgaggcaggagaatcgcttgaacccgggaggcggaggttgcggtgagctgagatcacgccattgcactacagcctgggcaataagagtgaaactctgtcaaaaaaaaaaaaaaaaaaaaagaagcctggttacaacccacaatctgatttcatgaaccctaatggttctcactgccagttttgggggcttagagtcacaatcacttgagtgttgggctgaactgaccctgttgctgattcagactcaactcatgtctgccagggaaacctcctttctgttacattttttattttctgtaaattgcatttaaaccacagttcttccaagaaggatttccgtctttaccgtaccattttattcagtatattgttagcgtttatatactatattcctgattgccatgtgtgggtacttcattttgatttcatgtctgtttactctgtccccagttggactgttaattccacaagggcaaagatcctatcttctgtttcattgagacgctcccattcctttcaattttgcaccctgtggacatttgaatcaatcatctattgacatgtgattctagcagggtacaggtgcttggctctgccatggcatttctctcacccttgtttctcatttgccatccacctcattttctatagacccaaagcttatgaaagaagaacaaatgtcacaggcccagctcttcaccagaagctttgatgatggcctgggctttgaatacgtgatgttctacaatgacattgagaaaaggatggtttgcttatttcaaggaggcccttacctggaaggaccacctggattcattcatggaggtgccattgcaaccatgattgatgctactgttggtatgtgtgcaatgatggctgggggaatcgtcatgactgccaatctcaacatcaattataaaagacctatccctctttgttctgttgttatgataaatagccaacttgataaagttgaaggaaggaaattttttgtttcctgtaatgttcagagtgttgatgagaagaccctatactcagaggcgacaagcttatttataaagctgaatcctgctaaaagtctgacataaagagctgctggtgaactccatctcattctcgcccctccagaagaagcagttgtcccccaaatactctgctccctcactgctgaatccctgtagggagaagcctgccaacagtgaccttccgaaacagccttctgaatacaaagaggattcagtttccatcttctcaactttttaacacagaaatacttcctgcgagcatatcgacaactctcgggccaggcgctgtggctcacacctataatcccagcactttaggaggccgaggcaggcggattgcctgagctcaggagttcaagatcagtctgggcaacacgatgaaactccgtctctactaaaatacaaaaaattatccaggcatggtggcgtacgcctgtagtcccagctactcaggaggctgaggcaggagaattgcttgaacccaggaggaagaggttgcagtgagccaagatcatgccacatcactccaacctgggcaacagaacaagaacccatctcaaacaaacaaacaaacaaaaaaaaaaaactcttgtctccttaggatatgttacctgctccactgcagactagagaaataaatgtgtattgaaccttttactgcaaacttgaaaatgctagaaaaccaagcatgaagaataaatacatggtgggaaacacacaggcatgtgcatatgcatatacattgtaagttagtaagttagaaagctagctttgttgtatctgaacacatgaatcttttttggtcagtgtaggaagcacagccagatcctataggaatgaatacctcaaatctgttgtctgagattctagagattaaaccactgtgccattttt

SEQ ID NO: 2998 - protein, 141 aa, Homo sapiens; identical to SEQ ID NO: 2986

SEQ ID NO: 2999 - DNA, 2726 bp, Homo sapiens
ctttgaactggctttcacatagttaagcattgctagagaaaatcaccccatctagcagataagtttggtgattgtgatttttgtagtttcatctcctgtctccattcttatcctcctcaaagcccttcttccactcaactgtcagaatgattcaaaatgcaaatctcatcatgttattccaatgctattttcagtgctatcccatttcttaaaatactcttgcctttcagacttaaaaatgaatatgaagcacctaggaatcttgttaaaatgcaagttctgcttcagaaggtcagaagtagaacctgagattctgcatttccaacaaacttctttcaccatcacaaaggacaaacacatcctcttgagagtagtagcttttggtctttattttgaaatgacctacattttaactcaacccagaccttatttttctcatttttatgaaataagctcaaggtttgccaatctagaccagaaatctcaaactcctaagtaaaacaattataagcacttaacacctatcttatcctgaagtcctggaatgtcagagttggaagagatcttagagctcattttgttttatctcctcattgtatggataaagtgtagtgcaaaagagtgagttctaggccagaggtaggccaataatttaattttcccaactcacgggccaaggttctttccactgcaccataatactgatccccaattttaaggttccttgtctgtccttctaaaccatcaattcactcaacaactgcttaagtgtatatagtatgtgcacatctgtgccatttgttgggtatgcaaagtctaaaagacagggtgcctgccctgagatgctcatgacctaattcaaatgcatccttcctgtccctctccccacttctcctggatcttctcatctgtatctttttccacgtttgtaaatataaattcaatagaaataaacagttttatatatggcaaatcatgatgagctatgaaagaaaggtgagtagggggattaaattttaaaatagatacaaaaggataaatgcactatttcttgagagcaatggctttcaatctttattttgaagtgacctatattttgattcaatccagttcccccaacttgctcacaattgtgtaagtgaaaaaaaactgtgtctaaacaagtgcactattacttacccagagtatatggttctgttaactaagtgttctgtttctttttaaagcctggttaatggccgggcgctgtggctcacgcctataatcccagcactttgggaggccaaggcaggcggatccctgagttcgggagttcaagaccagcctgaccaacacggagaaaccccgtctctactaaaaatacagaattagtcaggcgtggtggtgggcgcctgtaatcccagctactcaggaggctgaggcaggagaatcgcttgaacccgggaggcggaggttgcgacccaaagcttatgaaagaagaacaaatgtcacaggcccagctcttcaccagaagctttgatgatggcctgggctttgaatacgtgatgttctacaatgacattgagaaaaggatggtttgcttatttcaaggaggcccttacctggaaggaccacctggattcattcatggaggtgccattgcaaccatgattgatgctactgttggtatgtgtgcaatgatggctgggggaatcgtcatgactgccaatctcaacatcaattataaaagacctatccctctttgttctgttgttatgataaatagccaacttgataaagttgaaggaaggaaattttttgtttcctgtaatgttcagagtgttgatgagaagaccctatactcagaggcgacaagcttatttataaagctgaatcctgctaaaagtctgacataaagagctgctggtgaactccatctcattctcgcccctccagaagaagcagttgtcccccaaatactctgctccctcactgctgaatccctgtagggagaagcctgccaacagtgaccttccgaaacagccttctgaatacaaagaggattcagtttccatcttctcaactttttaacacagaaatacttcctgcgagcatatcgacaactctcgggccaggcgctgtggctcacacctataatcccagcactttaggaggccgaggcaggcggattgcctgagctcaggagttcaagatcagtctgggcaacacgatgaaactccgtctctactaaaatacaaaaaattatccaggcatggtggcgtacgcctgtagtcccagctactcaggaggctgaggcaggagaattgcttgaacccaggaggaagaggttgcagtgagccaagatcatgccacatcactccaacctgggcaacagaacaagaacccatctcaaacaaacaaacaaacaaaaaaaaaaaactcttgtctccttaggatatgttacctgctccactgcagactagagaaataaatgtgtattgaaccttttactgcaaacttgaaaatgctagaaaaccaagcatgaagaataaatacatggtgggaaacacacaggcatgtgcatatgcatatacattgtaagttagtaagttagaaagctagctttgttgtatctgaacacatgaatcttttttggtcagtgtaggaagcacagccagatcctataggaatgaatacctcaaatctgttgtctgagattctagagattaaaccactgtgccattttt

SEQ ID NO: 3000 - protein, 141 aa, Homo sapiens; identical to SEQ ID NO: 2986

SEQ ID NO: 3001 - DNA, 1904 bp, Homo sapiens
gcgcgggttccggggctgaggggctgaggggcccaaggcgataaccgggatccgctccggccgcgctcctcttgcctttgagaagccccggaagtggcccggctgttggccgcagcgggaggtcttcggaaagaaaaggccggaaccagaagatagactcaacagcgatgccctacccggaccccgccggcctcacaccccggccagccagccgccagtagtgcgcaccgcctcctccccaagccccgccctgcgtccaccccaggggttaactcgcacgcgcgctcttgtggcggaggtagagtgcgccgtccagggctagagcaagcgcggccccgcggcccggagccatgctgaggagctgcgccgcgcgcctccgcacgctgggggctctgtgcctgccgccagtaggccggcgcctgccgggaagcgagccgcgacccgagctgaggtcattttcttctgaggaagtcattcttaaggactgttctgtccccaaccccagctggaacaaggacctaagactgctctttgaccagtttatgaagaaatgtgaagacggctcctggaaacgtttgccttcatataaacgtacacctactgaatggattcaagacttcaaaacccattttcttgacccaaagcttatgaaagaagaacaaatgtcacaggcccagctcttcaccagaagctttgatgatggcctgggctttgaatacgtgatgttctacaatgacattgagaaaaggatggtttgcttatttcaaggaggcccttacctggaaggaccacctggattcattcatggaggtgccattgcaaccatgattgatgctactgttggtatgtgtgcaatgatggctgggggaatcgtcatgactgccaatctcaacatcaattataaaagacctatccctctttgttctgttgttatgataaatagccaacttgataaagttgaaggaaggaaattttttgtttcctgtaatgttcagagtgttgatgagaagaccctatactcagaggcgacaagcttatttataaagctgaatcctgctaaaagtctgacataaagagctgctggtgaactccatctcattctcgcccctccagaagaagcagttgtcccccaaatactctgctccctcactgctgaatccctgtagggagaagcctgccaacagtgaccttccgaaacagccttctgaatacaaagaggattcagtttccatcttctcaactttttaacacagaaatacttcctgcgagcatatcgacaactctcgggccaggcgctgtggctcacacctataatcccagcactttaggaggccgaggcaggcggattgcctgagctcaggagttcaagatcagtctgggcaacacgatgaaactccgtctctactaaaatacaaaaaattatccaggcatggtggcgtacgcctgtagtcccagctactcaggaggctgaggcaggagaattgcttgaacccaggaggaagaggttgcagtgagccaagatcatgccacatcactccaacctgggcaacagaacaagaacccatctcaaacaaacaaacaaacaaaaaaaaaaaactcttgtctccttaggatatgttacctgctccactgcagactagagaaataaatgtgtattgaaccttttactgcaaacttgaaaatgctagaaaaccaagcatgaagaataaatacatggtgggaaacacacaggcatgtgcatatgcatatacattgtaagttagtaagttagaaagctagctttgttgtatctgaacacatgaatcttttttggtcagtgtaggaagcacagccagatcctataggaatgaatacctcaaatctgttgtctgagattctagagattaaaccactgtgccattttt

SEQ ID NO: 3002 - protein, 240 aa, Homo sapiens; identical to SEQ ID NO: 151

SEQ ID NO: 3003 - DNA, 2136 bp, Homo sapiens
gcgcgggttccggggctgaggggctgaggggcccaaggcgataaccgggatccgctccggccgcgctcctcttgcctttgagaagccccggaagtggcccggctgttggccgcagcgggaggtcttcggaaagaaaaggccggaaccagaagatagactcaacagcgatgccctacccggaccccgccggcctcacaccccggccagccagccgccagtagtgcgcaccgcctcctccccaagccccgccctgcgtccaccccaggggttaactcgcacgcgcgctcttgtggcggaggtagagtgcgccgtccagggctagagcaagcgcggccccgcggcccggagccatgctgaggagctgcgccgcgcgcctccgcacgctgggggctctgtgcctgccgccagtaggccggcgcctgccgggaagcgagccgcgacccgagctgaggtcattttcttctgaggaagtcattcttaaggactgttctgtccccaaccccagctggaacaaggacctaagactgctctttgaccagtttatgaagaaatgtgaagacggctcctggaaacgtttgccttcatataaacgtacacctactgaatggattcaagacttcaaaacccattttcttgcctggttaatggccgggcgctgtggctcacgcctataatcccagcactttgggaggccaaggcaggcggatccctgagttcgggagttcaagaccagcctgaccaacacggagaaaccccgtctctactaaaaatacagaattagtcaggcgtggtggtgggcgcctgtaatcccagctactcaggaggctgaggcaggagaatcgcttgaacccgggaggcggaggttgcgacccaaagcttatgaaagaagaacaaatgtcacaggcccagctcttcaccagaagctttgatgatggcctgggctttgaatacgtgatgttctacaatgacattgagaaaaggatggtttgcttatttcaaggaggcccttacctggaaggaccacctggattcattcatggaggtgccattgcaaccatgattgatgctactgttggtatgtgtgcaatgatggctgggggaatcgtcatgactgccaatctcaacatcaattataaaagacctatccctctttgttctgttgttatgataaatagccaacttgataaagttgaaggaaggaaattttttgtttcctgtaatgttcagagtgttgatgagaagaccctatactcagaggcgacaagcttatttataaagctgaatcctgctaaaagtctgacataaagagctgctggtgaactccatctcattctcgcccctccagaagaagcagttgtcccccaaatactctgctccctcactgctgaatccctgtagggagaagcctgccaacagtgaccttccgaaacagccttctgaatacaaagaggattcagtttccatcttctcaactttttaacacagaaatacttcctgcgagcatatcgacaactctcgggccaggcgctgtggctcacacctataatcccagcactttaggaggccgaggcaggcggattgcctgagctcaggagttcaagatcagtctgggcaacacgatgaaactccgtctctactaaaatacaaaaaattatccaggcatggtggcgtacgcctgtagtcccagctactcaggaggctgaggcaggagaattgcttgaacccaggaggaagaggttgcagtgagccaagatcatgccacatcactccaacctgggcaacagaacaagaacccatctcaaacaaacaaacaaacaaaaaaaaaaaactcttgtctccttaggatatgttacctgctccactgcagactagagaaataaatgtgtattgaaccttttactgcaaacttgaaaatgctagaaaaccaagcatgaagaataaatacatggtgggaaacacacaggcatgtgcatatgcatatacattgtaagttagtaagttagaaagctagctttgttgtatctgaacacatgaatcttttttggtcagtgtaggaagcacagccagatcctataggaatgaatacctcaaatctgttgtctgagattctagagattaaaccactgtgccattttt

SEQ ID NO: 3004 - protein, 141 aa, Homo sapiens; identical to SEQ ID NO: 2986

SEQ ID NO: 3005 - DNA, 1744 bp, Homo sapiens
gcgcgggttccggggctgaggggctgaggggcccaaggcgataaccgggatccgctccggccgcgctcctcttgcctttgagaagccccggaagtggcccggctgttggccgcagcgggaggtcttcggaaagaaaaggccggaaccagaagatagactcaacagcgatgccctacccggaccccgccggcctcacaccccggccagccagccgccagtagtgcgcaccgcctcctccccaagccccgccctgcgtccaccccaggggttaactcgcacgcgcgctcttgtggcggaggtagagtgcgccgtccagggctagagcaagcgcggccccgcggcccggagccatgctgaggagctgcgccgcgcgcctccgcacgctgggggctctgtgcctgccgccagtaggccggcgcctgccgggaagcgagccgcgacccgagctgaggtcattttcttctgaggaagtcattcttaaggactgttctgtccccaaccccagctggaacaaggacctaagactgctctttgaccagtttatgaagaaatgtgaagacggctcctggaaacgtttgccttcatataaacgtacacctactgaatggattcaagacttcaaaacccattttcttgattcattcatggaggtgccattgcaaccatgattgatgctactgttggtatgtgtgcaatgatggctgggggaatcgtcatgactgccaatctcaacatcaattataaaagacctatccctctttgttctgttgttatgataaatagccaacttgataaagttgaaggaaggaaattttttgtttcctgtaatgttcagagtgttgatgagaagaccctatactcagaggcgacaagcttatttataaagctgaatcctgctaaaagtctgacataaagagctgctggtgaactccatctcattctcgcccctccagaagaagcagttgtcccccaaatactctgctccctcactgctgaatccctgtagggagaagcctgccaacagtgaccttccgaaacagccttctgaatacaaagaggattcagtttccatcttctcaactttttaacacagaaatacttcctgcgagcatatcgacaactctcgggccaggcgctgtggctcacacctataatcccagcactttaggaggccgaggcaggcggattgcctgagctcaggagttcaagatcagtctgggcaacacgatgaaactccgtctctactaaaatacaaaaaattatccaggcatggtggcgtacgcctgtagtcccagctactcaggaggctgaggcaggagaattgcttgaacccaggaggaagaggttgcagtgagccaagatcatgccacatcactccaacctgggcaacagaacaagaacccatctcaaacaaacaaacaaacaaaaaaaaaaaactcttgtctccttaggatatgttacctgctccactgcagactagagaaataaatgtgtattgaaccttttactgcaaacttgaaaatgctagaaaaccaagcatgaagaataaatacatggtgggaaacacacaggcatgtgcatatgcatatacattgtaagttagtaagttagaaagctagctttgttgtatctgaacacatgaatcttttttggtcagtgtaggaagcacagccagatcctataggaatgaatacctcaaatctgttgtctgagattctagagattaaaccactgtgccattttt

SEQ ID NO: 3006 - protein, 105 aa, Homo sapiens; identical to SEQ ID NO: 2990

SEQ ID NO: 3007 - DNA, 970 bp, Homo sapiens
cctacccggaccccgccggcctcacaccccggccagccagccgccagtagtgcgcaccgcctcctccccaagccccgccctgcgtccaccccaggggttaactcgcacgcgcgctcttgtggcggaggtagagtgcgccgtccagggctagagcaagcgcggccccgcggcccggagccatgctgaggagctgcgccgcgcgcctccgcacgctgggggctctgtgcctgccgccagtaggccggcgcctgccgggaagcgagccgcgacccgagctgaggtcattttcttctgaggaagtcattcttaaggactgttctgtccccaaccccagctggaacaaggacctaagactgctctttgaccagtttatgaagaaatgtgaagacggctcctggaaacgtttgccttcatataaacgtacacctactgaatggattcaagacttcaaaacccattttcttggtagaaacagccactttcccattaatatatctgagcatcaaatataaagctaagaacagattgaagtactagttactacctgaaaaaaagaaagaatataatgcaggattatggttctatagtcaccaattttatagaccagaaatcacaataaattttgcagattggagagcataaagcctattgtcaagaataagactgctcccaccctggcattcttatcaccattagcaagagtgaagaaagggccccagagagcttccaccctcctacaacctcatcacctctccgtcttgaggctgtcatctaatctcatttcaccctttatcccatatctggttatatcaccctaagaagcttagaacactcaggttatacccacatctcccagtatctaaatccccagggcaacccacccaacacccaaaacacacacatagcaattcctatccttctgtgtttttttactaatatacttttttagcattataattttatagaaaaa

SEQ ID NO: 3008 - protein, 110 aa, Homo sapiens
MLRSCAARLRTLGALCLPPVGRRLPGSEPRPELRSFSSEEVILKDCSVPNPSWNKDLRLLFDQFMKKCEDGSWKRLPSYKRTPTEWIQDFKTHFLGRNSHFPINISEHQI

SEQ ID NO: 3009 - DNA, 1210 bp, Homo sapiens
ccggtggggcgggaagcccggcttctggggaggtgccgcccctccactggcgcaggccgccgagacccccagacggacctcctagggctaatctgatagtgcctctgaggtcgataggactccacgtgccactccctgcagggtcatccagcaagtaattcctagacccgtaggtggccgcagagccggttacctctggttctgcgccagcgtgccccacccgcaggacggccgggttctttgatttgtacactttctaaaaccaaacccgagaggaagggcaggctcagggtggggatgccctgaaatattcgagagcaggaccgtttctactgaagagaagtttacaagaacgctctgtctggggcgggcgaggcctctgcgaggcgggtccgggagcgagggcagggcgtgggccgcgcgcccggggtcgggggagtcgggggcaggaagagggggaggagacagggctgggggagcgccctgccgagcgcccgccaggctcctcccgctcccgcgccgcctccctctacccacccgccgcacgtactaaggaaggcgcacagcccgccgcgctcgcctctccgccccgcgtccagctcgcccagctcgcccagcgtccgccgcgcctcggccaaggcttcaacggaccacaccaaaatgccatctcaaatggaacacgccatggaaaccatgatgtttacatttcacaaattcgctggggataaaggctacttaacaaaggaggacctgagagtactcatggaaaaggagttccctggatttttggaaaatcaaaaagaccctctggctgtggacaaaataatgaaggacctggaccagtgtagagatggcaaagtgggcttccagagcttcttttccctaattgcgggcctcaccattgcatgcaatgactattttgtagtacacatgaagcagaagggaaagaagtaggcagaaatgagcagttcgctcctccctgataagagttgtcccaaagggtcgcttaaggaatctgccccacagcttcccccatagaaggatttcatgagcagatcaggacacttagcaaatgtaaaaataaaatctaactctcatttgacaagcagagaaagaaaagttaaataccagataagcttttgatttttgtattgtttgcatccccttgccctcaataaataaagttcttttttagttccaaatttgagac

SEQ ID NO: 3010 - protein, 97 aa, Homo sapiens; identical to SEQ ID NO: 154

SEQ ID NO: 3011 - DNA, 626 bp, Homo sapiens
gtgagtcacacctggtctggctgccagtctgcaggagaggtttctcgactgaactgccggcttcaacggaccacaccaaaatgccatctcaaatggaacacgccatggaaaccatgatgtttacatttcacaaattcgctggggataaaggctacttaacaaaggaggacctgagagtactcatggaaaaggagttccctggatttttggaaaatcaaaaagaccctctggctgtggacaaaataatgaaggacctggaccagtgtagagatggcaaagtgggcttccagagcttcttttccctaattgcgggcctcaccattgcatgcaatgactattttgtagtacacatgaagcagaagggaaagaagtaggcagaaatgagcagttcgctcctccctgataagagttgtcccaaagggtcgcttaaggaatctgccccacagcttcccccatagaaggatttcatgagcagatcaggacacttagcaaatgtaaaaataaaatctaactctcatttgacaagcagagaaagaaaagttaaataccagataagcttttgatttttgtattgtttgcatccccttgccctcaataaataaagttcttttttagttccaaatttg

SEQ ID NO: 3012 - protein, 97 aa, Homo sapiens; identical to SEQ ID NO: 154

SEQ ID NO: 3013 - DNA, 1313 bp, Homo sapiens
ccggtggggcgggaagcccggcttctggggaggtgccgcccctccactggcgcaggccgccgagacccccagacggacctcctagggctaatctgatagtgcctctgaggtcgataggactccacgtgccactccctgcagggtcatccagcaagtaattcctagacccgtaggtggccgcagagccggttacctctggttctgcgccagcgtgccccacccgcaggacggccgggttctttgatttgtacactttctaaaaccaaacccgagaggaagggcaggctcagggtggggatgccctgaaatattcgagagcaggaccgtttctactgaagagaagtttacaagaacgctctgtctggggcgggcgaggcctctgcgaggcgggtccgggagcgagggcagggcgtgggccgcgcgcccggggtcgggggagtcgggggcaggaagagggggaggagacagggctgggggagcgccctgccgagcgcccgccaggctcctcccgctcccgcgccgcctccctctacccacccgccgcacgtactaaggaaggcgcacagcccgccgcgctcgcctctccgccccgcgtccagctcgcccagctcgcccagcgtccgccgcgcctcggccaaggcttcaacggaccacaccaaaatgccatctcaaatggaacacgccatggaaaccatgatgtttacatttcacaaattcgctggggataaaggctacttaacaaaggaggacctgagagtactcatggaaaaggagttccctggatttttggaagccatatttctctctctggttgatggcatggaccctacaggaaaaaccacaccttaccgcttctgaccagcatcactacaaaaaggagtgctgaagccaatcaccataatcaaaaagaccctctggctgtggacaaaataatgaaggacctggaccagtgtagagatggcaaagtgggcttccagagcttcttttccctaattgcgggcctcaccattgcatgcaatgactattttgtagtacacatgaagcagaagggaaagaagtaggcagaaatgagcagttcgctcctccctgataagagttgtcccaaagggtcgcttaaggaatctgccccacagcttcccccatagaaggatttcatgagcagatcaggacacttagcaaatgtaaaaataaaatctaactctcatttgacaagcagagaaagaaaagttaaataccagataagcttttgatttttgtattgtttgcatccccttgccctcaataaataaagttcttttttagttccaaatttg

SEQ ID NO: 3014 - protein, 65 aa, Homo sapiens
MPSQMEHAMETMMFTFHKFAGDKGYLTKEDLRVLMEKEFPGFLEAIFLSLVDGMDPTGKTTPYRF

SEQ ID NO: 3015 - DNA, 966 bp, Homo sapiens
ccggtggggcgggaagcccggcttctggggaggtgccgcccctccactggcgcaggccgccgagacccccagacggacctcctagggctaatctgatagtgcctctgaggtcgataggactccacgtgccactccctgcagggtcatccagcaagtaattcctagacccgtaggtggccgcagagccggttacctctggttctgcgccagcgtgccccacccgcaggacggccgggttctttgatttgtacactttctaaaaccaaacccgagaggaagggcaggctcagggtggggatgccctgaaatattcgagagcaggaccgtttctactgaagagaagtttacaagaacgctctgtctggggcgggcgaggcctctgcgaggcgggtccgggagcgagggcagggcgtgggccgcgcgcccggggtcgggggagtcgggggcaggaagagggggaggagacagggctgggggagcgccctgccgagcgcccgccaggctcctcccgctcccgcgccgcctccctctacccacccgccgcacgtactaaggaaggcgcacagcccgccgcgctcgcctctccgccccgcgtccagctcgcccagctcgcccagcgtccgccgcgcctcggccaaggcttcaacggaccacaccaaaatgccatctcaaatggaacacgccatggaaaccatgatgtttacatttcacaaattcgctggggataaaggctacttaacaaaggaggacctgagagtactcatggaaaaggagttccctggatttttggaagttctcgagaggtggctgttgaattcaactgaaggtgcaacattgcatgacaaaatagtagactgaaatgcaagcccttctttccctaccacaattgtagtcacctgaaaagattgtttctgtgcttggtgttgaataatgcattaacctgtaaagggtgagaggagatacggt

SEQ ID NO: 3016 - protein, 65 aa, Homo sapiens
MPSQMEHAMETMMFTFHKFAGDKGYLTKEDLRVLMEKEFPGFLEVLERWLLNSTEGATLHDKIVD

SEQ ID NO: 3017 - DNA, 850 bp, Homo sapiens
ccgccgcgctcgcctctccgccccgcgtccagctcgcccagctcgcccagcgtccgccgcgcctcggccaaggcttcaacggaccacaccaaaatgccatctcaaatggaacacgccatggaaaccatgatgtttacatttcacaaattcgctggggataaaggctacttaacaaaggaggacctgagagtactcatggaaaaggagttccctggatttttggaagtaagtgttgaaaagcttacaaagaaccagacataaaagtcaatgcttctaggccttggttccttttccttcttgtttccatcccttccctgtggaggtcaccactagtgaataaatgaatgtagtcacctgaaggaatgaatgaatgacctcattcattcatttattaaatagtattgagtacctgctatttgtaagatactgttgaggaaacaaagtaatgaagacacagccccaaccttcaaggagcttacagtctgcaggtgaaataagactgcatacaaataaccacaatatgagctgtttgttggaaaattccatcgggttatctgtgtctgttgtgacgatgttggggacagagttgggagaaagaaagcttttcacaaaagagtagtcaaccagaaaatggctaccttcaggtccaaaaacctggtggtggagatgccacatcctggtcacattccattttgagcaactcgaatctcccttcttaaatctcttcagataaagggattgttttttctttttctaatactacaaaggagcagtgtcagtcatctactgaataaaagccacatatcactccagaaataactgcttttcacataataatgctctgacagca

SEQ ID NO: 3018 - protein, 57 aa, Homo sapiens [sequence omitted]

SEQ ID NO: 3019 - DNA, 4043 bp, Homo sapiens
cacctgacaggactccaaggctctaaggatggaagagtcataattggaaagagcctgggtacctgaatcactgtatggaggaaaatcacttgctgagcaggaacatcctcattggactagctataaatttggttggtaacattgaagagacacttctcacctgcctgaaatgcccttcattatcttttcaggttgcaagggctctggaacagcccttgcagtactcacataaaggagcctgagctgagtccacaccctggaagcccagaactgagggaacagatggaagaaagaaagtcagcaggtttaggggatgagaataaccacaaaggacaagccattgctgctccttaaaagaaaaggaatcatactgctaagaattcagacttcagcagacatggggagcattgggaggagcccgaatcactgatggaattgaacagtgcgtggagacggttcagcaggacaaggtgctcaaaattcatccctgtgtgacctcaagtaagccacataactttgtgatcctgcagtttcatcatatttaacaggaaaaaacttgacagattttcattctgccacagaatgtcaggtctcccagacaccagaaaatacattgacttaaaaagcctttgatacatctcaaagcagtatccctacgcagtatagttggaagatggtgggcgctgtagagagggatgctttcaaatgggattgatccagtcctccttccttcacttccacatgaatgctgggcagcccagggtcacacccactgcaccctcaactcgggcaagtccaacagccaaactgaggagacctgggctacagaacagtctctcaagttccaggctcacaaaacctaggtgggaatgaatgccgagaaagtgaggaggtggttcaggggatctctctcccctactcattcctctcacgtcaaactcaccttctactgcacagcaacactgaggatcaccaaataccaactactaacaccaagaccatgaccttgatgttgccatgttctgttagtggaaagcaaccacacatcagttgtgttagtccaactcagaaaaatacttatcaagcaatattccataagaactgctcatggccctgttcttttcaatatatgggaaaactaaaggaaaacaacaaaatagtatcaggtttgcaagacttcccaagatcgatggtcacacgtgttttcaggagctccctatgtaaatgattttgatcacttgataccttgaaaagagctcttatgggcccagaatgacatccataagtgacaagtatgaaatgtagtgttcagtcacattaaaaaacaaatcatcccacatagaggaagagctttggatgtaggaatgtcaaactggtcttaaatgtaatgaaaagccaagatggtgccccagtaagaaaaaagaaatcaacataacaatgggatgccccaagaagaatactgagacaggaaagaaaacatttttaaaaaattaattattcattcactttctggtggatacagaaaaaactgcagaagacccacaggatatcatggcagtctaaaagtttgatatcttacaccgtggaaaagccttaaattctattttaacgtgagagaaggtggagtgactgacttcatgactaccatttagaaaatataacctgttgggaaactatttctgccttgatgattttgtacacacaagaaatgaacaatgaggaagatgcttagatgtattgggaaagagatgggtctgtggcattgtcacaagggtacaagggtacacatatactgagagtgaatgctgaagggaaggcccccatcggtggtgacctctcgtgtgaccagggcgcctgtgtttcagcaaagcctgggcaattggaacgcagggctcctaagattccatgacacccccaccttctaattctgttattgcaactgcagaccgttacctggcatgctggctgccacctccctcactcttgtcagagtctgagctacaggcagtgccttcagctctgagctcaggcgtctcaaaccttgtttttgcgattaaggactctcaagtgctgtggggagtgatcacgtttttctcaacatccctggctccacctcttctgccacaaacatcagcatggtggtgtctgccagcccttcatccagtgtgagaagacagagatgaacactggagaaatcaacaagaaattgcgcccccagccggcagagaacaaacagcagttcagaaacataaagagaaatttcttgtaactcaagtggcctaattcctggccaaccagcagaagaaataccagtatgaagaattcaaagacctcataaaatctatgctgagggatgagctgcaattcaaggacgagaagcttgcagagcagcttgggcaagctgaggagctcaggcaatataaagtcctagttcactctcaggcacgagagctggcctggttaaggaagagattacaggaagggagagatgcctcccgctcattgaatcagcatctccaggccctcctcactccggatgagcctgacaactcccaggggcaggatatctgagagcagctggctgagggctgcaggctgacagagaacctcatccacaaactcagcccaggtggtctttggaacaggaggcagcatctctccagttttaaaggacaagaaggaggctgtgacaggagggcgcttgttagagtgaaaagagctctggactaagcatggaggttcccaggctctatcttcagcaacgtccttcgtaactgtcgaaaatgatgaagatgtggatgacgatgtttacgttgaggaggctgagaaagtgcgggaatcacgtgcccccagatatataagaagaatcttcatgtgtgcagagctatctaagcatggaggctgtagtggttaacaagacagatgaagtctctgttcagatgctgctcgaccagctcaacttaggtgaataaacaatatttatagagcaagtggaggaagatgatccaacatagaagaaagaagagagatgatcagggaagcaggaggaggcttctctggtgtcatcaaagctcatgaagagagacttccaagatacagggagtggtcaacaaggtgaaagacttcagcgaggcagagtatggtggaggctgagatgtgtccacctgattggcaatcatatccttggatacctttgccagagcagttttagtgtggtggtaggaagaaacacagatggcagtggactgaggaagagagatgaagagtagagatggggttatggattactcatttgatcaaattgaatatgaagaaaaggagaaagtggcagccagaggggatctaggattaagggtatatttaaaaatatacagttttacaagctgtggagaaggagttatcagaatgagaagtcaaagattccaggttgaaagaatgtgaacaatgaaacaagaccccagaggagccgtgggtgactggaattacttcagagaggtggagaaggagaagagtgggagggaggctgtagatagcttgtaggtttgggctgtacagggttatcctttcccatggcctttttgatgctatgaggcaggaagtaaggcatctgtgagcataggcattgggtagggggcacagagggcataggcattgggtaggggacttgaggaggtcctgtggtctcagaggaaatggaaagaggagctgaaccagaatggctgagtggtgtgaaagtttagggacctatcattttgtggtgacttcaatccacatggttgtgtgattgtgtggctgtatggcttcttccaggtgtgcttcgaagtttagtcatcagatccaagagaacgggctgtggaatgaatttagggttaggtgtgtgtgtatgggtgtaaacaaaggataaaggggtgaaggagttgagggcatgggtgagaaaggaattcacttgattggcactgcatgctggacaaagaaggaaggagcaaggacacagaaggtggatggtgggaaggctccacaaaatcaaggagcaaggtaagtgg

SEQ ID NO: 3020 - protein, 87 aa, Homo sapiens
MTPPPSNSVIATADRYLACWLPPPSLLSESELQAVPSALSSGVSNLVFAIKDSQVLWGVITFFSTSLAPPLLPQTSAWWCLPALHPV

SEQ ID NO: 3021 - DNA, 400 bp, Homo sapiens
ttaataagtcttctaaatttgtccttgccattgtgataaataactttatcttgacaattaattatattatggcaaattaattataacttgccataatgataaataactttatcctgagtagagcagcgacacaagccctttaggacacatgcctgaggcaatgacagtctaactttgaaacagtggaagacctagtttcaaattcaagtttgctttgagtagaaattaactttacctctttttgcatggcaatggggccaatcttccttaagctgctccttaaaagaaaaggaatcatactgctaagaattcagacttcagcagacatggggagcattgggaggagcccgaatcactgatggaattgaacagtgcgtggagacggttcagcaggacaagg

SEQ ID NO: 3022 - protein, 37 aa, Homo sapiens
MAMGPIFLKLLLKRKGIILLRIQTSADMGSIGRSPNH

SEQ ID NO: 3023 - DNA, 1492 bp, Homo sapiens
ggcgcctgtgtttcagcaaagcctgggcaattggaacgcagggctcctaagattccatgacacccccaccttctaattctgttattgcaactgcagaccgttacctggcatgctggctgccacctccctcactcttgtcagagtctgagctacaggcagtgccttcagctctgagctcaggcgtctcaaaccttgtttttgcgattaaggactctcaagtgctgtggggagtgatcacgtttttctcaacatccctggctccacctcttctgccacaaacatcagcatggtggtgtctgccagcccttcatccagtgtgagaagacagagatgaacactggagaaatcaacaagaaattgcgcccccagccggcagagaacaaacagcagttcagaaacataaagagaaatttcttgtaactcaagtggcctaattcctggccaaccagcagaagaaataccagtatgaagaattcaaagacctcataaaatctatgctgagggatgagctgcaattcaaggacgagaagcttgcagagcagcttgggcaagctgaggagctcaggcaatataaagtcctagttcactctcaggcacgagagctggcctggttaaggaagagattacaggaagggagagatgcctcccgctcattgaatcagcatctccaggccctcctcactccggatgagcctgacaactcccaggggcaggatatctgagagcagctggctgagggctgcaggctgacagagaacctcatccacaaactcagcccaggtggtctttggaacaggaggcagcatctctccagttttaaaggacaagaaggaggctgtgacaggagggcgcttgttagagtgaaaagagctctggactaagcatggaggttcccaggctctatcttcagcaacgtccttcgtaactgtcgaaaatgatgaagatgtggatgacgatgtttacgttgaggaggctgagaaagtgcgggaatcacgtgcccccaggagtagccatgcggtagaagaataccaatctcagctttctgcagtgtgctggatattctgtttgctcctccagctccacttttggtgcttctctgcccagctcagacttccagtagggtggaccaacaggaggcacttgcaggcgatcagaagaggtaattctccaaagtgaaagaaagagacacaattatcaaattactaaaatggaacggcataatttgtagagctccagggcactttggagatgggtcctgaggacgcccagaaaccggaaagctctgcccagggtggcgcagtggctgaaggagaggagaaccggcgctctccacacctcatggcactcttggagtcttacttggtggggatggcgatagcaaggagcaaacattatgataaacggatactgtgaaataatttttaaaaatgcatgctaagcgctcaacatttgaggaaagaaaaaaatacgatgaaaaagacgtagcaatttt

SEQ ID NO: 3024 - protein, 87 aa, Homo sapiens; identical to SEQ ID NO: 3020

SEQ ID NO: 3025 - DNA, 595 bp, Homo sapiens
gggcaaggctgggccgggaagggcgtgggttgaggagaggctccagacccgcacgccgcgcgcacagagctctcagcgccgctcccagccacagcctcccgcgcctcgctcagctccaacatggcaaaaatctccagccctacagagactgagcggtgcatcgagtccctgattgctgtcttccagaagtatgctggaaaggatggttataactacactctctccaagacagagttcctaagcttcatgaatacagaactagctgccttcacaaagaaccagaaggaccctggtgtccttgaccgcatgatgaagaaactggacaccaacagtgatggtcagctagatttctcagaatttcttaatctgattggtggcctagctatggcttgccatgactccttcctcaaggctgtcccttcccagaagcggacctgaggaccccttggccctggccttcaaacccaccccctttccttccagcctttctgtcatcatctccacagcccacccatcccctgagcacactaaccacctcatgcaggccccacctgccaatagtaataaagcaatgtcacttttttaaaacatgaac

SEQ ID NO: 3026 - protein, 105 aa, Homo sapiens; identical to SEQ ID NO: 156

SEQ ID NO: 3027 - DNA, 558 bp, Homo sapiens
cacacccaccaaaacacaaggagaggccctgaaaagtaactggaaagtcacagaccgttctggcaagtggagttgatgagaaacaggcaaaaatctccagccctacagagactgagcggtgcatcgagtccctgattgctgtcttccagaagtatgctggaaaggatggttataactacactctctccaagacagagttcctaagcttcatgaatacagaactagctgccttcacaaagaaccagaaggaccctggtgtccttgaccgcatgatgaagaaactggacaccaacagtgatggtcagctagatttctcagaatttcttaatctgattggtggcctagctatggcttgccatgactccttcctcaaggctgtcccttcccagaagcggacctgaggaccccttggccctggccttcaaacccaccccctttccttccagcctttctgtcatcatctccacagcccacccatcccctgagcacactaaccacctcatgcaggccccacctgccaatagtaataaagcaatgtcacttttttaaaacatgaac

SEQ ID NO: 3028 - protein, 63 aa, Homo sapiens [sequence omitted]

SEQ ID NO: 3029 - DNA, 1353 bp, Homo sapiens
agagctctcagcgccgctcccagccacagcctcccgcgcctcgctcagctccaacatggcaaaaatctccagccctacagagactgagcggtgcatcgagtccctgattgctgtcttccagaagtatgctggaaaggatggttataactacactctctccaagacagagttcctaagcttcatgaatacagaactagctgccttcacaaaggtactggtccctgtctcccccacttccccaaactacccacaacatgaaacaagaccctggcagaatggccaggaatgaaggagcagcaactgacaccccacactcttgcttcattttaactcactctaagccaggagtttttccatttaggaagagagatatatgaaatggtatatgacgtaatggaattattttcaaatttcattattctaccccagaggttctatggcagccctgtccagtagaactttctgcagtggtggaaatacattctatatctgctctatccaacatggtagccaccagccacatgtgtctgctgagtgcttgaaatgtggctagtgtgactaacagactgactttctaaattagttaatgtaaatgtaaatgtaaatagccatttgtaaccagtggctctaagtctgtatctgtgttggcagcttgggcaagtggaggatgagactgattaggcagggcctgtggcctttttccacctgaacccgctgtacttttatatagtttatctattggagttgcatgcaacacttgaaagaagtgttccactggctttacaaaactgaatagcccctaatatcatagaaagagccctggactaggagtgggaaaacctttggttcaaggcccaggtctgccccttaggcaggtcacttcacctcttttagtctgtttctgcatctggcaaatgggaatattaataatccctatcctgtaccttatactcctgtgagaataaaatgtggcagcatatttgaaagcacattagaagatgcgatataaaggtgtaattattattttctctgcagaaccagaaggaccctggtgtccttgaccgcatgatgaagaaactggacaccaacagtgatggtcagctagatttctcagaatttcttaatctgattggtggcctagctatggcttgccatgactccttcctcaaggctgtcccttcccagaagcggacctgaggaccccttggccctggccttcaaacccaccccctttccttccagcctttctgtcatcatctccacagcccacccatcccctgagcacactaaccacctcatgcaggccccacctgccaatagtaataaagcaatgtcacttttttaaaacatgaa

SEQ ID NO: 3030 - protein, 77 aa, Homo sapiens
MAKISSPTETERCIESLIAVFQKYAGKDGYNYTLSKTEFLSFMNTELAAFTKVLVPVSPTSPNYPQHETRPWQNGQE

SEQ ID NO: 3031 - DNA, 477 bp, Homo sapiens
cacagagctctcagcgccgctcccagccacagcctcccgcgcctcgctcagctccaacatgtcttccagaagtatgctggaaaggatggttataactacactctctccaagacagagttcctaagcttcatgaatacagaactagctgccttcacaaagaaccagaaggaccctggtgtccttgaccgcatgatgaagaaactggacaccaacagtgatggtcagctagatttctcagaatttcttaatctgattggtggcctagctatggcttgccatgactccttcctcaaggctgtcccttcccagaagcggacctgaggaccccttggccctggccttcaaacccaccccctttccttccagcctttctgtcatcatctccacagcccacccatcccctgagcacactaaccacctcatgcaggccccacctgccaatagtaataaagcaatgtcacttttttaaaacatgaa

SEQ ID NO: 3032 - protein, 63 aa, Homo sapiens [sequence omitted]

SEQ ID NO: 3033 - DNA, 3993 bp, Homo sapiens
atgcctcagctcctgagaaatgtcctctgtgtaattgagacattccacaaatatgccagtgaggacagtaacggggcaacactgactggcagagagctgaaacaactcatccagggcgagtttggggacttttttcagccctgtgtccttcatgctgtggaaaaaaattcaaatcttctgaatattgacagtaatggcatcatcagttttgatgaatttgttcttgcaatcttcaacttgttgaacctctgttatcttgacataaaatcattactaagttctgaactaagacaggtgactaaaccagagaaggagaagctagatgatgtggatgttcaggcaaccaccggagatggtcagtggacagtgggaacttcaccaactcaagaaaagaggatgcttccttcaggaatggcatcatcatctcagctcatccctgaagaaagtggagcagttggaaataacagagtggacccatggagagaagccaagactcacaactttccaggagaagcatctgaacacaatgatcctaagaacaaacacctggaaggagatgaacaaagtcaggaagtggctcaagatatacaaacaacagaagacaatgaaggccaacttaagacaaataagccaatggcaggatcaaaaaagaccagcagtcccacagagaggaagggacaagataaggagatctcccaggaaggagatgaaccagccagagagcaaagtgtttccaagataagagaccagtttggagaacaggaaggaaacttggcaacccaaagttcaccaccaaaagaagcaacacaaagaccatgtgaagatcaggaagttagaacagaaaaggaaaaacactctaatatacaagaaccacccctacaaagagaagatgagcccagttcacagcatgctgacctgccagaacaagctgctgccaggtcaccatctcagacacagaaatcaactgattccaaggatgtctgtagaatgtttgacactcaagaaccaggaaaggatgctgaccagacaccagctaaaacaaagaatttgggtgaacctgaggattatggcagaacatctgagacccaagaaaaagaatgtgaaacaaaggacctgccagtccaatatggtagcagaaatggttcagaaacatctgacatgagagatgaaaggaaagagaggagaggtcctgaggcccatggaacagcagggcagaaagaacgtgacagaaaaactcggccactagtcctggaaacccaaacacaggatgggaagtatcaggaactccaaggattatcaaaatcaaaagatgctgaaaaaggttctgagacacaatatctaagctcagaaggaggagatcagactcaccctgaacttgaaggaacagcagtctcaggagaagaggcagaacacaccaaagaaggcacagcagaagcatttgtgaacagcaaaaacgcacctgcagcagaaaggacactgggggcaagagaaagaacacaagatttagcaccacttgagaagcagtctgtaggagaaaatactagggtcaccaagactcatgaccaaccagttgaggaggaggatggttaccagggggaggaccctgagtcaccattcacacagagtgatgaggggtcttctgaaactcccaacagcctggcttcagaggaaggcaatagcagctcagagacaggtgaactgcctgtgcaaggggactcccagagtcaaggggaccaacatggagagtctgtgcaaggaggtcacaataataacccagatacccagaggcagggaacacctggtgagaaaaacagagctctggaggcagtggtaccagcagtcagaggagaggatgtacagctcacagaggaccaggaacagcctgccagaggagaacacaagaatcaaggcccagggaccaaaggcccaggtgcagctgtggagcccaatggacacccagaagcacaggaatccacagcaggagatgaaaatagaaagtccctggaaatagagatcacaggtgccctggatgaagacttcactgaccagctttccctaatgcagctccctggaaagggagatagcagaaatgaattaaaggtccaaggcccaagtagcaaagaagagaaaggaagagcaacagaggcccagaatactctgttagaaagtctagatgaggacaattcagcctccctcaagatacaacttgaaacaaaggaacctgtaacatcagaggaggaagatgaaagtccccaagagctggcaggagaaggtggtgaccaaaaaagtccagccaagaaagagcacaattcttcagtcccctggtcaagtcttgaaaagcagatgcagagagaccaagagccctgttctgtggagaggggtgcagtctattccagtccactataccagtacctacaggagaagatactgcagcaaacaaatgtaacccaagaggagcatcaaaagcaagttcagatagcccaggcatcaggcccagagctttgcagtgtatccctcaccagtgagatctcagattgttctgtctttttcaactacagccaagcatcacaaccatataccaggggacttccacttgatgagagtcctgctggtgcacaggaaacaccagctccccaggccttggaagataagcaagaggactggagcccagagcatgccatggtcaacttgtatgctgaagtgaagaactccttcaagaacacgggcaccccacagagggtcctgcctcctgtggtctggagccccccttcaaggaagaaacccatgctgtctgcttgcaactccatgatgtttggacacctcagccccgtgaggatccctcatctgagaggcaagtttaaccttcaacttccttcattagatgagcaggtgatcccagccaggctcccgaagatggaggtgagggcagaagagcccaaagaagcaacggaggtgaaagaccaggtagagacccaggggcaggaggacaataaaaggggcccctgtagcaatggggaagcagcctccacctctagtctcctggagactcagggaaacctcacttcctcctggtacaatcccaggcccttggagggaaatgtccacctcaagagcttgatagaaaagaaccagactgacaaggcccaggtgcatgcagtgagtttctactccaaggaccatgaagtcgccagttcacacagccctgctggaggcatcctttcttttgggaagcctgacccacttccaacagtgctccctgccccagttccgggctgctccctgtggccagagaaggcggccttgaaggtgctgggtaaagaccacctgcccagctctccaggcttgctgatggtgggggaggacatgcagcccaaggatcctgcagctcttggatcaagtaggtcttctccatccagagctgccagccacagttcccacaaaagaaaactgtcggagccaccgctgcagctgcaaccgacccctcccctgcaactgaagtgggatagagacgaggggcccccaccggctaagtttccatgtctatctcctgaggccctgttgacggaaaagctcagaaagaaaaacaccaaactgataatggtcattgcctctgagaaaagtaaaagggaatcaggagagacagtagtagtcaaagaagtcttagatgtcatcaagaaatggagagaagatccgaaatgcaaggacgacaagcaaaaggactcaaaggcaggcaaccagacaaagaaaaaacgtcagcagacagatcagagccgagagtcccaggatatttggagacataaagtgagagaccaaatcccaacacccagtgatgatgagagtcatggagttaaagctcataaccaagaatcacagcatattagaagacaccaagtgagagacttgagccctgaaccacaaaatattggaagacaccaggtgacaggccaagcccaaataccaagcaatgatgggggggccaagggagaaacctga

SEQ ID NO: 3034 - protein, 1330 aa, Homo sapiens
MPQLLRNVLCVIETFHKYASEDSNGATLTGRELKQLIQGEFGDFFQPCVLHAVEKNSNLLNIDSNGIISFDEFVLAIFNLLNLCYLDIKSLLSSELRQVTKPEKEKLDDVDVQATTGDGQWTVGTSPTQEKRMLPSGMASSSQLIPEESGAVGNNRVDPWREAKTHNFPGEASEHNDPKNKHLEGDEQSQEVAQDIQTTEDNEGQLKTNKPMAGSKKTSSPTERKGQDKEISQEGDEPAREQSVSKIRDQFGEQEGNLATQSSPPKEATQRPCEDQEVRTEKEKHSNIQEPPLQREDEPSSQHADLPEQAAARSPSQTQKSTDSKDVCRMFDTQEPGKDADQTPAKTKNLGEPEDYGRTSETQEKECETKDLPVQYGSRNGSETSDMRDERKERRGPEAHGTAGQKERDRKTRPLVLETQTQDGKYQELQGLSKSKDAEKGSETQYLSSEGGDQTHPELEGTAVSGEEAEHTKEGTAEAFVNSKNAPAAERTLGARERTQDLAPLEKQSVGENTRVTKTHDQPVEEEDGYQGEDPESPFTQSDEGSSETPNSLASEEGNSSSETGELPVQGDSQSQGDQHGESVQGGHNNNPDTQRQGTPGEKNRALEAVVPAVRGEDVQLTEDQEQPARGEHKNQGPGTKGPGAAVEPNGHPEAQESTAGDENRKSLEIEITGALDEDFTDQLSLMQLPGKGDSRNELKVQGPSSKEEKGRATEAQNTLLESLDEDNSASLKIQLETKEPVTSEEEDESPQELAGEGGDQKSPAKKEHNSSVPWSSLEKQMQRDQEPCSVERGAVYSSPLYQYLQEKILQQTNVTQEEHQKQVQIAQASGPELCSVSLTSEISDCSVFFNYSQASQPYTRGLPLDESPAGAQETPAPQALEDKQEDWSPEHAMVNLYAEVKNSFKNTGTPQRVLPPVVWSPPSRKKPMLSACNSMMFGHLSPVRIPHLRGKFNLQLPSLDEQVIPARLPKMEVRAEEPKEATEVKDQVETQGQEDNKRGPCSNGEAASTSSLLETQGNLTSSWYNPRPLEGNVHLKSLIEKNQTDKAQVHAVSFYSKDHEVASSHSPAGGILSFGKPDPLPTVLPAPVPGCSLWPEKAALKVLGKDHLPSSPGLLMVGEDMQPKDPAALGSSRSSPSRAASHSSHKRKLSEPPLQLQPTPPLQLKWDRDEGPPPAKFPCLSPEALLTEKLRKKNTKLIMVIASEKSKRESGETVVVKEVLDVIKKWREDPKCKDDKQKDSKAGNQTKKKRQQTDQSRESQDIWRHKVRDQIPTPSDDESHGVKAHNQESQHIRRHQVRDLSPEPQNIGRHQVTGQAQIPSNDGGAKGET

SEQ ID NO: 3035 - DNA, 6818 bp, Homo sapiens
ttacccagtacacttgcctgtggtgtcagcaagcactgtcgacttcttcctctggtgaagtgggtttacttgaacttgaaggaaagaaaaaaaaatgtctccacttctgagaagcatctgtgacatcactgaaattttcaatcagtatgtctctcatgattgtgatggagcagcattaactaagaaagacctgaagaacctccttgaaagggaatttggagctgtgcttcgggagaccacatgaccctaagacggtagatctgatcctggaacttctggatcttgacagtaatgggcgtgtcgatttcaacgaattcctcctatttattttcaaagtggctcaagcttgttactatgctctcggccaggccacgggactggatgaggagaagcgagcccggtgtgacggaaaggagagcctgttacaagatcgcaggcaagaagaagaccaaaggagattcgagccccgggacagacaactggaagaagaacctgggcaacgacgcaggcagaagaggcaggaacaggagagggagctagctgagggagaggagcaaagtgagaaacaagagcgacttgaacagcgcgacaggcagcgccgcgacgaggagctgtggcggcaaaggcaagaatggcaagaacgggaagagcgccgtgcagaggaagagcagctgcagagttgcaaaggtcacgaaactgaggagtttccagacgaagagcaactgcgaaggcgggagctgctggagctgaggaggaagggccgcgaggagaaacagcagcaaaggcgagagcggcaagacagagtgttccaggaggaagaagagaaagagtggaggaagcgcgagacagtgctccggaaggaagaagagaagttgcaggaagaggagccgcagcggcaaagagagctccaggaggaagaagagcagctacggaagctggagcggcaagagctgaggagggagcgccaggaggaagagcagcagcagcaaaggctgaggcgcgagcagcaactaaggcgcaagcaggaggaggagaggcgcgagcagcaggaggagaggcgcgagcagcaggagaggcgcgagcagcaggaggagaggcgcgagcagcagctgaggcgcgagcaggaggagaggcgcgagcagcagctgaggcgcgagcaggaggaggagaggcgcgagcagcagctgaggcgcgagcaggaggaggagaggcgcgagcagcagctgaggcgcgagcagcagctgaggcgcgagcagcagctgaggcgcgagcagcagctgaggcgcgagcagcagctgaggcgcgagcagcagctgaggcgcgagcagcagctgaggcgcgagcagcagctgaggcgcgagcagcagctgaggcgcgagcaggaggaggagaggcacgagcagaagcacgagcaggagaggcgcgagcagcggctgaagcgcgagcaggaggagaggcgcgattggctgaagcgcgaggaggagacggagaggcacgagcaggagaggcgcaagcagcagctgaagcgcgaccaggaggaggagaggcgcgaacgttggctgaagctcgaggaggaggagaggcgcgagcagcaggagaggcgcgagcagcaactaaggcgggagcaagaggagaggcgcgagcagcggctgaagcgccaggaggaggaagagaggctccagcagcggttgaggagcgagcaacaactaagacgcgagcaggaggagaggcgcgagcagctgctgaagcgcgaggaggagaagaggctcgagcaggagaggcgagagcagcggctgaagcgcgagcaggaggagaggcgcgatcagctgctgaagcgcgaggaggagaggcgccagcagcggctgaagcgcgagcaggaagagaggctcgagcagcgactgaagcgcgaggaggtggagagactcgagcaggaggagaggcgcgagcagcggctgaagcgcgaggagccggaggaagagaggcgccagcagctgctgaagagcgaggagcaggaggagaggcgccagcagcaactaaggcgcgagcagcaggaaaggcgcgagcagcggctgaagcgcgaggaggaggaagagaggctcgagcagcggctgaagcgcgagcatgaggaagagaggcgcgagcaggagctagctgaggaggagcaggaacaggcccgggagcggattaagagccgcatcccgaagtggcagtggcagctagaaagcgaggccgacgcacggcaaagcaaagtctactcgaggccccgcaagcaggaagggcagaggcgccgccaagagcaggaggaaaagaggcggcgccgggagagtgagctgcaatggcaggaggaggaacgggctcaccggcagcagcaggaagaggagcagcgccgggacttcacatggcagtggcaggcggaggaaaagagcgagaggggccgtcagaggctgtcggccaggcccccattgcgggagcagcgggagaggcagctgagggccgaggagcgccagcagcgggaacaacggtttctcccggaggaggaggagaaggagcagcggcgccgccagcgacgcgagagggagaaagagctgcagttcctggaggaagaggagcagctccagcggcgggagcgtgcccaacagctccaggaggaggaggacggcctccaggaggatcaggagaggaggcgaagccaggagcagcgccgcgaccaaaaatggaggtggcaactagaagaagaaaggaagagacgccgccacacgctgtacgccaagccagccctacaagagcagctgaggaaggaacagcagctgctgcaggaggaggaggaggagctacagagagaggagcgcgagaagagaaggcgccaagaacaggagagacaataccgcgaggaagagcagctgcagcaggaggaagagcagctgctgagagaggaacgggagaaaagaagacgccaggagcgggaaaggcaatatcggaaggataagaagctgcagcagaaggaagagcagctgctgggagaggaaccggagaagagaaggcgccaggagcgggagaaaaaataccgcgaggaagaggagttgcagcaggaggaagagcagctgctgagagaggaacgggagaagagaaggcgccaggagtgggagaggcagtaccgcaaaaaagacgagctgcagcaggaagaagagcagctgctgagagaggaacgggagaaaagaagactccaggagcgggagaggcaatatcgggaggaagaggagctgcagcaggaggaagagcagctgctgggagaggaacgggagacgagaaggcgccaggagctggagaggcaatatcggaaggaagaggagctgcagcaggaggaagagcagctgctgagagaggaaccggagaagagaaggcgccaggagcgggagaggcaatgtcgggaggaagaggagctgcagcaggaggaagagcagctgctgagagaggaacgggagaagagaaggcgccaggagctggagaggcaatatcgggaggaggaagagcttcagcgccagaaaaggaagcagcgataccgggatgaggatcagcgcagtgatctgaaatggcagtgggaaccagaaaaagaaaatgcagttcgtgataacaaggtttactgcaaaggcagagagaatgaacagttccggcagttggaagattcccagctgcgcgacagacaatcccagcaagatctgcagcacctgctgggtgaacagcaagagcgagatcgtgagcaagagaggaggcgctggcagcagcgcgacaggcatttcccagaggaagaacagctggagcgagaagagcaaaaggaagccaaaaggcgcgacaggaagtcccaagaggaaaagcagttgctgagagaggaaagagaagagaagagacgccgtcaagagacagacagaaaattccgcgaggaggaacagctgctccaggaaagggaggaacagccgctgcgccgccaagagcgtgacagaaaattccgcgaagaggaactgcgccatcaggaacaagggagaaaattcctcgaggaggaacagcggctgcgccgccaggaacgggagagaaaattccttaaggaggaacagcagctgcgctgccaggagcgcgagcaacagctgcgtcaggaccgcgacagaaaattccgcgaggaggaacagcagctgagccgccaagagcgtgacagaaaattccgtgaagaggaacagcaggtgcgccgccaggaacgagagagaaaattcctggaggaggaacagcagctgcgccaggagcgtcacagaaaattccgcgaagaggaacagctgctccaggaaagggaagaacagcagctgcaccgccaagagcgtgacagaaaattcctggaggaggaacaacagctgcgccgccaagagcgtgacagaaaattccgcgaacaggaactgcgcagtcaggaaccagagagaaaattcctcgaggaggaacagcagctgcaccgccagcaacggcagagaaaattcctccaggaggaacagcagctgcgccgccaggagcgcgggcaacagcggcgtcaggaccgtgacagaaaattccgcgaggaggaacagctgcgccaggagagggaggaacagcagctgagccgccaagagcgtgacagaaaattccgtttagaggaacagaaagtgcgccgccaggaacaagagagaaaattcatggaggacgaacagcagctgcgccgccaggagggccaacaacagctgcgccaggagcgcgacagaaaattccgcgaagacgaacagctgctccaggaaagggaagaacagcagctgcaccgccaagagcgtgacagaaaattcctcgaggaggaaccgcagctgcgccgccaggagcgcgaacaacagctgcgtcacgaccgcgacagaaaattccgtgaagaggaacagctgctccaggaaggggaggaacagcagctgcgccgccaagagcgtgacagaaaattccgcgaagaggaacagcagctccgccgtcaggaacgagagagaaaattcctccaggaggaacagcagctgcgccgccaggaactggagagaaaattccgtgaggaggaacagctgcgccaagaaacggagcaagagcagctgcgccgccaagaacgctacagaaaaatcctagaggaagagcagctccgtccggaaagggaagaacagcagctgcgccgccaggagcgcgacagaaaattccgcgaggaggaacagctccgccaggagagggaggaacagcagctgcgcagccaagagtctgacagaaaattccgcgaggaggaacagctacgccaggagagggaagaacagcagctgcgcccccaacagcgtgacggaaagtatcgctgggaagaagagcagctccaacttgaggaacaagagcagaggctgcggcaggagcgagaccggcagtaccgggcggaggagcagtttgccacgcaggagaagagtcgtcgtgaggaacaagaactatggcaagaagaggagcagaaacgtcgccaggaacgggaaaggaaattacgggaagaacacatccgccgccagcagaaggaggaacagaggcaccgccaagtcggggagataaaatcccaagaagggaagggccatgggcggcttctggagcccggcactcatcagtttgccagtgtcccagtgcgctccagccctctctatgagtacatccaagagcagagatctcaataccgcccttaagtgatgttgccaatatcttgacacctgccaaagcttcgagcacgggaaaatgagaaacactgggtaccaagtgataactcagatgtttctggttgtgggaaaactctctgatattagaatgtcttttcttccaaaatcttaaactacgctcattttacgcactttgtacttctgctttttattcttcctcaagtagttctttactgcaagatgtctttcttttgctctttgatgcagatgtggtgtgcatttaaaaaaaatataaatcatttaatttgtttaagaaattttgtttgaggaacatgttcatttattgctttcagaagtaacaagagtaataggatgatttgagattctaaacaatgggtcggtttgtttaatgactgacccatcttgtggaaagtgcagatacttttaatgttcaagttgctatttcttcttgaacctaaattgatcattgcctccaaacagcatttcatcttttgtggcatagttagcacaaattccaggtaactaaatttttataacccttgaatagtgcagggggagtgacctctgcataaaaacttcctgtaaaatcagcccattactggaagaaatatctgttaagaataggtttagctttgaagatttagaatttaaattagattttttttaaactcaactccacttaaacacataatctcatgaagaaataatgaggtgtttctcaacttcagagttcaaattttaaaactgtgtctgttgtagtctatagtgttcattctacttccccaagttttgatgagtttcagaatattatgaacctttgttaattttagcttgttagaaggaagctgctcagaatcccataaacatctgtcttactctagggccaataagagatcacatagagcatgttgggggtgtaaaagggaaaaatgtgtgaacataggggcaaatttctagaggccctttgacaagacccatttgcccacaatcatttgaggcctattgataataccttagatatattcttgttgaaataattggactgtgaaaaattaataataaatgtttggcaagtaa

SEQ ID NO: 3036 - protein, 49 aa, Homo sapiens
MSPLLRSICDITEIFNQYVSHDCDGAALTKKDLKNLLEREFGAVLRETT

SEQ ID NO: 3037 - DNA, 791 bp, Homo sapiens
agcaattccaagagtatcatctgagccagcctgaacttcctctgctactattattcaaataaggatttgaataagcagaatttgcttcagtgaggaaactgcctggggcatcagcctaggagaggtgtggaccatgagagtgggctgggggcggccctccctctcactcataggggagcaaaccaaacagctcaggctggaagtcctgcagggaattcagcaccggggtggcctttctcctcaagtctcagttcaaggttctgtctagaatgaagaccacttgcatcccagttgccagggttgcctccacctcattgagagcatcttcaaacaaggcacctctccataggaggacagggagagaacctgttggcacaagctgggaggatgttggggtctggcttgctgtgctgtacttcggggtcatctccctgcataatgtgagaaaacaggctgaagaactccttgtgtcagctcaccttcatctccaatgaggcagaccctgagctggtggccatggcaaagggaatgctgtgtttctgcaggtggacgatgagattctcagcccctggcatgagcacagctgtagggaacacttcctttaacttcgtttggctttcttccaccagttcctccttggacatcaggagctgcaagatgtctattataatctgtgctgcctctaatgcctacttacccattaccagggactttacaacccagctgtatttcttttcatagaaatcacatatttcttgaaacagcactgaatatagccattcagtatccag

SEQ ID NO: 3038 - protein, 74 aa, Homo sapiens
MAKGMLCFCRWTMRFSAPGMSTAVGNTSFNFVWLSSTSSSLDIRSCKMSIIICAASNAYLPITRDFTTQLYFFS

SEQ ID NO: 3039 - DNA, 3232 bp, Homo sapiens
atggctcaactcctgaatagcatactcagtgtgattgacgtattccacaaatatgccaaagggaatggggactgtgccttactatgcaaggaagagttgaaacaactgctcttggctgagtttggagacatcctccagagaccaaatgacccagagactgtggaaaccatcttgaacctcttagatcaagaccgagatggacatattgattttcatgagtacctcttgttggtgttccagttggtccaagcctgctatcataagctagacaataagtcacatggaggcaggacctcacagcaagaaagggggcaggaaggagcacaagactgtaagttcccaggaaacacaggcagacaacacagacagaggcacgaggaagaaaggcagaactcccaccacagtcagcctgagagacaagacggagattcccaccatggtcagcctgagagacaagacagagattcccaccatggtcagtctgagaaacaagacagagattcccaccacagtcagcctgagagacaagacagagattctcaccacaatcagtctgagagacaagacaaggatttcagctttgatcagtcagagagacaaagtcaagactccagctctggtaaaaaagtgagtcacaaatctaccagtggccaggctaaatggcagggacatatctttgccttaaatcggtgtgaaaaaccaattcaggattctcattatggtcagtctgaaagacatacacaacaatctgaaacacttggacaagcctctcactttaaccagacaaatcaacagaaatcaggctcttattgtggacagtctgagaggctaggtcaggaattaggctgtggtcagacagacagacaaggccagagttcccactacggtcagacggacagacaagaccagagttatcattatggtcagacagacagacaaggccagagttcccactacagtcagacggacagacaaggccagagttcccactacagtcagccagacagacaaggtcagagttcccactatggtcaaatggacagaaaaggccagtgttatcattatgatcagacaaacagacaaggccagggttcccactacagtcaaccaaacagacaaggtcagagttcccactatggtcagccagacacacaagatcagagttctcactatggtcagacagacagacaagaccaaagttctcactatggtcagacagagagacaaggccagagttcccactacagtcagatggaccgacaaggccagggttctcactacggtcagacagacagacaaggccagagttcccactatggtcagccagacagacaaggccagaattcccactatggtcagacagacagacaaggccagagttcccactatggtcagacagacagacaaggccagagttcccactacagtcagccagacaaacaaggccagagttcccactatggtaagatagacagacaagaccagagttatcattatggtcagccagacggacaaggccaaagttcccactatggtcagacagacagacaaggccagagtttccactatggtcagccagacagacaaggccagagttcccactacagtcagatggacagacaaggccagagttcccactatggtcagacagacagacaaggccagagttcccactacggtcagacagacagacaaggccagagctatcattatggtcagacagacagacaaggccagagttcccactatattcaatcacagactggggaaatacaagggcaaaataagtacttccaagggactgaaggaacaagaaaagcctcttatgttgaacaatcaggaagatcagggaggctaagtcaacagactccaggacaggaagggtaccaaaaccagggacagggattccagtctagggactcacagcagaacggccaccaggtatgggagcctgaagaggatagccaacatcaccaacacaaactcttagcacaaatccaacaagaaagaccactttgtcacaaagggagagactggcaatcatgcagtagtgagcagggccacagacaggcccagaccaggcagagtcatggtgaggggctgagccactgggcagaggaagagcagggccatcaaacttgggatagacacagccatgagagtcaggaaggtccatgtgggacacaggacaggcgaacccataaagatgagcagaaccatcagagacgagacagacaaacccatgaacatgagcagagccatcagagacgagacaggcaaacccatgaagacaagcagaaccgtcagagacgagacaggcaaacccatgaagacgagcagaaccatcagagatgagacaggcaaactcatgaagaggatcaaaaccatcagcaacaacataatagacaaaactatgaggagaaagagaggtatcaaggatctcagaatcaaaaatcccaagtgacccacagaagctgtcctaacagagaaaaattccacatgaaagaggatgaccagagccaaggctcacagaaaagacacactgaaccatccttctatccaacccagagcagtgggaggccccaaaccagagaacagcgtggtcaccctgccaagggagctactgttcccaaccccccctatgactatgtgcaagagcagaaatcctacccatactaggctatgtgagcaccagaggtaaagcaacacaaagccaaaaaagaaacctatatgtcgagttcacctttaattcgatttaagagattgagaatgtatttcttccctctatcctctgctgtatctccctgcaaggatgtttttgagtactagcattcacgtaagggcttttgctttggctcctgtggataaaacatcaggaatttcaagcctcatagtctagactagaatgaaactcagttcaaggctgctacaagagccgagaacatagagtgcatctctgatgtttactacatctcccatgccaggctcttattccacaccagagggactgtccattagtgcctatcactagagctgaatggacccattccaattcaatacctttctagtttctgattatataaaataaagagaaagtatatgtcatatgtttgcaaattccaggggatcaagactattgattcatagctcctaagacctgaaaactcttctcaagaaaatctatgtgcagattatgaattgtattaaaatatctaataaataattgatgagc

SEQ ID NO: 3040 - protein, 784 aa, Homo sapiens; identical to SEQ ID NO: 162

SEQ ID NO: 3041 - DNA, 1382 bp, Homo sapiens
gctggcactggacggagtagggaaccctagccgttatcccaccaaagggtcccagcgcctagaggggctgcggaaagctcctacaatacgaggagcccttggagcccagagcgggatcctgcgagccgaggccccgttctctgttaggatcacggggactgccccaggcagctgctgggcccggtcgcggacctcggccagaacatcctcccagaacacagaggaatctgacatcagtggcctcccttggtagaggtggggagccgaggggcggcagtgtggaagggccatcggcctaggtctttcgtatcccctccggcctctcggggctgtgcgttcggaaacagcgaaaggaacggcctcaggaatctggcctcagccggagcactggtgaacacaggctcccgtcgcgccaagggaagtaggaaaagctgcttccgggcggaggggctgcacttccggggcccgcgtcccccggcggcttcgccgagaaggggctttgggagcttaagggcgccggcacgcgttcccctggcgcagagctcgctagccggggcgcgggctgcctccttgttctggtgtgatccgaatgtaacggagcggactttgggatccagaaccccggactgaggttgtgcttggcttgaggggcgggctggatttttcctcttaggatttatttccctggagacctcatgaagaatgatgtgggttctatagggtacagtgtgatctgggtcctgcctaatctcctttctaaacttcagaaaatcatgtaccttggagttgtggaggcatgtttataagcagatctgagttttgccacactggaatttatttattcattgaacaaatatttaatacctactacaattcttagccgatatatcagcacaacttctctgctccaactagtctacattgcaaagcatctcctagtgtctttggaagaaggatctatggtgttatatgtgaacaaagatgtagactagtaaggtatcaagatttgatggggatatccagacaacttggagccaagtccccacagctggatcagacaacttttggtgacatctcacagtgtggattatcaagccagtgtatcagtctggagcctaggttttttgcctttagctttgctcaggatgacttctgctcttctatggcaatacttgagaagctacagctttgattagacgagaggctatttcaataactttctcctgataagaagaccaccgaccgtggacggattctggccagtttacaaaggctgcataccatagggcagggcaccccactatggcaaacactaataatgatattgctcctgattttgtttctgaagggaatgcctctaagatttcttcattaattataag

SEQ ID NO: 3042 - protein, 60 aa, Homo sapiens
MGISRQLGAKSPQLDQTTFGDISQCGLSSQCISLEPRFFAFSFAQDDFCSSMAILEKLQL

SEQ ID NO: 3043 - DNA, 397 bp, Homo sapiens
agctgcagttcctgatactggtttttctacatgcttcagccaaagacatatactctttgatccctgagaacactatttcctcagtgtctttgcacatggagttcacttctctgcttgtgaagtctatgaatattgcatggctgatttgtcacaattttaagtcttcaacatctggagtgttctggcaagaatttgtaggaaaaatttttgaatcatcagattaccatagcacaaccttggagaataaaactcttttgctctgaagctcatctaataacctgatatctctcaaatgaatctatccaatgacagggaataccccatgttaaacagctgattcttgttctgaatacgtttattatcttgtagttagtaaataaatcaattggacccttaa

SEQ ID NO: 3044 - protein, 55 aa, Homo sapiens
MEFTSLLVKSMNIAWLICHNFKSSTSGVFWQEFVGKIFESSDYHSTTLENKTLLL

SEQ ID NO: 3045 - DNA, 3118 bp, Homo sapiens
atgggtctggctcaggtcactcctctggctacggacaacacggctctagatcaggacagtcatctaggggtgaacgacacggatctagctcaggttcgtcttcccgctatggtcagcatgggtctggctcccgtcagtcttcgggccacggccgacaagggtctggatctggccattcccctagccgcggccgacatgggtccggttcggggcactcctccagccacggccaacatgggtctggctcaggtcgttcttccagccgtggcccatatgagtctcgctcgggtcactcttctgtctttggtcaacatgagtctggctcaggacattcctctgcttacagtcagcatggtagtggctcagggcacttctgtagccaaggacagcatggttctacatcaggacagtcatcaacctttgaccaggagggatctagcacaggtcagtcttccagccacggtcagcatggctctggctcaagtcagtcttctagctatggccaacagggctctggatctggccagtctcctagtcgcggccgacatgggtccggttccgggcactcttccagctacggccaacatgggtctggctccggttggtcttccagcagtggccgacatgggtctggctcagcatggatctggctcaggtcactcctccagctacgaacaacacggctctaggtcaggacagtcatctaggggtgaacgacacggatctagctcaggttcatcttccagctatggtcagcatgggtctggctcccgtcagtctttgggccacggccaacatgggtctggatctggccagtctcctagccctagccgtggccgacatgggtctggttctgggcagtcttccagctacagcccatatgggtctggctcagggtggtcttccagccgtggcccatatgagtctggctccggtcactcttctggcttaggtcaccgagagtctcgctcaggacagtcctctggctacggtcaacatggatctagctcaggtcattcctctacccatgggcaacatggttctacatcaggacagtcatcgagctgtggccaacatggagctagctcaggtcagtcttccagccacggtcagcatggctctggctcaagtcagtcttctggctatggccgacagggctctggatctggccagtctccaggccacggccagcgtgggtctgggtcaaggcagtctcccagctacggccgacatgggtctggctccggtcggtcttccagcagtggccaacatgggtctggcttaggcgagtcttctggctttggtcaccacgagtctagctcagggcagtcctctagttacagtcagcatgggtctggctcaggtcactcctctggctacggacaacacggctctagatcaggacagtcatctaggggtgaacgacacggatctagctcaggttcgtcttcccactatggtcagcatgggtctggctcccgtcagtcttcgggccacggccgacaagggtctggatctggccagtcccctagccgcggccgacatgggtccggtttggggcactcctccagccacggccaacatgggtctggctcaggtcgttcttccagccgtggcccatatgagtctcgcttgggtcactcttctgtctttggtcaacatgagtctggctcaggacattcctctgcttacagtcagcatggtagtggctcagggcacttctgtagccaaggacagcatggttctacatcaggacagtcatcaacctttgaccaggagggatctagcacaggccagtcttccagctatggccaccgtggctctggctccagtcagtcttctggctatggccgacatggggctggatctggccagtctcttagccacggccgacacgggtctggttcagggcagtcttccagctacggccaacatgggtctggctcaggacagtcctctggttatagtcagcatggaagtggctcagggcaagatgggtattcttattgcaaaggaggaagtaaccatgatgggggaagttctggctcatattttctcagttttcctagtagcacttcaccctatgaatatgtccaagagcagaggtgctacttttatcagtgaataataaacataaatgcaatttactcaagtagcaatttaagaaataggaaagtcatctatgaattcatcatgaaagacaagcaatccatcatgaaattcgttctaaaagtgaatcaatgcatttctgtctctttctttagagcctaaaactgtagcatatatcttgttatggggttccttccaaagactgttaggcatttgtgctactttgttagaaaatactgagtggaataacttgttagaatgagggttaaactttgaggaataatgaaaagcttttaaagagctttgggtttagttggagttgtctttttgagagctcatcattcatttatagatggtgccaaagctaaccttacatttcttagaagcaaaatattacaaatgcattaccagtcctagatacaaagctttgttttacagcaattagtgtaccctaatttttagtgtgccccaagtttggtgtgtcccaatttttggtattgtggcagaaggtgaaggctctgaaagcaaagatgcagcagcggtagtgtctttacttatcaaaaccatcaagtcctttttcttgggtatatatttaatcagtaagttaattagtggcataaaaaagtagcatcagggtcttttcccaagccagtgagcaagagcattatttcataaagaatagggatttatcatttcaggaaaaaaaaaaacattcaaatgtgggctttagcttgttttcagcagaaagatcttgctccctatttctaagaggctgctcaatattgggaaatatattgaggagttattccatggaaatacaatgctttccacctactactgtagttcaataacgtttccacctgaaaaaatatcatccatgcccagatgaaaaggaagagtatctgtcactgctacatagttccttaatttgactgtaacacatttgtttcaagtctttggattcaaacaaccggattgtattaaaattgacaataaataaatgttgatt

SEQ ID NO: 3046 - protein, 707 aa, Homo sapiens
MGLAQVTPLATDNTALDQDSHLGVNDTDLAQVRLPAMVSMGLAPVSLRATADKGLDLAIPLAAADMGPVRGTPPATANMGLAQVVLPAVAHMSLARVTLLSLVNMSLAQDIPLLTVSMVVAQGTSVAKDSMVLHQDSHQPLTRRDLAQVSLPATVSMALAQVSLLAMANRALDLASLLVAADMGPVPGTLPATANMGLAPVGLPAVADMGLAQHGSGSGHSSSYEQHGSRSGQSSRGERHGSSSGSSSSYGQHGSGSRQSLGHGQHGSGSGQSPSPSRGRHGSGSGQSSSYSPYGSGSGWSSSRGPYESGSGHSSGLGHRESRSGQSSGYGQHGSSSGHSSTHGQHGSTSGQSSSCGQHGASSGQSSSHGQHGSGSSQSSGYGRQGSGSGQSPGHGQRGSGSRQSPSYGRHGSGSGRSSSSGQHGSGLGESSGFGHHESSSGQSSSYSQHGSGSGHSSGYGQHGSRSGQSSRGERHGSSSGSSSHYGQHGSGSRQSSGHGRQGSGSGQSPSRGRHGSGLGHSSSHGQHGSGSGRSSSRGPYESRLGHSSVFGQHESGSGHSSAYSQHGSGSGHFCSQGQHGSTSGQSSTFDQEGSSTGQSSSYGHRGSGSSQSSGYGRHGAGSGQSLSHGRHGSGSGQSSSYGQHGSGSGQSSGYSQHGSGSGQDGYSYCKGGSNHDGGSSGSYFLSFPSSTSPYEYVQEQRCYFYQ

SEQ ID NO: 3047 - DNA, 1647 bp, Homo sapiens
agagtatgaggaagccagcactagtcaagtgactctaagaagggccattttcccttgttgtctttgaaaatacttcattttcttagcatttcaggagattataacatcctgtatttcagtttctgagagctttactgactgatttccctattcaaaacaatcctcatttcctacatttctgaagatctcaagatctggactactgttgaagaaattcccagtaaggctcacttatatctttagagatggcaaataactacaagaaaattgttctactgaaaggattagaggtcatcaatgattatcattttagaattgttaagtccttactgagtaacgatttaaaacttaatccaaaaatgaaagaagagtatgacaaaattcagattgctgacttgatggaggaaaagttcccaggtgatgccggtttgggcaaactaatagaattcttcaaagaaataccaacactgggagaccttgctgaaactcttaaaagagaaaagttaaaagttgcaaataaaattgaatccattccagtcaaaggaataatcccatctaaaaagacgaaacagaaagaagtgtatcctgctacacctgcatgcaccccaagcaaccgtctcacagctaaaggagcagaggagactcttggacctcagaaaagaaaaaaaccatctgaagaagagactggaaccaaaaggagtaagatgtccaaagagcagactcggccttcctgctctgcaggagccagcacgtccacagccatgggccgttccccacctccccagacctcatcatcagctccacccaacacttcctcaactgaggcatatttgatgaacttgacattatctctgactgcaggaagttttctgtcctgtgctgtttggggaagagacagagaactgcggaatctggaactttcagcaacagactcactgtctactgcccccatctattatacacccattccctttgctcactaatttgttcaagtttctctgacatacaccatgctcctttttcctttaggattttcacacaccatatttctttcacctttaaactcttacctggccaaccctatccaccctctggatcccaatattgagatcttatcctcagggaatcctcacttagacccctgtaacaggttaaatcttcatggtgttctgtttcctaggaacttctttcttttctactgtttatgacaactgaagttaataagtgtttatctttcccacctactcaaagtagttccaagattagggctagtttgtaattctgtggaccactgtaaacgagggcctagttcagtgtctgcctcatgggaagcttccaataaatacctttgctcaacgaaaaaatgaaaacccagtggctcacgcctgtaatcccagcactttgggaggccgaggcaggtggattgcctgaggtcaggagtttgagactagtctggccaacatggtgaaacactatctctactaaaaatacaaaaaaattagctgggtatggtggcttacgcctataatcccagctactcaggaggctgaggcaggggaattgcttgaaccagggaggtggaggttgcagtgagctgagatcgcaccactgcactccagcctgggtgacagagcgagactccatctc

SEQ ID NO: 3048 - protein, 245 aa, Homo sapiens
MANNYKKIVLLKGLEVINDYHFRIVKSLLSNDLKLNPKMKEEYDKIQIADLMEEKFPGDAGLGKLIEFFKEIPTLGDLAETLKREKLKVANKIESIPVKGIIPSKKTKQKEVYPATPACTPSNRLTAKGAEETLGPQKRKKPSEEETGTKRSKMSKEQTRPSCSAGASTSTAMGRSPPPQTSSSAPPNTSSTEAYLMNLTLSLTAGSFLSCAVWGRDRELRNLELSATDSLSTAPIYYTPIPFAH

SEQ ID NO: 3049 - DNA, 2077 bp, Homo sapiens
agagtatgaggaagccagcactagtcaagtgactctaagaagggccattttcccttgttgtctttgaaaatacttcattttcttagcatttcaggagattataacatcctgtatttcagtttctgagagctttactgactgatttccctattcaaaacaatcctcatttcctacatttctgaagatctcaagatctggactactgttgaagaaattcccagtaaggctcacttatatctttagagatggcaaataactacaagaaaattgttctactgaaaggattagaggtcatcaatgattatcattttagaattgttaagtccttactgagtaacgatttaaaacttaatccaaaaatgaaagaagagtatgacaaaattcagattgctgacttgatggaggaaaagttcccaggtgatgccggtttgggcaaactaatagaattcttcaaagaaataccaacactgggagaccttgctgaaactcttaaaagagaaaagttaaaagttgcaaataaaattgaatccattccagtcaaaggaataatcccatctaaaaagacgaaacagaaagaagtgtatcctgctacacctgcatgcaccccaagcaaccgtctcacagctaaaggagcagaggagactcttggacctcagaaaagaaaaaaaccatctgaagaagagactggaaccaaaaggagtaagatgtccaaagagcagactcggccttcctgctctgcaggagccagcacgtccacagccatgggccgttccccacctccccagacctcatcatcagctccacccaacacttcctcaactgagagcctaaaaccattggccaaccgtcacgcaactgccagtaaaaatattttccgagaagacccaataatcgcgatggtactaaatgcaacaaaagtatttaaatatgaatcctcagaaaatgagcaaagaagaatgtttcatgctacagtggctacgcagacacagttctttcatgtgaaggttttaaacatcaacttgaagaggaaattcattaaaaagagaatcatcattatatcaaattattccaaacgtaatagtctcctagaggtgaatgaagcctcttctgtatctgaagctggtcctgaccaaacgtttgaggttccaaaggacatcatcagaagagcaaagaaaattccgaagatcaatattcttcacaaacaaacttcaggatatattgtatatggattatttatgctacatacgaaaattgtaaataggaagacgacaatctatgaaattcaggataaaacaggaagtatggctgtagtaggaaaaggagaatgccacaatatcccctgtgaaaaaggagataagcttcgactcttctgctttcgactgagaaagagggaaaatatgtcaaaactgatgtcagaaatgcatagtttcatccagatacagaaaaatacaaaccagagaagccatgactccaggagcatggcactaccccaggaacagagtcagcatccaaaaccttcagaggccagcacaaccctacctgaaagccatctcaagactcctcagatgccaccaacaaccccatccagcagttccttcaccaagaaggatgaaacccacccaggagcacagtcatcgcctgcaaactttagaatcacctcaccaactgtggcccctcctctttcttctgacacttccaccaaccgccatccagcagttccttaaataaggtcaccaaggacaaggatatcaaataactactgttcaatctttactcaagtgtggaaattttgcctgaagtcctccacctaaaaacctgatgccattggtaatgatgtttatgaagataagatcaaagcacagaaaataatatatgtatatatatctggttgaaatactatatatatatatatatatatatatatatatatatatatatatatataccagctattaattctaggaaatggagtattaagggtgcattttatttcattagttttacttttatgcattttcttcatatcatattttgcattcagaattttcataatttgaaaaaaaataaactttttttt

SEQ ID NO: 3050 - protein, 492 aa, Homo sapiens; identical to SEQ ID NO: 166

SEQ ID NO: 3051 - DNA, 1957 bp, Homo sapiens
agagtatgaggaagccagcactagtcaagtgactctaagaagggccattttcccttgttgtctttgaaaatacttcattttcttagcatttcaggagattataacatcctgtatttcagtttctgagagctttactgactgatttccctattcaaaacaatcctcatttcctacatttctgaagatctcaagatctggactactgttgaagaaattcccagtaaggctcacttatatctttagagatggcaaataactacaagaaaattgttctactgaaaggattagaggtcatcaatgattatcattttagaattgttaagtccttactgagtaacgatttaaaacttaatccaaaaatgaaagaagagtatgacaaaattcagattgctgacttgatggaggaaaagttcccaggtgatgccggtttgggcaaactaatagaattcttcaaagaaataccaacactgggagaccttgctgaaactcttaaaagagaaaagttaaaagttgcaaataaaattgaatccattccagtcaaaggaataatcccatctaaaaagacgaaacagaaagaagtgtatcctgctacacctgcatgcaccccaagcaaccgtctcacagctaaaggagcagaggagactcttggacctcagaaaagaaaaaaaccatctgaagaagagactggaaccaaaaggagtaagatgtccaaagagcagactcggccttcctgctctgcaggagccagcacgtccacagccatgggccgttccccacctccccagacctcatcatcagctccacccaacacttcctcaactgagagcctaaaaccattggccaaccgtcacgcaactgccagtaaaaatattttccgagaagacccaataatcgcgatggtactaaatgcaacaaaagtatttaaatatgaatcctcagaaaatgagcaaagaagaatgtttcatgctacagtggctacgcagacacagttctttcatgtgaaggttttaaacatcaacttgaagaggaaattcattaaaaagagaatcatcattatatcaaattattccaaacgtaatagtctcctagaggtgaatgaagcctcttctgtatctgaagctggtcctgaccaaacgtttgaggttccaaaggacatcatcagaagagcaaagaaaattccgaagatcaatattcttcacaaacaaacttcaggatatattgtatatggattatttatgctacatacgaaaattgtaaataggaagacgacaatctatgaaattcaggataaaacaggaagtatggctgtagtaggaaaaggagaatgccacaatatcccctgtgaaaaaggagataagcttcgactcttctgctttcgactgagaaagagggaaaatatgtcaaaactgatgtcagaaatgcatagtttcatccagatacagaaaaatacaaaccagagaagccatgactccaggagcatggcactaccccaggaacagagtcagcatccaaaaccttcagaggccagcacaaccctacctgaaagccatctcaagactcctcagatgccaccaacaaccccatccagcagttccttcaccaaggtcaccaaggacaaggatatcaaataactactgttcaatctttactcaagtgtggaaattttgcctgaagtcctccacctaaaaacctgatgccattggtaatgatgtttatgaagataagatcaaagcacagaaaataatatatgtatatatatctggttgaaatactatatatatatatatatatatatatatatatatatatatatatatataccagctattaattctaggaaatggagtattaagggtgcattttatttcattagttttacttttatgcattttcttcatatcatattttgcattcagaattttcataatttgaaaaaaaataaacttttttttcttaa

SEQ ID NO: 3052 - protein, 461 aa, Homo sapiens; identical to SEQ ID NO: 170

SEQ ID NO: 3053 - DNA, 824 bp, Homo sapiens
aaccattggccaaccgtcacgcaactgccagtaaaaatattttccgagaagacccaataatcgcgatggtactaaatgcaacaaaagtatttaaatatgaatcctcagaaaatgagcaaagaagaatgtttcatgctacagtggctacgcagacacagttctttcatgtgaaggttttaaacatcaacttgaagaggaaattcattaaaaagagaatcatcattatatcaaattattccaaacgtaatagtctcctagaggtgaatgaagcctcttctgtatctgaagctggtcctgaccaaacgtttgaggttccaaaggacatcatcagaagagcaaagaaaattccgaagatcaatattcttcacaaacaaacttcaggatatattgtatatggattatttatgctacatacgaaaattgtaaataggaagacgacaatctatgaaattcaggataaaacaggaagtatggctgtagtaggaaaaggagaatgccacaatatcccctgtgaaaaaggagataagcttcgactcttctgctttcgactgagaaagagggaaaatatgtcaaaactgatgtcagaaatgcatagtttcatccagatacagaaaaatacaaaccagagaagccatgactccaggagcatggcactaccccaggaacagagtcagcatccaaaaccttcagaggccagcacaaccctacctgaaagccatctcaagactcctcagatgccaccaacaaccccatccagcagttccttcaccaaggtacaatatcctgggtcccatgactcttatctcccaaatataaattacaag

SEQ ID NO: 3054 - protein, 252 aa, Homo sapiens
MVLNATKVFKYESSENEQRRMFHATVATQTQFFHVKVLNINLKRKFIKKRIIIISNYSKRNSLLEVNEASSVSEAGPDQTFEVPKDIIRRAKKIPKINILHKQTSGYIVYGLFMLHTKIVNRKTTIYEIQDKTGSMAVVGKGECHNIPCEKGDKLRLFCFRLRKRENMSKLMSEMHSFIQIQKNTNQRSHDSRSMALPQEQSQHPKPSEASTTLPESHLKTPQMPPTTPSSSSFTKVQYPGSHDSYLPNINY

SEQ ID NO: 3055 - DNA, 2105 bp, Homo sapiens
tcatcaacatgcattcccagaaatgccatgaaaggaaagaccaagtcttgactgagaaacggaccgggcagatgagggactcccacatatacctgtttcctgctcttcccgaagacattttgccacaagcatataattcagcttctgaaaaatacggtcttcctcactgcagacaccatgccagcgttttaaatcaagttggctactcgtgctgtttagagtatgcagtttgcctgtggcaatattaaactcatctggaagaaagcacttaaacctatccagttcctcatcggtgatgttatccaggctggttagcaagagtatctccttatatttactctccatctcacgacttttcagcttataagggatccaaactatgtaagattataccaccaaaagtgattcaacattcaaaatgaagcaagatacttcattttcttagcgtttctggagattacaacatcctgcggttccgtttctgggaactttactgatttatctcccccctcacacaaataagcattgattcctgcatttctgaagatctcaagatctggactactgttgaaaaaatttccagtgaggctcacttatgtctgtaaagatgggaaaaaaatacaagaacattgttctactaaaaggattagaggtcatcaatgattatcattttagaatggttaagtccttactgagcaacgatttaaaacttaatttaaaaatgagagaagagtatgacaaaattcagattgctgacttgatggaagaaaagttccgaggtgatgctggtttgggcaaactaataaaaattttcgaagatataccaacgcttgaagacctggctgaaactcttaaaaaagaaaagttaaaagtaaaaggaccagccctatcaagaaagaggaagaaggaagtggatgctacttcacctgcaccctccacaagcagcactgtcaaaactgaaggagcagaggcaactcctggagctcagaaaagaaaaaaatcaaccaaagaaaaggctggacccaaagggagtaaggtgtccgaggaacagactcagcctccctctcctgcaggagccggcatgtccacagccatgggccgttccccatctcccaagacctcattgtcagctccacccaacagttcttcaactgagaacccgaaaacagtggccaaatgtcaggtaactcccagaagaaatgttctccaaaaacgcccagtgatagtgaaggtactgagtacaacaaagccatttgaatatgagaccccagaaatggagaaaaaaataatgtttcatgctacagtggctacacagacacagttcttccatgtgaaggttttaaacaccagcttgaaggagaattcaccccaaagaagatcattgccatagcaaattatgtttgccgcaatgggttcctggaggtatatcctttcacacttgtggctgatgtgaatgctgaccgaaacatggagatcccaaaaggattgattagaagtgccagcgtaactcctaaaatcaatcagctttgctcacaaactaaaggaagttttgtgaatggggtgtttgaggtacataagaaaaatgtaaggggtgaattcacttattatgaaatacaagataatacagggaagatggaagtggtggtgcatggacgactgaccacaatcaactgtgaggaaggagataaactgaaactcacctgctttgaattggcaccgaaaagtgggaataccggggagttgagatctgtaattcatagtcacatcaaggtcatcaagaccaggaaaaacaagaaagacatactcaatcctgattcaagtatggaaacttcaccagactttttcttctaaaatctggatgtcattgacgataatgtttatggagataaggtctaagtgcctaaaaaaatgtacatatacctggttgaaatacaacactatacatacacaccaccatatatactagctgttaatcctatggaatggggtattgggagtgcttttttaatttttcatagtttttttttaataaaatggcatattttgcatctacaacttctataatttgaaaaaataaataaacattatcttttttgtgaaaggaa

SEQ ID NO: 3056 - protein, 264 aa, Homo sapiens
MSVKMGKKYKNIVLLKGLEVINDYHFRMVKSLLSNDLKLNLKMREEYDKIQIADLMEEKFRGDAGLGKLIKIFEDIPTLEDLAETLKKEKLKVKGPALSRKRKKEVDATSPAPSTSSTVKTEGAEATPGAQKRKKSTKEKAGPKGSKVSEEQTQPPSPAGAGMSTAMGRSPSPKTSLSAPPNSSSTENPKTVAKCQVTPRRNVLQKRPVIVKVLSTTKPFEYETPEMEKKIMFHATVATQTQFFHVKVLNTSLKENSPQRRSLP

SEQ ID NO: 3057 - DNA, 668 bp, Homo sapiens
gtttcctactccattttctctggggcaatagcagaataggagcaagccagcactagtcagctaactaagtgactcaaccaaggccttttttccttgttatctttgcagatacttcattttcttagcgtttctggagattacaacatcctgcggttccgtttctgggaactttactgatttatctcccccctcacacaaataagcattgattcctgcatttctgaagatctcaagatctggactactgttgaaaaaatttccagtgaggctcacttatgtctgtaaagatgggaaaaaaatacaagaacattgttctactaaaaggattagaggtcatcaatgattatcattttagaatggttaagtccttactgagcaacgatttaaaacttaatttaaaaatgagagaagagtatgacaaaattcagattgctgacttgatggaagaaaagttccgaggtgatgctggtttgggcaaactaataaaaattttcgaagatataccaacgcttgaagacctggctgaaactcttaaaaaagaaaagttaaaagtaaaaggaccagccctatcaagaaagaggaagaaggaagtggatgctacttcacctgcaccctccacaagcagcactgtcaaaactgaaggagcagaggcaactcctggagctcag

SEQ ID NO: 3058 - protein, 130 aa, Homo sapiens
MSVKMGKKYKNIVLLKGLEVINDYHFRMVKSLLSNDLKLNLKMREEYDKIQIADLMEEKFRGDAGLGKLIKIFEDIPTLEDLAETLKKEKLKVKGPALSRKRKKEVDATSPAPSTSSTVKTEGAEATPGA

SEQ ID NO: 3059 - DNA, 1259 bp, Homo sapiens
gtttcctactccattttctctggggcaatagcagaataggagcaagccagcactagtcagctaactaagtgactcaaccaaggccttttttccttgttatctttgcagatacttcattttcttagcgtttctggagattacaacatcctgcggttccgtttctgggaactttactgatttatctcccccctcacacaaataagcattgattcctgcatttctgaagatctcaagatctggactactgttgaaaaaatttccagtgaggctcacttatgtctgtaaagatgggaaaaaaatacaagaacattgttctactaaaaggattagaggtcatcaatgattatcattttagaatggttaagtccttactgagcaacgatttaaaacttaatttaaaaatgagagaagagtatgacaaaattcagattgctgacttgatggaagaaaagttccgaggtgatgctggtttgggcaaactaataaaaattttcgaagatataccaacgcttgaagacctggctgaaactcttaaaaaagaaaagttaaaagtaaaaggaccagccctatcaagaaagaggaagaaggaagtggatgctacttcacctgcaccctccacaagcagcactgtcaaaactgaaggagcagaggcaactcctggagctcagaaaagaaaaaaatcaaccaaagaaaaggctggacccaaagggagtaaggtgtccgaggaacagactcagcctccctctcctgcaggagccggcatgtccacagccatgggccgttccccatctcccaagacctcattgtcagctccacccaacagttcttcaactgagaacccgaaaacagtggccaaatgtcaggtaactcccagaagaaatgttctccaaaaacgcccagtgatagtgaaggtactgagtacaacaaagccatttgaatatgagaccccagaaatggagaaaaaaataatgtttcatgctacagtggctacacagacacagttcttccatgtgaaggttttaaacaccagcttgaaggagaaattcaatggaaagaaaatcatcatcatatcagattatttggaatatgatagtctcctagaggtcaatgaagaatctactgtatctgaagctggtcctaaccaaacgtttgaggttccaaataaaatcatcaacagagcaaaggaaactctgaagattgatattcttcacaaacaagcttcaggaaatattgtatatggggtatttatgctacataag

SEQ ID NO: 3060 - protein, 327 aa, Homo sapiens
MSVKMGKKYKNIVLLKGLEVINDYHFRMVKSLLSNDLKLNLKMREEYDKIQIADLMEEKFRGDAGLGKLIKIFEDIPTLEDLAETLKKEKLKVKGPALSRKRKKEVDATSPAPSTSSTVKTEGAEATPGAQKRKKSTKEKAGPKGSKVSEEQTQPPSPAGAGMSTAMGRSPSPKTSLSAPPNSSSTENPKTVAKCQVTPRRNVLQKRPVIVKVLSTTKPFEYETPEMEKKIMFHATVATQTQFFHVKVLNTSLKEKFNGKKIIIISDYLEYDSLLEVNEESTVSEAGPNQTFEVPNKIINRAKETLKIDILHKQASGNIVYGVFMLH

SEQ ID NO: 3061 - DNA, 4163 bp, Homo sapiens
gtttcctactccattttctctggggcaatagcagaataggagcaagccagcactagtcagctaactaagtgactcaaccaaggccttttttccttgttatctttgcagatacttcattttcttagcgtttctggagattacaacatcctgcggttccgtttctgggaactttactgatttatctcccccctcacacaaataagcattgattcctgcatttctgaagatctcaagatctggactactgttgaaaaaatttccagtgaggctcacttatgtctgtaaagatgggaaaaaaatacaagaacattgttctactaaaaggattagaggtcatcaatgattatcattttagaatggttaagtccttactgagcaacgatttaaaacttaatttaaaaatgagagaagagtatgacaaaattcagattgctgacttgatggaagaaaagttccgaggtgatgctggtttgggcaaactaataaaaattttcgaagatataccaacgcttgaagacctggctgaaactcttaaaaaagaaaagttaaaagtaaaaggaccagccctatcaagaaagaggaagaaggaagtggatgctacttcacctgcaccctccacaagcagcactgtcaaaactgaaggagcagaggcaactcctggagctcagaaaagaaaaaaatcaaccaaagaaaaggctggacccaaagggagtaaggtgtccgaggaacagactcagcctccctctcctgcaggagccggcatgtccacagccatgggccgttccccatctcccaagacctcattgtcagctccacccaacagttcttcaactgagaacccgaaaacagtggccaaatgtcaggtaactcccagaagaaatgttctccaaaaacgcccagtgatagtgaaggtactgagtacaacaaagccatttgaatatgagaccccagaaatggagaaaaaaataatgtttcatgctacagtggctacacagacacagttcttccatgtgaaggttttaaacaccagcttgaaggagaaattcaatggaaagaaaatcatcatcatatcagattatttggaatatgatagtctcctagaggtcaatgaagaatctactgtatctgaagctggtcctaaccaaacgtttgaggttccaaataaaatcatcaacagagcaaaggaaactctgaagattgatattcttcacaaacaagcttcaggaaatattgtatatggggtatttatgctacataagaaaacagtaaatcagaagaccacaatctacgaaattcaggatgatagaggaaaaatggatgtagtggggacaggacaatgtcacaatatcccctgtgaagaaggagataagctccaacttttctgctttcgacttagaaaaaagaaccagatgtcaaaactgatttcagaaatgcatagttttatccagataaagaaaaaaacaaacccgagaaacaatgaccccaagagcatgaagctaccccaggaacagcgtcagcttccatatccttcagaggccagcacaaccttccctgagagccatcttcggactcctcagatgccaccaacaactccatccagcagtttcttcaccaagaaaagtgaagacacaatctccaaaatgaatgacttcatgaggatgcagatactgaaggaagggagtcattttccaggaccgttcatgaccagcataggcccagctgagagccatccccacactcctcagatgcctccatcaacaccaagcagcagtttcttaaccacgttgaaaccaagactgaagactgaacctgaagaagtttccatagaagacagtgcccagagtgacctcaaagaagtgatggtgctgaacgcaacagaatcatttgtatatgagcccaaagagcagaagaaaatgtttcatgccacagtggcaactgagaatgaagtcttccgagtgaaggtttttaatattgacctaaaggagaagttcaccccaaagaagatcattgccatagcaaattatgtttgccgcaatgggttcctggaggtatatcctttcacacttgtggctgatgtgaatgctgaccgaaacatggagatcccaaaaggattgattagaagtgccagcgtaactcctaaaatcaatcagctttgctcacaaactaaaggaagttttgtgaatggggtgtttgaggtacataaggtaagcccacaccattgttttataaaatttctcctgcaacctccaatttttaaagtcttaacttgtcaactggagtttggtcaacttactcaacacagaaaatcaaccccttcacccttcccccagcactagagataattgaatagagttcatttcaggatatggggtacgttatattgtaacattcctcttcttaaggtatcatcatgcaagttatttagacagtcactaggaaacttggcattttattagttttgatgatctattcagagccacccttgtccaggacagtgcagagtttatatcaacacacatatccttaggattttgtttctttgagttcttctccatctgtatcaatgacaacttaatttaattgtgaataaaagagttgctctcccaagcctgaatcctgattgtgacaaccagagtaagaaataaaatagactactctgctttagaatgcagctatgtctaacagttagctagaattctgatcatttggactccaaagtttcttgcctcttctcattcattaattcatcaggagactgtagagcaactaacttctgcattaaataataagagaaatacgaagcaaaaagactaaaaaagtcacgtagcttaactgctcaatttataaatggggcaataaaatgcaaaaaaaagaaaaaaagcttggtgaattcttaggcttacagtgtgcctttcagtctctacacatcatgtaaatattatgcttagctgatttaacttcttgtttgaagtactgtttcatactccattatacatgtcttctagggtggcttacttttaattgtgctgttttctctacactcagtttaaatgactgtacatatatatgtggttgtagagttaatgaataatgagctacaaaccagaacaatgtgactagatagataggatgatctagatttgagatctgggcagattgggaaagagtgactatatggagaagaaagaagtagttacatattgaaataacagtctacttaatgaggacgtgcaacattctttctcaaacttacaaagtgccataaaaagcctctattctctgctcttgggcaggtgtgaaagaaacctaccaaattaatcagatttttctgtatccaggctccttaaaaaatcccagctgtgctgatgtggaaacaggaagaattaggaaagtaatcaattttttttcctagaaaaaatccagcagacaaagaacttcaacaaaagaggctcaagggaggagttgaaaggcaggattcaaagaccaagtatcttaagctatttggtacctgttattcaggacctacagctctgtttactctatcaaagacaaaagtttccagaaacaccctgtatttctcatagatttgaaaattattgatccagtttcagaagataagtgttaattttcttttgcagaaaaatgtaaggggtgaattcacttattatgaaatacaagataatacagggaagatggaagtggtggtgcatggacgactgaccacaatcaactgtgaggaaggagataaactgaaactcacctgctttgaattggcaccgaaaagtgggaataccggggagttgagatctgtaattcatagtcacatcaaggtcatcaagaccaggaaaaacaagaaagacatactcaatcctgattcaagtatggaaacttcaccagactttttcttctaaaatctggatgtcattgacgataatgtttatggagataaggtctaagtgcctaaaaaaatgtacatatacctggttgaaatacaacactatacatacacaccaccatatatactagctgttaatcctatggaatggggtattgggagtgcttttttaatttttcatagtttttttttaataaaatggcatattttgcatctacaacttctataatttgaaaaaataaataaacattatcttttttgtgaaagg

SEQ ID NO: 3062 - protein, 686 aa, Homo sapiens
MSVKMGKKYKNIVLLKGLEVINDYHFRMVKSLLSNDLKLNLKMREEYDKIQIADLMEEKFRGDAGLGKLIKIFEDIPTLEDLAETLKKEKLKVKGPALSRKRKKEVDATSPAPSTSSTVKTEGAEATPGAQKRKKSTKEKAGPKGSKVSEEQTQPPSPAGAGMSTAMGRSPSPKTSLSAPPNSSSTENPKTVAKCQVTPRRNVLQKRPVIVKVLSTTKPFEYETPEMEKKIMFHATVATQTQFFHVKVLNTSLKEKFNGKKIIIISDYLEYDSLLEVNEESTVSEAGPNQTFEVPNKIINRAKETLKIDILHKQASGNIVYGVFMLHKKTVNQKTTIYEIQDDRGKMDVVGTGQCHNIPCEEGDKLQLFCFRLRKKNQMSKLISEMHSFIQIKKKTNPRNNDPKSMKLPQEQRQLPYPSEASTTFPESHLRTPQMPPTTPSSSFFTKKSEDTISKMNDFMRMQILKEGSHFPGPFMTSIGPAESHPHTPQMPPSTPSSSFLTTLKPRLKTEPEEVSIEDSAQSDLKEVMVLNATESFVYEPKEQKKMFHATVATENEVFRVKVFNIDLKEKFTPKKIIAIANYVCRNGFLEVYPFTLVADVNADRNMEIPKGLIRSASVTPKINQLCSQTKGSFVNGVFEVHKVSPHHCFIKFLLQPPIFKVLTCQLEFGQLTQHRKSTPSPFPQH

SEQ ID NO: 3063 - DNA, 2731 bp, Homo sapiens
gtttcctactccattttctctggggcaatagcagaataggagcaagccagcactagtcagctaactaagtgactcaaccaaggccttttttccttgttatctttgcagatacttcattttcttagcgtttctggagattacaacatcctgcggttccgtttctgggaactttactgatttatctcccccctcacacaaataagcattgattcctgcatttctgaagatctcaagatctggactactgttgaaaaaatttccagtgaggctcacttatgtctgtaaagatgggaaaaaaatacaagaacattgttctactaaaaggattagaggtcatcaatgattatcattttagaatggttaagtccttactgagcaacgatttaaaacttaatttaaaaatgagagaagagtatgacaaaattcagattgctgacttgatggaagaaaagttccgaggtgatgctggtttgggcaaactaataaaaattttcgaagatataccaacgcttgaagacctggctgaaactcttaaaaaagaaaagttaaaagtaaaaggaccagccctatcaagaaagaggaagaaggaagtggatgctacttcacctgcaccctccacaagcagcactgtcaaaactgaaggagcagaggcaactcctggagctcagaaaagaaaaaaatcaaccaaagaaaaggctggacccaaagggagtaaggtgtccgaggaacagactcagcctccctctcctgcaggagccggcatgtccacagccatgggccgttccccatctcccaagacctcattgtcagctccacccaacagttcttcaactgagaacccgaaaacagtggccaaatgtcaggtaactcccagaagaaatgttctccaaaaacgcccagtgatagtgaaggtactgagtacaacaaagccatttgaatatgagaccccagaaatggagaaaaaaataatgtttcatgctacagtggctacacagacacagttcttccatgtgaaggttttaaacaccagcttgaaggagaaattcaatggaaagaaaatcatcatcatatcagattatttggaatatgatagtctcctagaggtcaatgaagaatctactgtatctgaagctggtcctaaccaaacgtttgaggttccaaataaaatcatcaacagagcaaaggaaactctgaagattgatattcttcacaaacaagcttcaggaaatattgtatatggggtatttatgctacataagaaaacagtaaatcagaagaccacaatctacgaaattcaggatgatagaggaaaaatggatgtagtggggacaggacaatgtcacaatatcccctgtgaagaaggagataagctccaacttttctgctttcgacttagaaaaaagaaccagatgtcaaaactgatttcagaaatgcatagttttatccagataaagaaaaaaacaaacccgagaaacaatgaccccaagagcatgaagctaccccaggaacagcgtcagcttccatatccttcagaggccagcacaaccttccctgagagccatcttcggactcctcagatgccaccaacaactccatccagcagtttcttcaccaagaaaagtgaagacacaatctccaaaatgaatgacttcatgaggatgcagatactgaaggaagggagtcattttccaggaccgttcatgaccagcataggcccagctgagagccatccccacactcctcagatgcctccatcaacaccaagcagcagtttcttaaccacgttgaaaccaagactgaagactgaacctgaagaagtttccatagaagacagtgcccagagtgacctcaaagaagtgatggtgctgaacgcaacagaatcatttgtatatgagcccaaagagcagaagaaaatgtttcatgccacagtggcaactgagaatgaagtcttccgagtgaaggtttttaatattgacctaaaggagaagttcaccccaaagaagatcattgccatagcaaattatgtttgccgcaatgggttcctggaggtatatcctttcacacttgtggctgatgtgaatgctgaccgaaacatggagatcccaaaaggattgattagaagtgccagcgtaactcctaaaatcaatcagctttgctcacaaactaaaggaagttttgtgaatggggtgtttgaggtacataagaaaaatgtaaggggtgaattcacttattatgaaatacaagataatacagggaagatggaagtggtggtgcatggacgactgaccacaatcaactgtgaggaaggagataaactgaaactcacctgctttgaattggcaccgaaaagtgggaataccggggagttgagatctgtaattcatagtcacatcaaggtcatcaagaccaggaaaaacaagaaagacatactcaatcctgattcaagtatggaaacttcaccagactttttcttctaaaatctggatgtcattgacgataatgtttatggagataaggtctaagtgcctaaaaaaatgtacatatacctggttgaaatacaacactatacatacacaccaccatatatactagctgttaatcctatggaatggggtattgggagtgcttttttaatttttcatagtttttttttaataaaatggcatattttgcatctacaacttctataatttgaaaaaataaataaacattatcttttttgtgaaaggaa

SEQ ID NO: 3064 - protein, 733 aa, Homo sapiens [sequence omitted]

SEQ ID NO: 3065 - DNA, 906 bp, Homo sapiens
agtgcttgttcctgtcttgtgactgctggtctccttaaggccaggctgggctaatgcagtagagctagactaaagcacagctgaaccctcaagcaggaactgagagcaaattgtattgaaactgcttcagctgtcggagatcgtttatatgtcttccttttttctgcattggttgggaataaaattgaatctattccagtaaaaggaccagccctatcaagaaagaggaagaaggaagtggatgctacttcacctgcaccctccacaagcagcactgtcaaaactgaaggagcagaggcaactcctggagctcagaaaagaaaaaaatcaaccaaagaaaaggctggacccaaagggagtaaggtgtccgaggaacagactcagcctccctctcctgcaggagccggcatgtccacagccatgggccgttccccatctcccaagacctcattgtcagctccacccaacagttcttcaactgagaacccgaaaacagtggccaaatgtcaggtaactcccagaagaaatgttctccaaaaacgcccagtgatagtgaaggtactgagtacaacaaagccatttgaatatgagaccccagaaatggagaaaaaaataatgtttcatgctacagtggctacacagacacagttcttccatgtgaaggttttaaacaccagcttgaaggagaaattcaatggaaagaaaatcatcatcatatcagattatttggaatatgatagtctcctagaggtcaatgaagaatctactgtatctgaagctggtcctaaccaaacgtttgaggttccaaataaaatcatcaacagagcaaaggaaactctgaagattgatattcttcacaaacaagcttcaggaaatattgtatatggggtatttatgctacataag

SEQ ID NO: 3066 - protein, 165 aa, Homo sapiens
MSTAMGRSPSPKTSLSAPPNSSSTENPKTVAKCQVTPRRNVLQKRPVIVKVLSTTKPFEYETPEMEKKIMFHATVATQTQFFHVKVLNTSLKEKFNGKKIIIISDYLEYDSLLEVNEESTVSEAGPNQTFEVPNKIINRAKETLKIDILHKQASGNIVYGVFMLH

SEQ ID NO: 3067 - DNA, 1017 bp, Homo sapiens
agctgaaccctcaagcaggaactgagagcaaattgtattgaaactgcttcagctgtcggagatcgtttatatgtcttccttttttctgcattggttgggaataaaattgaatctattccagtaaaaggaccagccctatcaagaaagaggaagaaggaagtggatgctacttcacctgcaccctccacaagcagcactgtcaaaactgaaggagcagaggcaactcctggagctcagaaaagaaaaaaatcaaccaaagaaaaggctggacccaaagggagtaaggtgtccgaggaacagactcagcctccctctcctgcaggagccggcatgtccacagccatgggccgttccccatctcccaagacctcattgtcagctccacccaacagttcttcaactgagaacccgaaaacagtggccaaatgtcaggtaactcccagaagaaatgttctccaaaaacgcccagtgatagtgaaggtactgagtacaacaaagccatttgaatatgagaccccagaaatggagaaaaaaataatgtttcatgctacagtggctacacagacacagttcttccatgtgaaggttttaaacaccagcttgaaggagaaattcaatggaaagaaaatcatcatcatatcagattatttggaatatgatagtctcctagaggtcaatgaagaatctactgtatctgaagctggtcctaaccaaacgtttgaggttccaaataaaatcatcaacagagcaaaggaaactctgaagattgatattcttcacaaacaagcttcaggaaatattgtatatggggtatttatgctacataagaaaacagtaaatcagaagaccacaatctacgaaattcaggatgatagaggaaaaatggatgtagtggggacaggacaatgtcacaatatcccctgtgaagaaggagataagctccaacttttctgctttcgacttagaaaaaagaaccagatgtcaaaactgatttcagaaatgcatagttttatccag

SEQ ID NO: 3068 - protein, 228 aa, Homo sapiens
MSTAMGRSPSPKTSLSAPPNSSSTENPKTVAKCQVTPRRNVLQKRPVIVKVLSTTKPFEYETPEMEKKIMFHATVATQTQFFHVKVLNTSLKEKFNGKKIIIISDYLEYDSLLEVNEESTVSEAGPNQTFEVPNKIINRAKETLKIDILHKQASGNIVYGVFMLHKKTVNQKTTIYEIQDDRGKMDVVGTGQCHNIPCEEGDKLQLFCFRLRKKNQMSKLISEMHSFI

SEQ ID NO: 3069 - DNA, 1528 bp, Homo sapiens
atagacattttcttctgtggctgctagtgagaacccaaaccagctcagccaattagagctccagttgtcactcctacccacactgggcctgggggtgaagggaagtgtttattaggggtacatgtgaagccgtccagaagtgtcagagtctttgtagctttgaaagtcacctaggttatttgggcatgctctcctgagtcctctgctagttaagctctctgaaaagaaggtggcagacccggtttgctgatcgccccagggatcaggaggctgatcccaaagttgtcagatggagagtaaatacaaggagatactcttgctaacaggcctggataacatcactgatgaggaactggataggtttaagttctttctttcagacgagtttaatattgccacaggcaaactacatactgcaaacagaatacaagtagctaccttgatgattcaaaatgctggggcggtgtctgcagtgatgaagaccattcgtatttttcagaagttgaattatatgcttttggcaaaacgtcttcaggaggagaaggagaaagttgataagcaatacaaatcggtaacaaaaccaaagccactaagtcaagctgaaatgagtcctgctgcatctgcagccatcagaaatgatgtcgcaaagcaacgtgctgcaccaaaagtctctcctcatgttaagcctgaacagaaacagatggtggcccagcaggaatctatcagagaagggtttcagaagcgctgtttgccagttatggtactgaaagcaaagaagcccttcacgtttgagacccaagaaggcaagcaggagatgtttcatgctacagtggctacagaaaaggaattcttctttgtaaaagtttttaatacactgctgaaagataaattcattccaaagagaataattataatagcaagatattatcggcacagtggtttcttagaggtaaatagcgcctcacgtgtgttagatgctgaatctgaccaaaaggttaatgtcccgctgaacattatcagaaaagctggtgaaaccccgaagatcaacacgcttcaaactcagccccttggaacaattgtgaatggtttgtttgtagtccagaaggtaacagaaaagaagaaaaacatattatttgacctaagtgacaacactgggaaaatggaagtactgggggttagaaacgaggacacaatgaaatgtaaggaaggagataaggttcgacttacattcttcacactgtcaaaaaatggagaaaaactacagctgacatctggagttcatagcaccataaaggttattaaggccaaaaaaaaaacatagagaagtaaaaaggaccaattcaagccaactggtctaagcagcatttaattgaagaatatgtgatacagcctcttcaatcagattgtaagttacctgaaagctgcagttcacaggctcctctctccaccaaattaggatagaataattgctggataaacaaattcagaatatcaacagatgatcacaataaacatctgtttctcattc

SEQ ID NO: 3070 - protein, 343 aa, Homo sapiens; identical to SEQ ID NO: 176

SEQ ID NO: 3071 - DNA, 1699 bp, Homo sapiens
atttaatccccgcgactgcagcagcgccggctccctcccggtccccacctcggccccgggctccgaagcggctcgggggcgccctttcggtcaacatcgtagtccaccccctccccatccccagcccccggggattcaggctcgccagcgcccagccagggagccggccgggaagcgcgatgggggccccagccgcctcgctcctgctcctgctcctgctgttcgcctgctgctgggcgcccggcggggccaacctctcccaggacgacagccagccctggacatctgatgaaacagtggtggctggtggcaccgtggtgctcaagtgccaagtgaaagatcacgaggactcatccctgcaatggtctaaccctgctcagcagactctctactttggggagaagagagcccttcgagataatcgaattcagctggttacctctacgccccacgagctcagcatcagcatcagcaatgtggccctggcagacgagggcgagtacacctgctcaatcttcactatgcctgtgcgaactgccaagtccctcgtcactgtgctaggaattccacagaagcccatcatcactggttataaatcttcattacgggaaaaagacacagccaccctaaactgtcagtcttctgggagcaagcctgcagcccggctcacctggagaaagggtgaccaagaactccacggagaaccaacccgcatacaggaagatcccaatggtaaaaccttcactgtcagcagctcggtgacattccaggttacccgggaggatgatggggcgagcatcgtgtgctctgtgaaccatgaatctctaaagggagctgacagatccacctctcaacgcattgaagttttatacacaccaactgcgatgattaggccagaccctccccatcctcgtgagggccagaagctgttgctacactgtgagggtcgcggcaatccagtcccccagcagtacctatgggagaaggagggcagtgtgccacccctgaagatgacccaggagagtgccctgatcttccctttcctcaacaagagtgacagtggcacctacggctgcacagccaccagcaacatgggcagctacaaggcctactacaccctcaatgttaatgaccccagtccggtgccctcctcctccagcacctaccacgccatcatcggtgggatcgtggctttcattgtcttcctgctgctcatcatgctcatcttccttggccactacttgatccggcacaaaggaacctacctgacacatgaggcaaaaggctccgacgatgctccagacgcggacacggccatcatcaatgcagaaggcgggcagtcaggaggggacgacaagaaggaatatttcatctagaggcgcctgcccacttcctgcgccccccaggggccctgtggggactgctggggccgtcaccaacccggacttgtacagagcaaccgcagggccgcccctcccgcttgctccccagcccacccacccccctgtacagaatgtctgctttgggtgcggttttgtactcggtttggaatggggagggaggagggcggggggaggggagggttgccctcagccctttccgtggcttctctgcatttgggttattattatttttgtaacaatcccaaatcaaatctgtctccaggctggagaggcaggagccctggggtgagaaaagc

SEQ ID NO: 3072 - protein, 398 aa, Homo sapiens
MGAPAASLLLLLLLFACCWAPGGANLSQDDSQPWTSDETVVAGGTVVLKCQVKDHEDSSLQWSNPAQQTLYFGEKRALRDNRIQLVTSTPHELSISISNVALADEGEYTCSIFTMPVRTAKSLVTVLGIPQKPIITGYKSSLREKDTATLNCQSSGSKPAARLTWRKGDQELHGEPTRIQEDPNGKTFTVSSSVTFQVTREDDGASIVCSVNHESLKGADRSTSQRIEVLYTPTAMIRPDPPHPREGQKLLLHCEGRGNPVPQQYLWEKEGSVPPLKMTQESALIFPFLNKSDSGTYGCTATSNMGSYKAYYTLNVNDPSPVPSSSSTYHAIIGGIVAFIVFLLLIMLIFLGHYLIRHKGTYLTHEAKGSDDAPDADTAIINAEGGQSGGDDKKEYFI

SEQ ID NO: 3073 - DNA, 2567 bp, Homo sapiens
atttaatccccgcgactgcagcagcgccggctccctcccggtccccacctcggccccgggctccgaagcggctcgggggcgccctttcggtcaacatcgtagtccaccccctccccatccccagcccccggggattcaggctcgccagcgcccagccagggagccggccgggaagcgcgatgggggccccagccgcctcgctcctgctcctgctcctgctgttcgcctgctgctgggcgcccggcggggccaacctctcccaggacggctactggcaggagcaggatttggagctgggaactctggctccactcgacgaggccatcagctccacagtctggagcagccctgacatgctggccagtcaagacagccagccctggacatctgatgaaacagtggtggctggtggcaccgtggtgctcaagtgccaagtgaaagatcacgaggactcatccctgcaatggtctaaccctgctcagcagactctctactttggggagaagagagcccttcgagataatcgaattcagctggttacctctacgccccacgagctcagcatcagcatcagcaatgtggccctggcagacgagggcgagtacacctgctcaatcttcactatgcctgtgcgaactgccaagtccctcgtcactgtgctaggaattccacagaagcccatcatcactggttataaatcttcattacgggaaaaagacacagccaccctaaactgtcagtcttctgggagcaagcctgcagcccggctcacctggagaaagggtgaccaagaactccacggagaaccaacccgcatacaggaagatcccaatggtaaaaccttcactgtcagcagctcggtgacattccaggttacccgggaggatgatggggcgagcatcgtgtgctctgtgaaccatgaatctctaaagggagctgacagatccacctctcaacgcattgaagttttatacacaccaactgcgatgattaggccagaccctccccatcctcgtgagggccagaagctgttgctacactgtgagggtcgcggcaatccagtcccccagcagtacctatgggagaaggagggcagtgtgccacccctgaagatgacccaggagagtgccctgatcttccctttcctcaacaagagtgacagtggcacctacggctgcacagccaccagcaacatgggcagctacaaggcctactacaccctcaatgttaatgaccccagtccggtgccctcctcctccagcacctaccacgccatcatcggtgggatcgtggctttcattgtcttcctgctgctcatcatgctcatcttccttggccactacttgatccggcacaaaggaacctacctgacacatgaggcaaaaggctccgacgatgctccagacgcggacacggccatcatcaatgcagaaggcgggcagtcaggaggggacgacaagaaggaatatttcatctagaggcgcctgcccacttcctgcgccccccaggggccctgtggggactgctggggccgtcaccaacccggacttgtacagagcaaccgcagggccgcccctcccgcttgctccccagcccacccacccccctgtacagaatgtctgctttgggtgcggttttgtactcggtttggaatggggagggaggagggcggggggaggggagggttgccctcagccctttccgtggcttctctgcatttgggttattattatttttgtaacaatcccaaatcaaatctgtctccaggctggagaggcaggagccctggggtgagaaaagcaaaaaacaaacaaaaaacaaaaccctggagtgttaggaggagagtgaaggtagaggggtgaggaagggtaaggggcagggctggtttcagctgggggctctcaccagccctcctttcagcctctacaacagagcagcttcccagacttctccaggaacccagaaacgggatggttgtcggcaaaggttgggagtggcttttcctctggtagccacacacctgagcactacggacagggaggcaggtgccaccttgacacctctcttccatagcaatgggaaagtgatgagtgcgggagtcctgaggagatgtggcctgcagacaacatgcagccatgcagggacccaggactgtaacctggggaggacgcgggtccctgcaaggaagagtagatttggagaggaaggatggaggtggactctcaccccattccccccggaaatgaacaaagccgggccctttccataggaactgcccttggagatagcagagtgtggctgcccctccttgctccagcagcagtgggagaggcactgctctggggcctgaactgcctctgcttccccccctgaggggcccctcactcttacccaagactctggattgttgcacggcaaccactcctcccatggcattgctcagcaactacttctcccttcccggccaccctgtgcccccttcctggtcccaacgccagcccttcatccttcctccctcagcagccaggcagacataacaacaaaactactaaaaggagcttcactgc

SEQ ID NO: 3074 - protein, 432 aa, Homo sapiens; identical to SEQ ID NO: 178

SEQ ID NO: 3075 - DNA, 5389 bp, Homo sapiens
atttaatccccgcgactgcagcagcgccggctccctcccggtccccacctcggccccgggctccgaagcggctcgggggcgccctttcggtcaacatcgtagtccaccccctccccatccccagcccccggggattcaggctcgccagcgcccagccagggagccggccgggaagcgcgatgggggccccagccgcctcgctcctgctcctgctcctgctgttcgcctgctgctgggcgcccggcggggccaacctctcccaggacgacagccagccctggacatctgatgaaacagtggtggctggtggcaccgtggtgctcaagtgccaagtgaaagatcacgaggactcatccctgcaatggtctaaccctgctcagcagactctctactttggggagaagagagcccttcgagataatcgaattcagctggttacctctacgccccacgagctcagcatcagcatcagcaatgtggccctggcagacgagggcgagtacacctgctcaatcttcactatgcctgtgcgaactgccaagtccctcgtcactgtgctaggaattccacagaagcccatcatcactggttataaatcttcattacgggaaaaagacacagccaccctaaactgtcagtcttctgggagcaagcctgcagcccggctcacctggagaaagggtgaccaagaactccacggagaaccaacccgcatacaggaagatcccaatggtaaaaccttcactgtcagcagctcggtgacattccaggttacccgggaggatgatggggcgagcatcgtgtgctctgtgaaccatgaatctctaaagggagctgacagatccacctctcaacgcattgaagttttatacacaccaactgcgatgattaggccagaccctccccatcctcgtgagggccagaagctgttgctacactgtgagggtcgcggcaatccagtcccccagcagtacctatgggagaaggagggcagtgtgccacccctgaagatgacccaggagagtgccctgatcttccctttcctcaacaagagtgacagtggcacctacggctgcacagccaccagcaacatgggcagctacaaggcctactacaccctcaatgttaatgaccccagtccggtgccctcctcctccagcacctaccacgccatcatcggtgggatcgtggctttcattgtcttcctgctgctcatcatgctcatcttccttggccactacttgatccggcacaaaggaacctacctgacacatgaggcaaaaggctccgacgatgctccagacgcggacacggccatcatcaatgcagaaggcgggcagtcaggaggggacgacaagaaggaatatttcatctagaggcgcctgcccacttcctgcgccccccaggggccctgtggggactgctggggccgtcaccaacccggacttgtacagagcaaccgcagggccgcccctcccgcttgctccccagcccacccacccccctgtacagaatgtctgctttgggtgcggttttgtactcggtttggaatggggagggaggagggcggggggaggggagggttgccctcagccctttccgtggcttctctgcatttgggttattattatttttgtaacaatcccaaatcaaatctgtctccaggctggagaggcaggagccctggggtgagaaaagcaaaaaacaaacaaaaaacaaaaccctggagtgttaggaggagagtgaaggtagaggggtgaggaagggtaaggggcagggctggtttcagctgggggctctcaccagccctcctttcagcctctacaacagagcagcttcccagacttctccaggaacccagaaacgggatggttgtcggcaaaggttgggagtggcttttcctctggtagccacacacctgagcactacggacagggaggcaggtgccaccttgacacctctcttccatagcaatgggaaagtgatgagtgcgggagtcctgaggagatgtggcctgcagacaacatgcagccatgcagggacccaggactgtaacctggggaggacgcgggtccctgcaaggaagagtagatttggagaggaaggatggaggtggactctcaccccattccccccggaaatgaacaaagccgggccctttccataggaactgcccttggagatagcagagtgtggctgcccctccttgctccagcagcagtgggagaggcactgctctggggcctgaactgcctctgcttccccccctgaggggcccctcactcttacccaagactctggattgttgcacggcaaccactcctcccatggcattgctcagcaactacttctcccttcccggccaccctgtgcccccttcctggtcccaacgccagcccttcatccttcctccctcagcagccaggcagacataacaacaaaactactaaaaggagcttcactgcagtgagctgtttcctgcccaaactaagggaataatgtgaactgtgtgcatgtgtgtggtgtgtatgcatgtgtgcatgtgtgtgtgtgtgtgtgcatgtgtgtgagtgagtgagaggcagagcgaggaactgaggaggagggctaagagccaggggtcctgggcaagtggacagggctgtgggacatgttggggaggctttgggaatggggtattcctagtcagggttcacacctcacctgggatgttgttccatgctggtatttcctctgccacccccaatgcccatcggtcttggagaaaggagtccccgggtgtgtgtttgcccagctgtccattctatctctcccttaaacacagagcattcagcccttccctggatttccctcctctgagccatggagtcagtgccacagcctttgctatgcacctctcaggcctctccttggcgttgaccctggaaagacctaccaccacctattttttcccatagtctgtacccagtgagttgaaggctgggtccccacccttccttttgatttcctgtcttccttctcgtggccccagctggttgctgtggagatgaggttcctggtcctccctgtcctggctggactgccccgcctcagatccaggatgcccttggcatcgctcccaccctcccccagcttttcctccctggtctgacaatgggcatgcaaaaaggggcagctgcaatctagcaggcctgcccacccccttcagttcaggtaatacagttgtgaatcttccagccgctggttagggccttgggcaccacaggcagcccctcacctaagccggggcctactcctcttacaacagcaagagagccctggggccccaggcctgttgagcttcttgtctcccagcacccgcttttgggaaaatgacttttcctcttcaagctgaaccactctgtccatattacacagaagccatatttgtacgggggggtgggagggagaggggctgttgtgctgtgtgtgtctgtccaggggtgggggggtgggggaagggagcagggaggggaccgtgtatctttataatctttctaactctcctgtgctaatctcagaggggtcaccctcaatatatctggattatccgtgtcattcagctgcctcctttctggtcctcttgctgctgctgggatgtgtgtatgtgagggtcttcttcccataccccttgcacctggtgcctggtgcctcaaaaggtggtgtgtcccttgccaggccactctcaagaatatctatgtacagcaacaatataactctacaagggagagaagtgtgttcacttccttttgctaagcccttcctttccagagagtgtcttggggggcatctgactgcttccccccaccctctgccaggcattgctggagaatgttaagacggcgatggagatgccatcaaccccaccctgcagagcatcaccagacaccaccagaccaaattcactttccagccccttcatgttgaacctgaaacttgagctagtgtcttgggagaaaagggggaaatctctacgaggtacccatccttctgcaccttaggtctgaggtgcttggccccctaggaagccctacatgaatgggacagaaggtccttaacaacactggagatgaagcagccgatgctgttttggacaaatgaaacagcgtcccctaaccagccctttctatctcattgttctgacttggacacgccatggctcaccgctcccaaagtccccactatgtctccctagctgaggaaataaaagcagagaggggtgatgaaacagtgacgatcctggggaaacagctgaggaggggagggagggggaagaagccactaaaaaagtgaaatgtgcttgggagaatcggcctgcctgcagggtagatgccctttctctctgctggccagctctgcccctcagtgagaaactttacatattgctaagatgcctggccaatgaaacagttccagagactttatgtcccccagtagaaatatgaatagaaatcaccctgtgggcaatggtcccattttaaaatatgctgtcccattgtcccctagagcctactttaacttgtcagaccatgtattccacttcatatgcaagaggcatgcactgagcccataggtggctaggcaaacacccaatagctccctgaaatggcttcattatgcagcctcgacagccaccccaaccctcccactctcacactgaaacacccagacctagagatagctagacacacccagacacccgccaagcccctcacatacagatatgtgcacaatgatacacagcaaacgtacacagagttcagtacacacaaagagctcacgcccacgtgcacacacccctcagttgggacagagttgaccaccaccacctttctcccaaacacatggcttttgaactgcctttccttggatccagttcaaggggatggaggagcagtgagagtcagccgcccttccactccaatttcccagcacctcccttatctctgcctcacaagtcacccagcccccctctcttccttccttgtgcttgaagaatctctccttgctggaaagccccctgttttctcaatctccctttccacttcggtaaaatctctacttgctggaaagccccctgttttctcaatctccctttccacttcggtaaaatgcccactttctggtccccacctttttcctgagtgtagtcccaaccagccaaatccaacctcaaaacaggaagacccaaggccagtgacccccataggcctgaggcttgtgcaggcagtgggcgtggggtaaggcttcctgatgccccctgtccctgcccagaacctgatggccctcattagtccttggctcttatcttggaagcacaggcgctgacagccgtcccagcccttctgtc

SEQ ID NO: 3076 - protein, 398 aa, Homo sapiens; identical to SEQ ID NO: 3072

SEQ ID NO: 3077 - DNA, 763 bp, Homo sapiens
gctccgcgtgtgtgccccaactgtcctggaagcttcaattggaaaactccaaactttaagttttgcttatagcttcagctcaacctccatcaagggagacctgcaagttgcctggggttcagtgctctagaaagttccaaggtttgtggcttgaattattctaaagaagctgaaataattgaagagaagcagaggccagctgtttttgaggatcctgctccacagagaatgctctgcacccgttgatactccagttccaacaccatcttctgagatgatcctgattcccagaatgctcttggtgctgttcctgctgctgcctatcttgagttctgcaaaagctcaggttaatccagctatatgccgctatcctctgggcatgtcaggaggccagattccagatgaggacatcacagcttccagtcagtggtcagagtccacagctgccaaatatggaaggctggactcagaagaaggggatggagcctggtgccctgagattccagtggaacctgatgacctgaaggagtttctgcagattgacttgcacaccctccattttatcactctggtggggacccaggggcgccatgcaggaggtcatggcatcgagtttgcccccatgtacaagatcaattacagtcgggatggcactcgctggatctcttggcggaaccgtcatgggaaacaggtgctggatggaaatagtaacccctatgacattttcctaaaggacttggagccgcccattgtagccagattt

SEQ ID NO: 3078 - protein, 162 aa, Homo sapiens
MILIPRMLLVLFLLLPILSSAKAQVNPAICRYPLGMSGGQIPDEDITASSQWSESTAAKYGRLDSEEGDGAWCPEIPVEPDDLKEFLQIDLHTLHFITLVGTQGRHAGGHGIEFAPMYKINYSRDGTRWISWRNRHGKQVLDGNSNPYDIFLKDLEPPIVAR

SEQ ID NO: 3079 - DNA, 6199 bp, Homo sapiens
tccgcgtgtgtgccccaactgtcctggaagcttcaattggaaaactccaaactttaagttttgcttatagcttcagctcaacctccatcaagggagacctgcaagttgcctggggttcagtgctctagaaagttccaaggtttgtggcttgaattattctaaagaagctgaaataattgaagagaagcagaggccagctgtttttgaggatcctgctccacagagaatgctctgcacccgttgatactccagttccaacaccatcttctgagatgatcctgattcccagaatgctcttggtgctgttcctgctgctgcctatcttgagttctgcaaaagctcaggttaatccaggtaacatggctattactcagacatgtctcactgtttgtatttctctctcctgtcaaagtgaatgatatattcttgaaaacccccaatttcttgaaatgggtgttctgttcattcatgggcaggggtcaggattgaagttcatatatgaaacaactggggatgtagataggaaagaatgtctgctgcaagagtgtatgaagggggattgtcatttacaaaaaaaaagtacctcatggatggaaggattcatgaatagataatggacataggaaaggaggtcaatggaggacacataacagacatgctatccaccatttatttgtgattttgtaagagggttctcttctttgtcttgttcagatattttcatgtgtgtgttttagtgagaatctgagtttttaatcagtaaagtctgatgttttgatatcttgatgttttgatggtagactcttgagttcatcttgtccaaatcttctagcattttcaaggatgaagcctctgtgggatctttgggcttggggctgaatttctcaggcataaatacctaatggccttgtctaagagggaatagatctgttctgagtgtccccaaaaaagttgtcctaggaactgatgtggagaagttacagggagactgatttccattccttattggggaaaacgaagcactcagaacatacaaggataaatgggctgccaccagaggtgaggagtctcttgtcactggagaggttaagatagaggctcaagaacaatgcaaggaaaatggaggttttcaaacacaaagtggatggtggtatgagacaatgtttaatgtccttctaactccgagagtccttgattctggagaggcacaggatgaacatctgttgctactgctgagtatacacactcttgcctctgagatggcgtgaccagcagaaaagaaagctcagggctgtggcttcagaattcatggaaacagagccactgtcaagaaggaatctgctcagagcagattctgagttttcacactccacaaatcctcagatttagtgggaagctggaaaaaggaactcttaattccaattgaggagaaacaagaaaacattacaaatcagtttcccaagctgagaaggattagccttgaccccttgggtctgcctctgttgccctcaccagtttaccttctacaacagtttctcaggaacatgtgtatttccccattcagctttcagcattgctccacgccacagcataagcatagatcccaagtccacaggctccattttgcaggtcatcttctgatcctagcaaatgtcctttccccatagttgtcctatgcctttgggctttagtctatcccaggactaactgtggagaaatcattggtttgagagtcaagagagcattggtttgggagctttaatcctctttctgcttcacactaagtgtgtcatcttggctaaatcacttggtctttctgcattttgttttcttatttataggatgaggaaattagattaaatggttttgaggtcctttcttgttctgatatgtccagtactcactggaaaattggatctataactgatgggtttagtaatctggtcatttcttgctctgaaaattgtagtcagcaaaagagatcatggaagaaatcactgtaatggtagtaatagtaacacatgccatttgtattgtgccttaggtttaccaggtgtttccaaatacattagcatatttgatatgtgcaggactagataccttgggacctgccacactccactttcaagatatgtattagcttcattagaattaaagggacttgaactcaggacctgcagcctattcttctttatccacatgtctctggtagggctacatccagatcacaccatgacttcttatagagcaagagaaaataatattattatatcttcctttgcctaaaatctctccacttattcttttttatgattctgcaccagttcactgggttattctatgattccatattttttttaaaaaaaatcatatttaaaatgaacttacaatgtctgaattttcctggccttgagtcacagaagtaatatgtttcagatggctgcccaatatgtattatcatgtaatacatatctgtgtccttttctgggatgaggaaggcttcaacttctggcactgagaactttgtattacagacacaggtttagtttctagcttagtcatgcctttagagtttagtagcacaaatccatgcaacccaacagaatacatggtgagggcctagtatgtagaatttgaaagtagttcaaatttgaattagaagaatgaagctaggacttatttggaaaaggagatagaaaaaaaatgatcagaaactgtggggccttattacctttgcagtaagttatcttcttcatgatatatgtgaattattttatgtgcagattgtgttttgggattgtcagatctaaacttatattcttgctggctaatgtgctgatagccaggtctgaaacttgatgtgctatccagacacatatgatcagaaaagatctagagtgcaaagaggtgcctgaggagcaaaatgtggttttaatgttgtggaaagatcacttgcaagtatataagactgtataaagaagaggactgtgtgcaagtggggtgaaaaaaaaggatacgtgaatgtgcatatgactgaatagggaggaaggtcagggctagaaaggaggctacataaaaaggggcaatggagaatgcacaggaaagacacaggggaaggtcaagtcgagcaaggtagaaacaggagtagctagagccattgggaatccattttgaaacaagaaggagttttgaaagggaataggaaagtaagtgtcttgaagtaaaagataaatatggatggagaaagaagaaattctggatgatagagatgataaaaatatttattaagaaatgaagtcaggttcagtgtatgaaatggaaaggaatttttcagaattttaagaaaggggaagttcctcttggaaaagatatagcaaccatcggggaatgaccttttcatttcagaagtggatgaggaaggtggtgtgagcatcaggtatattctggaccatttcaagtgctggtgagaagaaaggaactctttgcctgaactgggcttggttttccaagtgctgctttggaaatgaagacccagagatgcagagcttatggtagttcataaatcttcatgttctattatctttcatctgccaataaagttcattttcaataatgtccaccattgctgtgcccagaataaccacaggcaaacatcaaaacaatacgcataagttagacaagattaaatcttgtctgatatctgcacaaacagatatgcaccatgttggaaacatgtgttttcctagtcccatccaggcttcccacaagaaagccatgatgtgggtctaaaccatatgttttgagtaaaggagaatagaagaaggggagtgtccgcaaaatggaaagagatgaagatgttccaaggaagtatgctgaaacagaacagtgaatgttttgcccaaaactacaaaaataaaagaaaaaaagaaaattgcaatacatggctactaagtctttgatcataagtcgaatttatagacctggaatttgccatcctagtctttcctttttagtaagacttctgtcctctggcagtgcatatggtaggtctctaatgtttcttcatctccaggaagatgcagatccttatttttgctgggaaatccttctaaatagaaatgtaacatttttataaaaacagattaatgtgtttttcacttagtaaatgttttcaagagctgaattgagaaggaaagagactggagtggttaatggtgatttgatttctggcattctgagttttctgctacaattagctgcattacttggtgccaaagagcagtggggaattgttgagttgctgtatcctttaaaaaaaaacaaaaaacttgttattttgaaagaacttaaggctcacaagatgttacaaaaatagtagagtggccttaccctagatccagttttccccatttataacatttcacttagtccattttcggaaccagaaaattaacattggcataatgctattaactaaactacagaccttttttcaatttcgccagtttttccacacatattcatttagttgctggatacttttaattcttgctgatttgtaaactggccttgcttggatacaacaggaaagatactatctggataaagttctacagttttagagagactattaacacattaatgtgttcctttgtcatgagcaataccctgcctacactgcttctaaattttctgatttgtttggctgtttggcatctgaaacaatccaagacaaacttagaaagattaggcaacacaaaacacagtaagacctgttcatagcttgttgtctagaaaaccaggtagcaggatattctagatgcttcctgctgcttctacgtgagtaggattagcactggggacaaaataaggagtttagagtaaaccagtatttcagtcaagagttagttggcacttagttaatggcactggaaatagcttgtggagagaatagaatacaatggtatagactcctaatgtttgataaaatactattttcagagtggtagagaggttttatttgcctaaatagccgttattaaatggaataacaaccacattagaccaaattaattgcaaacacagcggcaacctggggagaagttgaaactccagttttgtggattacagttttgagttttatgattgacatttttaagtcccctatttaaggggtcaagattataacaatgtgtgtcttactaagtttctaggtcattgtgagcacttgataaatatttgctgaatgttgtttttttgaatgaacataagatagaaacaaaaacttctcatccagttaactagagtgaatgtagggagaattgttttgcttgtaacatggagagtttattttcaagtgaggaaagagaaaaaaattactcagacttgttcctggtgaagtgcattctctgtttgtatactttttgatggagaaattgatctatagaactgcttaattttttgaggcatttagacagcaatgaaaggtagttctccacaggacaccgaatcaaaaggagagaccagactctggcctcatacccagcctatttgaaacaagctatctagtttctcctgcagacaccttgtcaacaacatgcaacagtgtcaggtgccttgcaggaaaataatctgagtcccaagctagcctgtgctcatccacaatcacaatgaacatgtcaaggaagaatttgcagagactcaagggaagcacaatgggataaggtaatcactttcagtgaaaaactgttttcttgaaaacaggcttggacacaattgaaagctggcttcctgcaaacacaccaagagtctgtaatctagcctatccattatatgtcctttattattcatgatatcctattcttctaccttgttgcctggtaactttttctgaggactgagtttctgcagcgatgtggtgcactcttcctgtgatgaggaaacatctgggcccccttctgcaggctttggaagatgatgtgtcttgtcaaggggtaaagggcaaatggatttaatttctgcttaaaactatcatagacgttccaaatagaatatgtaaaatttctctgtattagaaaaagaaacgtgataccaattgtatattttcttttctttatttattctctgtaagtctgtcagatgataaattgtaaataacaatgattaaagagtcatgctactgatggatctccctttctgt

SEQ ID NO: 3080 - protein, 48 aa, Homo sapiens
MILIPRMLLVLFLLLPILSSAKAQVNPGNMAITQTCLTVCISLSCQSE

SEQ ID NO: 3081 - DNA, 6233 bp, Homo sapiens
tccgcgtgtgtgccccaactgtcctggaagcttcaattggaaaactccaaactttaagttttgcttatagcttcagctcaacctccatcaagggagacctgcaagttgcctggggttcagtgctctagaaagttccaaggtttgtggcttgaattattctaaagaagctgaaataattgaagagaagcagaggccagctgtttttgaggatcctgctccacagagaatgctctgcacccgttgatactccagttccaacaccatcttctgagatgatcctgattcccagaatgctcttggtgctgttcctgctgctgcctatcttgagttctgcaaaagctcaggttaatccaggtaacatggctattactcagacatgtctcactgtttgtatttctctctcctgtcaaagtgaatgatatattcttgaaaacccccaatttcttgaaatgggtgttctgttcattcatgggcaggggtcaggattgaagttcatatatgaaacaactggggatgtagataggaaagaatgtctgctgcaagagtgtatgaagggggattgtcatttacaaaaaaaaagtacctcatggatggaaggattcatgaatagataatggacataggaaaggaggtcaatggaggacacataacagacatgctatccaccatttatttgtgattttgtaagagggttctcttctttgtcttgttcagatattttcatgtgtgtgttttagtgagaatctgagtttttaatcagtaaagtctgatgttttgatatcttgatgttttgatggtagactcttgagttcatcttgtccaaatcttctagcattttcaaggatgaagcctctgtgggatctttgggcttggggctgaatttctcaggcataaatacctaatggccttgtctaagagggaatagatctgttctgagtgtccccaaaaaagttgtcctaggaactgatgtggagaagttacagggagactgatttccattccttattggggaaaacgaagcactcagaacatacaaggataaatgggctgccaccagaggtgaggagtctcttgtcactggagaggttaagatagaggctcaagaacaatgcaaggaaaatggaggttttcaaacacaaagtggatggtggtatgagacaatgtttaatgtccttctaactccgagagtccttgattctggagaggcacaggatgaacatctgttgctactgctgagtatacacactcttgcctctgagatggcgtgaccagcagaaaagaaagctcagggctgtggcttcagaattcatggaaacagagccactgtcaagaaggaatctgctcagagcagattctgagttttcacactccacaaatcctcagatttagtgggaagctggaaaaaggaactcttaattccaattgaggagaaacaagaaaacattacaaatcagtttcccaagctgagaaggattagccttgaccccttgggtctgcctctgttgccctcaccagtttaccttctacaacagtttctcaggaacatgtgtatttccccattcagctttcagcattgctccacgccacagcataagcatagatcccaagtccacaggctccattttgcaggtcatcttctgatcctagcaaatgtcctttccccatagttgtcctatgcctttgggctttagtctatcccaggactaactgtggagaaatcattggtttgagagtcaagagagcattggtttgggagctttaatcctctttctgcttcacactaagtgtgtcatcttggctaaatcacttggtctttctgcattttgttttcttatttataggatgaggaaattagattaaatggttttgaggtcctttcttgttctgatatgtccagtactcactggaaaattggatctataactgatgggtttagtaatctggtcatttcttgctctgaaaattgtagtcagcaaaagagatcatggaagaaatcactgtaatggtagtaatagtaacacatgccatttgtattgtgccttaggtttaccaggtgtttccaaatacattagcatatttgatatgtgcaggactagataccttgggacctgccacactccactttcaagatatgtattagcttcattagaattaaagggacttgaactcaggacctgcagcctattcttctttatccacatgtctctggtagggctacatccagatcacaccatgacttcttatagagcaagagaaaataatattattatatcttcctttgcctaaaatctctccacttattcttttttatgattctgcaccagttcactgggttattctatgattccatattttttttaaaaaaaatcatatttaaaatgaacttacaatgtctgaattttcctggccttgagtcacagaagtaatatgtttcagatggctgcccaatatgtattatcatgtaatacatatctgtgtccttttctgggatgaggaaggcttcaacttctggcactgagaactttgtattacagacacaggtttagtttctagcttagtcatgcctttagagtttagtagcacaaatccatgcaacccaacagaatacatggtgagggcctagtatgtagaatttgaaagtagttcaaatttgaattagaagaatgaagctaggacttatttggaaaaggagatagaaaaaaaatgatcagaaactgtggggccttattacctttgcagtaagttatcttcttcatgatatatgtgaattattttatgtgcagattgtgttttgggattgtcagatctaaacttatattcttgctggctaatgtgctgatagccaggtctgaaacttgatgtgctatccagacacatatgatcagaaaagatctagagtgcaaagaggtgcctgaggagcaaaatgtggttttaatgttgtggaaagatcacttgcaagtatataagactgtataaagaagaggactgtgtgcaagtggggtgaaaaaaaaggatacgtgaatgtgcatatgactgaatagggaggaaggtcagggctagaaaggaggctacataaaaaggggcaatggagaatgcacaggaaagacacaggggaaggtcaagtcgagcaaggtagaaacaggagtagctagagccattgggaatccattttgaaacaagaaggagttttgaaagggaataggaaagtaagtgtcttgaagtaaaagataaatatggatggagaaagaagaaattctggatgatagagatgataaaaatatttattaagaaatgaagtcaggttcagtgtatgaaatggaaaggaatttttcagaattttaagaaaggggaagttcctcttggaaaagatatagcaaccatcggggaatgaccttttcatttcagaagtggatgaggaaggtggtgtgagcatcaggtatattctggaccatttcaagtgctggtgagaagaaaggaactctttgcctgaactgggcttggttttccaagtgctgctttggaaatgaagacccagagatgcagagcttatggtagttcataaatcttcatgttctattatctttcatctgccaataaagttcattttcaataatgtccaccattgctgtgcccagaataaccacaggcaaacatcaaaacaatacgcataagttagacaagattaaatcttgtctgatatctgcacaaacagatatgcaccatgttggaaacatgtgttttcctagtcccatccaggcttcccacaagaaagccatgatgtgggtctaaaccatatgttttgagtaaaggagaatagaagaaggggagtgtccgcaaaatggaaagagatgaagatgttccaaggaagtatgctgaaacagaacagtgaatgttttgcccaaaactacaaaaataaaagaaaaaaagaaaattgcaatacatggctactaagtctttgatcataagtcgaatttatagacctggaatttgccatcctagtctttcctttttagtaagacttctgtcctctggcagtgcatatggtaggtctctaatgtttcttcatctccaggaagatgcagatccttatttttgctgggaaatccttctaaatagaaatgtaacatttttataaaaacagattaatgtgtttttcacttagtaaatgttttcaagagctgaattgagaaggaaagagactggagtggttaatggtgatttgatttctggcattctgagttttctgctacaattagctgcattacttggtgccaaagagcagtggggaattgttgagttgctgtatcctttaaaaaaaaacaaaaaacttgttattttgaaagaacttaaggctcacaagatgttacaaaaatagtagagtggccttaccctagatccagttttccccatttataacatttcacttagtccattttcggaaccagaaaattaacattggcataatgctattaactaaactacagaccttttttcaatttcgccagtttttccacacatattcatttagttgctggatacttttaattcttgctgatttgtaaactggccttgcttggatacaacaggaaagatactatctggataaagttctacagttttagagagactattaacacattaatgtgttcctttgtcatgagcaataccctgcctacactgcttctaaattttctgatttgtttggctgtttggcatctgaaacaatccaagacaaacttagaaagattaggcaacacaaaacacagtaagacctgttcatagcttgttgtctagaaaaccaggtagcaggatattctagatgcttcctgctgcttctacgtgagtaggattagcactggggacaaaataaggagtttagagtaaaccagtatttcagtcaagagttagttggcacttagttaatggcactggaaatagcttgtggagagaatagaatacaatggtatagactcctaatgtttgataaaatactattttcagagtggtagagaggttttatttgcctaaatagccgttattaaatggaataacaaccacattagaccaaattaattgcaaacacagcggcaacctggggagaagttgaaactccagttttgtggattacagttttgagttttatgattgacatttttaagtcccctatttaaggggtcaagattataacaatgtgtgtcttactaagtttctaggtcattgtgagcacttgataaatatttgctgaatgttgtttttttgaatgaacataagatagaaacaaaaacttctcatccagttaactagagtgaatgtagggagaattgttttgcttgtaacatggagagtttattttcaagtgaggaaagagaaaaaaattactcagacttgttcctggtgaagtgcattctctgtttgtatactttttgatggagaaattgatctatagaactgcttaattttttgaggcatttagacagcaatgaaaggtagttctccacaggacaccgaatcaaaaggagagaccagactctggcctcatacccagcctatttgaaacaagctatctagtttctcctgcagacaccttgtcaacaacatgcaacagtgtcaggtgccttgcaggaaaataatctgagtcccaagctagcctgtgctcatccacaatcacaatgaacatgtcaaggaagaatttgcagagactcaagggaagcacaatgggataaggtaatcactttcagtgaaaaactgttttcttgaaaacaggcttggacacaattgaaagctggcttcctgcaaacacaccaagagtctgtaatctagcctatccattatatgtcctttattattcatgatatcctattcttctaccttgttgcctggtaactttttctgaggactgagtttctgcagcgatgtggtgcactcttcctgtgatgaggaaacatctgggcccccttctgcaggctttggaagatgatgtgtcttgtcaaggggtaaagggcaaatggatttaatttctgcttaaaactatcatagacgttccaaatagaatatgtaaaatttctctgtattagaaaaagaaacgtgataccaattgtatattttcttttctttatttattctctgtaagtctgtcagatgataaattgtaaataacaatgattaaagagtcatgctactgatggatctccctttctgtataaacagtgccagttctgggctttgtaaccttt

SEQ ID NO: 3082 - protein, 48 aa, Homo sapiens; identical to SEQ ID NO: 3080

SEQ ID NO: 3083 - DNA, 7007 bp, Homo sapiens
tccgcgtgtgtgccccaactgtcctggaagcttcaattggaaaactccaaactttaagttttgcttatagcttcagctcaacctccatcaagggagacctgcaagttgcctggggttcagtgctctagaaagttccaaggtttgtggcttgaattattctaaagaagctgaaataattgaagagaagcagaggccagctgtttttgaggatcctgctccacagagaatgctctgcacccgttgatactccagttccaacaccatcttctgagatgatcctgattcccagaatgctcttggtgctgttcctgctgctgcctatcttgagttctgcaaaagctcaggttaatccaggtaacatggctattactcagacatgtctcactgtttgtatttctctctcctgtcaaagtgaatgatatattcttgaaaacccccaatttcttgaaatgggtgttctgttcattcatgggcaggggtcaggattgaagttcatatatgaaacaactggggatgtagataggaaagaatgtctgctgcaagagtgtatgaagggggattgtcatttacaaaaaaaaagtacctcatggatggaaggattcatgaatagataatggacataggaaaggaggtcaatggaggacacataacagacatgctatccaccatttatttgtgattttgtaagagggttctcttctttgtcttgttcagatattttcatgtgtgtgttttagtgagaatctgagtttttaatcagtaaagtctgatgttttgatatcttgatgttttgatggtagactcttgagttcatcttgtccaaatcttctagcattttcaaggatgaagcctctgtgggatctttgggcttggggctgaatttctcaggcataaatacctaatggccttgtctaagagggaatagatctgttctgagtgtccccaaaaaagttgtcctaggaactgatgtggagaagttacagggagactgatttccattccttattggggaaaacgaagcactcagaacatacaaggataaatgggctgccaccagaggtgaggagtctcttgtcactggagaggttaagatagaggctcaagaacaatgcaaggaaaatggaggttttcaaacacaaagtggatggtggtatgagacaatgtttaatgtccttctaactccgagagtccttgattctggagaggcacaggatgaacatctgttgctactgctgagtatacacactcttgcctctgagatggcgtgaccagcagaaaagaaagctcagggctgtggcttcagaattcatggaaacagagccactgtcaagaaggaatctgctcagagcagattctgagttttcacactccacaaatcctcagatttagtgggaagctggaaaaaggaactcttaattccaattgaggagaaacaagaaaacattacaaatcagtttcccaagctgagaaggattagccttgaccccttgggtctgcctctgttgccctcaccagtttaccttctacaacagtttctcaggaacatgtgtatttccccattcagctttcagcattgctccacgccacagcataagcatagatcccaagtccacaggctccattttgcaggtcatcttctgatcctagcaaatgtcctttccccatagttgtcctatgcctttgggctttagtctatcccaggactaactgtggagaaatcattggtttgagagtcaagagagcattggtttgggagctttaatcctctttctgcttcacactaagtgtgtcatcttggctaaatcacttggtctttctgcattttgttttcttatttataggatgaggaaattagattaaatggttttgaggtcctttcttgttctgatatgtccagtactcactggaaaattggatctataactgatgggtttagtaatctggtcatttcttgctctgaaaattgtagtcagcaaaagagatcatggaagaaatcactgtaatggtagtaatagtaacacatgccatttgtattgtgccttaggtttaccaggtgtttccaaatacattagcatatttgatatgtgcaggactagataccttgggacctgccacactccactttcaagatatgtattagcttcattagaattaaagggacttgaactcaggacctgcagcctattcttctttatccacatgtctctggtagggctacatccagatcacaccatgacttcttatagagcaagagaaaataatattattatatcttcctttgcctaaaatctctccacttattcttttttatgattctgcaccagttcactgggttattctatgattccatattttttttaaaaaaaatcatatttaaaatgaacttacaatgtctgaattttcctggccttgagtcacagaagtaatatgtttcagatggctgcccaatatgtattatcatgtaatacatatctgtgtccttttctgggatgaggaaggcttcaacttctggcactgagaactttgtattacagacacaggtttagtttctagcttagtcatgcctttagagtttagtagcacaaatccatgcaacccaacagaatacatggtgagggcctagtatgtagaatttgaaagtagttcaaatttgaattagaagaatgaagctaggacttatttggaaaaggagatagaaaaaaaatgatcagaaactgtggggccttattacctttgcagtaagttatcttcttcatgatatatgtgaattattttatgtgcagattgtgttttgggattgtcagatctaaacttatattcttgctggctaatgtgctgatagccaggtctgaaacttgatgtgctatccagacacatatgatcagaaaagatctagagtgcaaagaggtgcctgaggagcaaaatgtggttttaatgttgtggaaagatcacttgcaagtatataagactgtataaagaagaggactgtgtgcaagtggggtgaaaaaaaaggatacgtgaatgtgcatatgactgaatagggaggaaggtcagggctagaaaggaggctacataaaaaggggcaatggagaatgcacaggaaagacacaggggaaggtcaagtcgagcaaggtagaaacaggagtagctagagccattgggaatccattttgaaacaagaaggagttttgaaagggaataggaaagtaagtgtcttgaagtaaaagataaatatggatggagaaagaagaaattctggatgatagagatgataaaaatatttattaagaaatgaagtcaggttcagtgtatgaaatggaaaggaatttttcagaattttaagaaaggggaagttcctcttggaaaagatatagcaaccatcggggaatgaccttttcatttcagaagtggatgaggaaggtggtgtgagcatcaggtatattctggaccatttcaagtgctggtgagaagaaaggaactctttgcctgaactgggcttggttttccaagtgctgctttggaaatgaagacccagagatgcagagcttatggtagttcataaatcttcatgttctattatctttcatctgccaataaagttcattttcaataatgtccaccattgctgtgcccagaataaccacaggcaaacatcaaaacaatacgcataagttagacaagattaaatcttgtctgatatctgcacaaacagatatgcaccatgttggaaacatgtgttttcctagtcccatccaggcttcccacaagaaagccatgatgtgggtctaaaccatatgttttgagtaaaggagaatagaagaaggggagtgtccgcaaaatggaaagagatgaagatgttccaaggaagtatgctgaaacagaacagtgaatgttttgcccaaaactacaaaaataaaagaaaaaaagaaaattgcaatacatggctactaagtctttgatcataagtcgaatttatagacctggaatttgccatcctagtctttcctttttagtaagacttctgtcctctggcagtgcatatggtaggtctctaatgtttcttcatctccaggaagatgcagatccttatttttgctgggaaatccttctaaatagaaatgtaacatttttataaaaacagattaatgtgtttttcacttagtaaatgttttcaagagctgaattgagaaggaaagagactggagtggttaatggtgatttgatttctggcattctgagttttctgctacaattagctgcattacttggtgccaaagagcagtggggaattgttgagttgctgtatcctttaaaaaaaaacaaaaaacttgttattttgaaagaacttaaggctcacaagatgttacaaaaatagtagagtggccttaccctagatccagttttccccatttataacatttcacttagtccattttcggaaccagaaaattaacattggcataatgctattaactaaactacagaccttttttcaatttcgccagtttttccacacatattcatttagttgctggatacttttaattcttgctgatttgtaaactggccttgcttggatacaacaggaaagatactatctggataaagttctacagttttagagagactattaacacattaatgtgttcctttgtcatgagcaataccctgcctacactgcttctaaattttctgatttgtttggctgtttggcatctgaaacaatccaagacaaacttagaaagattaggcaacacaaaacacagtaagacctgttcatagcttgttgtctagaaaaccaggtagcaggatattctagatgcttcctgctgcttctacgtgagtaggattagcactggggacaaaataaggagtttagagtaaaccagtatttcagtcaagagttagttggcacttagttaatggcactggaaatagcttgtggagagaatagaatacaatggtatagactcctaatgtttgataaaatactattttcagagtggtagagaggttttatttgcctaaatagccgttattaaatggaataacaaccacattagaccaaattaattgcaaacacagcggcaacctggggagaagttgaaactccagttttgtggattacagttttgagttttatgattgacatttttaagtcccctatttaaggggtcaagattataacaatgtgtgtcttactaagtttctaggtcattgtgagcacttgataaatatttgctgaatgttgtttttttgaatgaacataagatagaaacaaaaacttctcatccagttaactagagtgaatgtagggagaattgttttgcttgtaacatggagagtttattttcaagtgaggaaagagaaaaaaattactcagacttgttcctggtgaagtgcattctctgtttgtatactttttgatggagaaattgatctatagaactgcttaattttttgaggcatttagacagcaatgaaaggtagttctccacaggacaccgaatcaaaaggagagaccagactctggcctcatacccagcctatttgaaacaagctatctagtttctcctgcagacaccttgtcaacaacatgcaacagtgtcaggtgccttgcaggaaaataatctgagtcccaagctagcctgtgctcatccacaatcacaatgaacatgtcaaggaagaatttgcagagactcaagggaagcacaatgggataaggtaatcactttcagtgaaaaactgttttcttgaaaacaggcttggacacaattgaaagctggcttcctgcaaacacaccaagagtctgtaatctagcctatccattatatgtcctttattattcatgatatcctattcttctaccttgttgcctggtaactttttctgaggactgagtttctgcagcgatgtggtgcactcttcctgtgatgaggaaacatctgggcccccttctgcaggctttggaagatgatgtgtcttgtcaaggggtaaagggcaaatggatttaatttctgcttaaaactatcatagacgttccaaatagaatatgtaaaatttctctgtattagaaaaagaaacgtgataccaattgtatattttcttttctttatttattctctgtaagtctgtcagatgataaattgtaaataacaatgattaaagagtcatgctactgatggatctccctttctgtataaacagtgccagttctgggctttgtaacctttgctctttatagtctttcattcctggggaagtgatggggcatgggcccagagctggggtgtatgtggtatggacacctgtttgtggggctttccagcaaaggattatttaaatagacctctaacatatgagttgactgtttattgggaagaaagcatcttggtctctgacatatccaaacatacgagacactgggattttacgtcctcacattaattagtccagttctggggaatccagtctagaattaactggtgatcccttatcgttatggttacagacttgtcttgtttgatacacagaaatcctttttaaatccaaatatagtctgtctcagactacctgcacatgcacaaaccaaaaaaaactatgaaaaccagaatttagactcagtcattatactagagattagaatgaaacgaccccaaacaacccatttcttacctggtctctgagaataagtttatacttttagttttctgagaatatttctcagaatatgtgagttttctgagcacatttttcagcatggggtatggtagataaatcacagggccaaggtttggcagggatagatgggatcattgtgtaccctattgttcttctgatttccaggagaacagaatgagcccatgcaaaacataaacttatgatgattaaaaaaaacacacctatccattcactcatcaataaaaacatattatgatggttatcaagctgtgtcctatgagtgataaaatatttgtaaaatataaaattaaatggcatctattttg

SEQ ID NO: 3084 - protein, 48 aa, Homo sapiens; identical to SEQ ID NO: 3080

SEQ ID NO: 3085 - DNA, 3184 bp, Homo sapiens
gggatccctggcgctttcccaggaatcctcagaatgtgaggtttctctcaaaggcatcttgcatcagcctgtggatgtatgcctaccaccgggctccttcaccagcaaagtggaaaaagaagcgtttcacaacaaattcttctttttgggttggggaaacgcagtggattatagctctgttttcttctttccaaaactgtgcacccctggatgaaacctccatcaagggagacctgcaagttgcctggggttcagtgctctagaaagttccaaggtttgtggcttgaattattctaaagaagctgaaataattgaagagaagcagaggccagctgtttttgaggatcctgctccacagagaatgctctgcacccgttgatactccagttccaacaccatcttctgagatgatcctgattcccagaatgctcttggtgctgttcctgctgctgcctatcttgagttctgcaaaagctcaggttaatccagctatatgccgctatcctctgggcatgtcaggaggccagattccagatgaggacatcacagcttccagtcagtggtcagagtccacagctgccaaatatggaaggctggactcagaagaaggggatggagcctggtgccctgagattccagtggaacctgatgacctgaaggagtttctgcagattgacttgcacaccctccattttatcactctggtggggacccaggggcgccatgcaggaggtcatggcatcgagtttgcccccatgtacaagatcaattacagtcgggatggcactcgctggatctcttggcggaaccgtcatgggaaacaggtgctggatggaaatagtaacccctatgacattttcctaaaggacttggagccgcccattgtagccagatttgtccggttcattccagtcaccgaccactccatgaatgtgtgtatgagagtggagctttacggctgtgtctggctagatggcttggtgtcttacaatgctccagctgggcagcagtttgtactccctggaggttccatcatttatctgaatgattctgtctatgatggagctgttggatacagcatgacagaagggctaggccaattgaccgatggtgtgtctggcctggacgatttcacccagacccatgaataccacgtgtggcccggctatgactatgtgggctggcggaacgagagtgccaccaatggctacattgagatcatgtttgaatttgaccgcatcaggaatttcactaccatgaaggtccactgcaacaacatgtttgctaaaggtgtgaagatctttaaggaggtacagtgctacttccgctctgaagccagtgagtgggaacctaatgccatttccttcccccttgtcctggatgacgtcaaccccagtgctcggtttgtcacggtgcctctccaccaccgaatggccagtgccatcaagtgtcaataccattttgcagatacctggatgatgttcagtgagatcaccttccaatcagatgctgcaatgtacaacaactctgaagccctgcccacctctcctatggcacccacaacctatgatccaatgcttaaagttgatgacagcaacactcggatcctgattggctgcttggtggccatcatctttatcctcctggccatcattgtcatcatcctctggaggcagttctggcagaaaatgctggagaaggcttctcggaggatgctggatgatgaaatgacagtcagcctttccctgccaagtgattctagcatgttcaacaataaccgctcctcatcacctagtgaacaagggtccaactcgacttacgatcgcatctttccccttcgccctgactaccaggagccatccaggctgatacgaaaactcccagaatttgctccaggggaggaggagtcaggctgcagcggtgttgtgaagccagtccagcccagtggccctgagggggtgccccactatgcagaggctgacatagtgaacctccaaggagtgacaggaggcaacacatactcagtgcctgccgtcaccatggacctgctctcaggaaaagatgtggctgtggaggagttccccaggaaactcctaactttcaaagagaagctgggagaaggacagtttggggaggttcatctctgtgaagtggagggaatggaaaaattcaaagacaaagattttgccctagatgtcagtgccaaccagcctgtcctggtggctgtgaaaatgctccgagcagatgccaacaagaatgccaggaatgattttcttaaggagataaagatcatgtctcggctcaaggacccaaacatcatccatctattagctgtgtgtatcactgatgaccctctctgtatgatcactgaatacatggagaatggagatctcaatcagtttctttcccgccacgagccccctaattcttcctccagcgatgtacgcactgtcagttacaccaatctgaagtttatggctacccaaattgcctctggcatgaagtacctttcctctcttaattttgttcaccgagatctggccacacgaaactgtttagtgggtaagaactacacaatcaagatagctgactttggaatgagcaggaacctgtacagtggtgactattaccggatccagggccgggcagtgctccctatccgctggatgtcttgggagagtatcttgctgggcaagttcactacagcaagtgatgtgtgggcctttggggttactttgtgggagactttcaccttttgtcaagaacagccctattcccagctgtcagatgaacaggttattgagaatactggagagttcttccgagaccaagggaggcagacttacctccctcaaccagccatttgtcctgactctgtgtataagctgatgctcagctgctggagaagagatacgaagaaccgtccctcattccaagaaatccaccttctgctccttcaacaaggcgacgagtgatgctgtcagtgcctggccatgttcctacggctcaggtcctccctacaagacctaccactcacccatgcctatgccactccatctggacatttaatgaaactgagagacagaggcttgtttgctttgccctcttttcctggtcacccccactccctacccctgactcatatacacttttttttttttttacattaaagaactaaaaaagg

SEQ ID NO: 3086 - protein, 855 aa, Homo sapiens; identical to SEQ ID NO: 180

SEQ ID NO: 3087 - DNA, 9319 bp, Homo sapiens
gggatccctggcgctttcccaggaatcctcagaatgtgaggtttctctcaaaggcatcttgcatcagcctgtggatgtatgcctaccaccgggctccttcaccagcaaagtggaaaaagaagcgtttcacaacaaattcttctttttgggttggggaaacgcagtggattatagctctgttttcttctttccaaaactgtgcacccctggatgaaacctccatcaagggagacctgcaagttgcctggggttcagtgctctagaaagttccaaggtttgtggcttgaattattctaaagaagctgaaataattgaagagaagcagaggccagctgtttttgaggatcctgctccacagagaatgctctgcacccgttgatactccagttccaacaccatcttctgagatgatcctgattcccagaatgctcttggtgctgttcctgctgctgcctatcttgagttctgcaaaagctcaggttaatccagctatatgccgctatcctctgggcatgtcaggaggccagattccagatgaggacatcacagcttccagtcagtggtcagagtccacagctgccaaatatggaaggctggactcagaagaaggggatggagcctggtgccctgagattccagtggaacctgatgacctgaaggagtttctgcagattgacttgcacaccctccattttatcactctggtggggacccaggggcgccatgcaggaggtcatggcatcgagtttgcccccatgtacaagatcaattacagtcgggatggcactcgctggatctcttggcggaaccgtcatgggaaacaggtgctggatggaaatagtaacccctatgacattttcctaaaggacttggagccgcccattgtagccagatttgtccggttcattccagtcaccgaccactccatgaatgtgtgtatgagagtggagctttacggctgtgtctggctagatggcttggtgtcttacaatgctccagctgggcagcagtttgtactccctggaggttccatcatttatctgaatgattctgtctatgatggagctgttggatacagcatgacagaagggctaggccaattgaccgatggtgtgtctggcctggacgatttcacccagacccatgaataccacgtgtggcccggctatgactatgtgggctggcggaacgagagtgccaccaatggctacattgagatcatgtttgaatttgaccgcatcaggaatttcactaccatgaaggtccactgcaacaacatgtttgctaaaggtgtgaagatctttaaggaggtacagtgctacttccgctctgaagccagtgagtgggaacctaatgccatttccttcccccttgtcctggatgacgtcaaccccagtgctcggtttgtcacggtgcctctccaccaccgaatggccagtgccatcaagtgtcaataccattttgcagatacctggatgatgttcagtgagatcaccttccaatcagatgctgcaatgtacaacaactctgaagccctgcccacctctcctatggcacccacaacctatgatccaatgcttaaagttgatgacagcaacactcggatcctgattggctgcttggtggccatcatctttatcctcctggccatcattgtcatcatcctctggaggcagttctggcagaaaatgctggagaaggcttctcggaggatgctggatgatgaaatgacagtcagcctttccctgccaagtgattctagcatgttcaacaataaccgctcctcatcacctagtgaacaagggtccaactcgacttacgatcgcatctttccccttcgccctgactaccaggagccatccaggctgatacgaaaactcccagaatttgctccaggggaggaggagtcaggctgcagcggtgttgtgaagccagtccagcccagtggccctgagggggtgccccactatgcagaggctgacatagtgaacctccaaggagtgacaggaggcaacacatactcagtgcctgccgtcaccatggacctgctctcaggaaaagatgtggctgtggaggagttccccaggaaactcctaactttcaaagagaagctgggagaaggacagtttggggaggttcatctctgtgaagtggagggaatggaaaaattcaaagacaaagattttgccctagatgtcagtgccaaccagcctgtcctggtggctgtgaaaatgctccgagcagatgccaacaagaatgccaggaatgattttcttaaggagataaagatcatgtctcggctcaaggacccaaacatcatccatctattagctgtgtgtatcactgatgaccctctctgtatgatcactgaatacatggagaatggagatctcaatcagtttctttcccgccacgagccccctaattcttcctccagcgatgtacgcactgtcagttacaccaatctgaagtttatggctacccaaattgcctctggcatgaagtacctttcctctcttaattttgttcaccgagatctggccacacgaaactgtttagtgggtaagaactacacaatcaagatagctgactttggaatgagcaggaacctgtacagtggtgactattaccggatccagggccgggcagtgctccctatccgctggatgtcttgggagagtatcttgctgggcaagttcactacagcaagtgatgtgtgggcctttggggttactttgtgggagactttcaccttttgtcaagaacagccctattcccagctgtcagatgaacaggttattgagaatactggagagttcttccgagaccaagggaggcagacttacctccctcaaccagccatttgtcctgactctgtgtataagctgatgctcagctgctggagaagagatacgaagaaccgtccctcattccaagaaatccaccttctgctccttcaacaaggcgacgagtgatgctgtcagtgcctggccatgttcctacggctcaggtcctccctacaagacctaccactcacccatgcctatgccactccatctggacatttaatgaaactgagagacagaggcttgtttgctttgccctcttttcctggtcacccccactccctacccctgactcatatacacttttttttttttttacattaaagaactaaaaaaggaaaaaaaaaagcctagggcagatacaatctagtaaaagaaaatctttgatataccaaagtgttggataacaaaggctagaaaattcagataatttataaaggttaactatacttgtgcttataaatgtgcagattctacaatatttttccatgtcattctaaaagaatcttcagaaagaaaaacttgaagaatactaatgtcttgggaaacatgagattaagtttagggaaaacacttgatagatgtggagaatctgaggactcagaattcagcaactaatcacaggtggttttctaatttggcctctggacatgtctcactgtttgtatttctctctcctgtcaaagtgaatgatatattcttgaaaacccccaatttcttgaaatgggtgttctgttcattcatgggcaggggtcaggattgaagttcatatatgaaacaactggggatgtagataggaaagaatgtctgctgcaagagtgtatgaagggggattgtcatttacaaaaaaaaagtacctcatggatggaaggattcatgaatagataatggacataggaaaggaggtcaatggaggacacataacagacatgctatccaccatttatttgtgattttgtaagagggttctcttctttgtcttgttcagatattttcatgtgtgtgttttagtgagaatctgagtttttaatcagtaaagtctgatgttttgatatcttgatgttttgatggtagactcttgagttcatcttgtccaaatcttctagcattttcaaggatgaagcctctgtgggatctttgggcttggggctgaatttctcaggcataaatacctaatggccttgtctaagagggaatagatctgttctgagtgtccccaaaaaagttgtcctaggaactgatgtggagaagttacagggagactgatttccattccttattggggaaaacgaagcactcagaacatacaaggataaatgggctgccaccagaggtgaggagtctcttgtcactggagaggttaagatagaggctcaagaacaatgcaaggaaaatggaggttttcaaacacaaagtggatggtggtatgagacaatgtttaatgtccttctaactccgagagtccttgattctggagaggcacaggatgaacatctgttgctactgctgagtatacacactcttgcctctgagatggcgtgaccagcagaaaagaaagctcagggctgtggcttcagaattcatggaaacagagccactgtcaagaaggaatctgctcagagcagattctgagttttcacactccacaaatcctcagatttagtgggaagctggaaaaaggaactcttaattccaattgaggagaaacaagaaaacattacaaatcagtttcccaagctgagaaggattagccttgaccccttgggtctgcctctgttgccctcaccagtttaccttctacaacagtttctcaggaacatgtgtatttccccattcagctttcagcattgctccacgccacagcataagcatagatcccaagtccacaggctccattttgcaggtcatcttctgatcctagcaaatgtcctttccccatagttgtcctatgcctttgggctttagtctatcccaggactaactgtggagaaatcattggtttgagagtcaagagagcattggtttgggagctttaatcctctttctgcttcacactaagtgtgtcatcttggctaaatcacttggtctttctgcattttgttttcttatttataggatgaggaaattagattaaatggttttgaggtcctttcttgttctgatatgtccagtactcactggaaaattggatctataactgatgggtttagtaatctggtcatttcttgctctgaaaattgtagtcagcaaaagagatcatggaagaaatcactgtaatggtagtaatagtaacacatgccatttgtattgtgccttaggtttaccaggtgtttccaaatacattagcatatttgatatgtgcaggactagataccttgggacctgccacactccactttcaagatatgtattagcttcattagaattaaagggacttgaactcaggacctgcagcctattcttctttatccacatgtctctggtagggctacatccagatcacaccatgacttcttatagagcaagagaaaataatattattatatcttcctttgcctaaaatctctccacttattcttttttatgattctgcaccagttcactgggttattctatgattccatattttttttaaaaaaaatcatatttaaaatgaacttacaatgtctgaattttcctggccttgagtcacagaagtaatatgtttcagatggctgcccaatatgtattatcatgtaatacatatctgtgtccttttctgggatgaggaaggcttcaacttctggcactgagaactttgtattacagacacaggtttagtttctagcttagtcatgcctttagagtttagtagcacaaatccatgcaacccaacagaatacatggtgagggcctagtatgtagaatttgaaagtagttcaaatttgaattagaagaatgaagctaggacttatttggaaaaggagatagaaaaaaaatgatcagaaactgtggggccttattacctttgcagtaagttatcttcttcatgatatatgtgaattattttatgtgcagattgtgttttgggattgtcagatctaaacttatattcttgctggctaatgtgctgatagccaggtctgaaacttgatgtgctatccagacacatatgatcagaaaagatctagagtgcaaagaggtgcctgaggagcaaaatgtggttttaatgttgtggaaagatcacttgcaagtatataagactgtataaagaagaggactgtgtgcaagtggggtgaaaaaaaaggatacgtgaatgtgcatatgactgaatagggaggaaggtcagggctagaaaggaggctacataaaaaggggcaatggagaatgcacaggaaagacacaggggaaggtcaagtcgagcaaggtagaaacaggagtagctagagccattgggaatccattttgaaacaagaaggagttttgaaagggaataggaaagtaagtgtcttgaagtaaaagataaatatggatggagaaagaagaaattctggatgatagagatgataaaaatatttattaagaaatgaagtcaggttcagtgtatgaaatggaaaggaatttttcagaattttaagaaaggggaagttcctcttggaaaagatatagcaaccatcggggaatgaccttttcatttcagaagtggatgaggaaggtggtgtgagcatcaggtatattctggaccatttcaagtgctggtgagaagaaaggaactctttgcctgaactgggcttggttttccaagtgctgctttggaaatgaagacccagagatgcagagcttatggtagttcataaatcttcatgttctattatctttcatctgccaataaagttcattttcaataatgtccaccattgctgtgcccagaataaccacaggcaaacatcaaaacaatacgcataagttagacaagattaaatcttgtctgatatctgcacaaacagatatgcaccatgttggaaacatgtgttttcctagtcccatccaggcttcccacaagaaagccatgatgtgggtctaaaccatatgttttgagtaaaggagaatagaagaaggggagtgtccgcaaaatggaaagagatgaagatgttccaaggaagtatgctgaaacagaacagtgaatgttttgcccaaaactacaaaaataaaagaaaaaaagaaaattgcaatacatggctactaagtctttgatcataagtcgaatttatagacctggaatttgccatcctagtctttcctttttagtaagacttctgtcctctggcagtgcatatggtaggtctctaatgtttcttcatctccaggaagatgcagatccttatttttgctgggaaatccttctaaatagaaatgtaacatttttataaaaacagattaatgtgtttttcacttagtaaatgttttcaagagctgaattgagaaggaaagagactggagtggttaatggtgatttgatttctggcattctgagttttctgctacaattagctgcattacttggtgccaaagagcagtggggaattgttgagttgctgtatcctttaaaaaaaaacaaaaaacttgttattttgaaagaacttaaggctcacaagatgttacaaaaatagtagagtggccttaccctagatccagttttccccatttataacatttcacttagtccattttcggaaccagaaaattaacattggcataatgctattaactaaactacagaccttttttcaatttcgccagtttttccacacatattcatttagttgctggatacttttaattcttgctgatttgtaaactggccttgcttggatacaacaggaaagatactatctggataaagttctacagttttagagagactattaacacattaatgtgttcctttgtcatgagcaataccctgcctacactgcttctaaattttctgatttgtttggctgtttggcatctgaaacaatccaagacaaacttagaaagattaggcaacacaaaacacagtaagacctgttcatagcttgttgtctagaaaaccaggtagcaggatattctagatgcttcctgctgcttctacgtgagtaggattagcactggggacaaaataaggagtttagagtaaaccagtatttcagtcaagagttagttggcacttagttaatggcactggaaatagcttgtggagagaatagaatacaatggtatagactcctaatgtttgataaaatactattttcagagtggtagagaggttttatttgcctaaatagccgttattaaatggaataacaaccacattagaccaaattaattgcaaacacagcggcaacctggggagaagttgaaactccagttttgtggattacagttttgagttttatgattgacatttttaagtcccctatttaaggggtcaagattataacaatgtgtgtcttactaagtttctaggtcattgtgagcacttgataaatatttgctgaatgttgtttttttgaatgaacataagatagaaacaaaaacttctcatccagttaactagagtgaatgtagggagaattgttttgcttgtaacatggagagtttattttcaagtgaggaaagagaaaaaaattactcagacttgttcctggtgaagtgcattctctgtttgtatactttttgatggagaaattgatctatagaactgcttaattttttgaggcatttagacagcaatgaaaggtagttctccacaggacaccgaatcaaaaggagagaccagactctggcctcatacccagcctatttgaaacaagctatctagtttctcctgcagacaccttgtcaacaacatgcaacagtgtcaggtgccttgcaggaaaataatctgagtcccaagctagcctgtgctcatccacaatcacaatgaacatgtcaaggaagaatttgcagagactcaagggaagcacaatgggataaggtaatcactttcagtgaaaaactgttttcttgaaaacaggcttggacacaattgaaagctggcttcctgcaaacacaccaagagtctgtaatctagcctatccattatatgtcctttattattcatgatatcctattcttctaccttgttgcctggtaactttttctgaggactgagtttctgcagcgatgtggtgcactcttcctgtgatgaggaaacatctgggcccccttctgcaggctttggaagatgatgtgtcttgtcaaggggtaaagggcaaatggatttaatttctgcttaaaactatcatagacgttccaaatagaatatgtaaaatttctctgtattagaaaaagaaacgtgataccaattgtatattttcttttctttatttattctctgtaagtctgtcagatgataaattgtaaataacaatgattaaagagtcatgctactgatggatctccctttctgt

SEQ ID NO: 3088 - protein, 855 aa, Homo sapiens; identical to SEQ ID NO: 180

SEQ ID NO: 3089 - DNA, 9353 bp, Homo sapiens
gggatccctggcgctttcccaggaatcctcagaatgtgaggtttctctcaaaggcatcttgcatcagcctgtggatgtatgcctaccaccgggctccttcaccagcaaagtggaaaaagaagcgtttcacaacaaattcttctttttgggttggggaaacgcagtggattatagctctgttttcttctttccaaaactgtgcacccctggatgaaacctccatcaagggagacctgcaagttgcctggggttcagtgctctagaaagttccaaggtttgtggcttgaattattctaaagaagctgaaataattgaagagaagcagaggccagctgtttttgaggatcctgctccacagagaatgctctgcacccgttgatactccagttccaacaccatcttctgagatgatcctgattcccagaatgctcttggtgctgttcctgctgctgcctatcttgagttctgcaaaagctcaggttaatccagctatatgccgctatcctctgggcatgtcaggaggccagattccagatgaggacatcacagcttccagtcagtggtcagagtccacagctgccaaatatggaaggctggactcagaagaaggggatggagcctggtgccctgagattccagtggaacctgatgacctgaaggagtttctgcagattgacttgcacaccctccattttatcactctggtggggacccaggggcgccatgcaggaggtcatggcatcgagtttgcccccatgtacaagatcaattacagtcgggatggcactcgctggatctcttggcggaaccgtcatgggaaacaggtgctggatggaaatagtaacccctatgacattttcctaaaggacttggagccgcccattgtagccagatttgtccggttcattccagtcaccgaccactccatgaatgtgtgtatgagagtggagctttacggctgtgtctggctagatggcttggtgtcttacaatgctccagctgggcagcagtttgtactccctggaggttccatcatttatctgaatgattctgtctatgatggagctgttggatacagcatgacagaagggctaggccaattgaccgatggtgtgtctggcctggacgatttcacccagacccatgaataccacgtgtggcccggctatgactatgtgggctggcggaacgagagtgccaccaatggctacattgagatcatgtttgaatttgaccgcatcaggaatttcactaccatgaaggtccactgcaacaacatgtttgctaaaggtgtgaagatctttaaggaggtacagtgctacttccgctctgaagccagtgagtgggaacctaatgccatttccttcccccttgtcctggatgacgtcaaccccagtgctcggtttgtcacggtgcctctccaccaccgaatggccagtgccatcaagtgtcaataccattttgcagatacctggatgatgttcagtgagatcaccttccaatcagatgctgcaatgtacaacaactctgaagccctgcccacctctcctatggcacccacaacctatgatccaatgcttaaagttgatgacagcaacactcggatcctgattggctgcttggtggccatcatctttatcctcctggccatcattgtcatcatcctctggaggcagttctggcagaaaatgctggagaaggcttctcggaggatgctggatgatgaaatgacagtcagcctttccctgccaagtgattctagcatgttcaacaataaccgctcctcatcacctagtgaacaagggtccaactcgacttacgatcgcatctttccccttcgccctgactaccaggagccatccaggctgatacgaaaactcccagaatttgctccaggggaggaggagtcaggctgcagcggtgttgtgaagccagtccagcccagtggccctgagggggtgccccactatgcagaggctgacatagtgaacctccaaggagtgacaggaggcaacacatactcagtgcctgccgtcaccatggacctgctctcaggaaaagatgtggctgtggaggagttccccaggaaactcctaactttcaaagagaagctgggagaaggacagtttggggaggttcatctctgtgaagtggagggaatggaaaaattcaaagacaaagattttgccctagatgtcagtgccaaccagcctgtcctggtggctgtgaaaatgctccgagcagatgccaacaagaatgccaggaatgattttcttaaggagataaagatcatgtctcggctcaaggacccaaacatcatccatctattagctgtgtgtatcactgatgaccctctctgtatgatcactgaatacatggagaatggagatctcaatcagtttctttcccgccacgagccccctaattcttcctccagcgatgtacgcactgtcagttacaccaatctgaagtttatggctacccaaattgcctctggcatgaagtacctttcctctcttaattttgttcaccgagatctggccacacgaaactgtttagtgggtaagaactacacaatcaagatagctgactttggaatgagcaggaacctgtacagtggtgactattaccggatccagggccgggcagtgctccctatccgctggatgtcttgggagagtatcttgctgggcaagttcactacagcaagtgatgtgtgggcctttggggttactttgtgggagactttcaccttttgtcaagaacagccctattcccagctgtcagatgaacaggttattgagaatactggagagttcttccgagaccaagggaggcagacttacctccctcaaccagccatttgtcctgactctgtgtataagctgatgctcagctgctggagaagagatacgaagaaccgtccctcattccaagaaatccaccttctgctccttcaacaaggcgacgagtgatgctgtcagtgcctggccatgttcctacggctcaggtcctccctacaagacctaccactcacccatgcctatgccactccatctggacatttaatgaaactgagagacagaggcttgtttgctttgccctcttttcctggtcacccccactccctacccctgactcatatacacttttttttttttttacattaaagaactaaaaaaggaaaaaaaaaagcctagggcagatacaatctagtaaaagaaaatctttgatataccaaagtgttggataacaaaggctagaaaattcagataatttataaaggttaactatacttgtgcttataaatgtgcagattctacaatatttttccatgtcattctaaaagaatcttcagaaagaaaaacttgaagaatactaatgtcttgggaaacatgagattaagtttagggaaaacacttgatagatgtggagaatctgaggactcagaattcagcaactaatcacaggtggttttctaatttggcctctggacatgtctcactgtttgtatttctctctcctgtcaaagtgaatgatatattcttgaaaacccccaatttcttgaaatgggtgttctgttcattcatgggcaggggtcaggattgaagttcatatatgaaacaactggggatgtagataggaaagaatgtctgctgcaagagtgtatgaagggggattgtcatttacaaaaaaaaagtacctcatggatggaaggattcatgaatagataatggacataggaaaggaggtcaatggaggacacataacagacatgctatccaccatttatttgtgattttgtaagagggttctcttctttgtcttgttcagatattttcatgtgtgtgttttagtgagaatctgagtttttaatcagtaaagtctgatgttttgatatcttgatgttttgatggtagactcttgagttcatcttgtccaaatcttctagcattttcaaggatgaagcctctgtgggatctttgggcttggggctgaatttctcaggcataaatacctaatggccttgtctaagagggaatagatctgttctgagtgtccccaaaaaagttgtcctaggaactgatgtggagaagttacagggagactgatttccattccttattggggaaaacgaagcactcagaacatacaaggataaatgggctgccaccagaggtgaggagtctcttgtcactggagaggttaagatagaggctcaagaacaatgcaaggaaaatggaggttttcaaacacaaagtggatggtggtatgagacaatgtttaatgtccttctaactccgagagtccttgattctggagaggcacaggatgaacatctgttgctactgctgagtatacacactcttgcctctgagatggcgtgaccagcagaaaagaaagctcagggctgtggcttcagaattcatggaaacagagccactgtcaagaaggaatctgctcagagcagattctgagttttcacactccacaaatcctcagatttagtgggaagctggaaaaaggaactcttaattccaattgaggagaaacaagaaaacattacaaatcagtttcccaagctgagaaggattagccttgaccccttgggtctgcctctgttgccctcaccagtttaccttctacaacagtttctcaggaacatgtgtatttccccattcagctttcagcattgctccacgccacagcataagcatagatcccaagtccacaggctccattttgcaggtcatcttctgatcctagcaaatgtcctttccccatagttgtcctatgcctttgggctttagtctatcccaggactaactgtggagaaatcattggtttgagagtcaagagagcattggtttgggagctttaatcctctttctgcttcacactaagtgtgtcatcttggctaaatcacttggtctttctgcattttgttttcttatttataggatgaggaaattagattaaatggttttgaggtcctttcttgttctgatatgtccagtactcactggaaaattggatctataactgatgggtttagtaatctggtcatttcttgctctgaaaattgtagtcagcaaaagagatcatggaagaaatcactgtaatggtagtaatagtaacacatgccatttgtattgtgccttaggtttaccaggtgtttccaaatacattagcatatttgatatgtgcaggactagataccttgggacctgccacactccactttcaagatatgtattagcttcattagaattaaagggacttgaactcaggacctgcagcctattcttctttatccacatgtctctggtagggctacatccagatcacaccatgacttcttatagagcaagagaaaataatattattatatcttcctttgcctaaaatctctccacttattcttttttatgattctgcaccagttcactgggttattctatgattccatattttttttaaaaaaaatcatatttaaaatgaacttacaatgtctgaattttcctggccttgagtcacagaagtaatatgtttcagatggctgcccaatatgtattatcatgtaatacatatctgtgtccttttctgggatgaggaaggcttcaacttctggcactgagaactttgtattacagacacaggtttagtttctagcttagtcatgcctttagagtttagtagcacaaatccatgcaacccaacagaatacatggtgagggcctagtatgtagaatttgaaagtagttcaaatttgaattagaagaatgaagctaggacttatttggaaaaggagatagaaaaaaaatgatcagaaactgtggggccttattacctttgcagtaagttatcttcttcatgatatatgtgaattattttatgtgcagattgtgttttgggattgtcagatctaaacttatattcttgctggctaatgtgctgatagccaggtctgaaacttgatgtgctatccagacacatatgatcagaaaagatctagagtgcaaagaggtgcctgaggagcaaaatgtggttttaatgttgtggaaagatcacttgcaagtatataagactgtataaagaagaggactgtgtgcaagtggggtgaaaaaaaaggatacgtgaatgtgcatatgactgaatagggaggaaggtcagggctagaaaggaggctacataaaaaggggcaatggagaatgcacaggaaagacacaggggaaggtcaagtcgagcaaggtagaaacaggagtagctagagccattgggaatccattttgaaacaagaaggagttttgaaagggaataggaaagtaagtgtcttgaagtaaaagataaatatggatggagaaagaagaaattctggatgatagagatgataaaaatatttattaagaaatgaagtcaggttcagtgtatgaaatggaaaggaatttttcagaattttaagaaaggggaagttcctcttggaaaagatatagcaaccatcggggaatgaccttttcatttcagaagtggatgaggaaggtggtgtgagcatcaggtatattctggaccatttcaagtgctggtgagaagaaaggaactctttgcctgaactgggcttggttttccaagtgctgctttggaaatgaagacccagagatgcagagcttatggtagttcataaatcttcatgttctattatctttcatctgccaataaagttcattttcaataatgtccaccattgctgtgcccagaataaccacaggcaaacatcaaaacaatacgcataagttagacaagattaaatcttgtctgatatctgcacaaacagatatgcaccatgttggaaacatgtgttttcctagtcccatccaggcttcccacaagaaagccatgatgtgggtctaaaccatatgttttgagtaaaggagaatagaagaaggggagtgtccgcaaaatggaaagagatgaagatgttccaaggaagtatgctgaaacagaacagtgaatgttttgcccaaaactacaaaaataaaagaaaaaaagaaaattgcaatacatggctactaagtctttgatcataagtcgaatttatagacctggaatttgccatcctagtctttcctttttagtaagacttctgtcctctggcagtgcatatggtaggtctctaatgtttcttcatctccaggaagatgcagatccttatttttgctgggaaatccttctaaatagaaatgtaacatttttataaaaacagattaatgtgtttttcacttagtaaatgttttcaagagctgaattgagaaggaaagagactggagtggttaatggtgatttgatttctggcattctgagttttctgctacaattagctgcattacttggtgccaaagagcagtggggaattgttgagttgctgtatcctttaaaaaaaaacaaaaaacttgttattttgaaagaacttaaggctcacaagatgttacaaaaatagtagagtggccttaccctagatccagttttccccatttataacatttcacttagtccattttcggaaccagaaaattaacattggcataatgctattaactaaactacagaccttttttcaatttcgccagtttttccacacatattcatttagttgctggatacttttaattcttgctgatttgtaaactggccttgcttggatacaacaggaaagatactatctggataaagttctacagttttagagagactattaacacattaatgtgttcctttgtcatgagcaataccctgcctacactgcttctaaattttctgatttgtttggctgtttggcatctgaaacaatccaagacaaacttagaaagattaggcaacacaaaacacagtaagacctgttcatagcttgttgtctagaaaaccaggtagcaggatattctagatgcttcctgctgcttctacgtgagtaggattagcactggggacaaaataaggagtttagagtaaaccagtatttcagtcaagagttagttggcacttagttaatggcactggaaatagcttgtggagagaatagaatacaatggtatagactcctaatgtttgataaaatactattttcagagtggtagagaggttttatttgcctaaatagccgttattaaatggaataacaaccacattagaccaaattaattgcaaacacagcggcaacctggggagaagttgaaactccagttttgtggattacagttttgagttttatgattgacatttttaagtcccctatttaaggggtcaagattataacaatgtgtgtcttactaagtttctaggtcattgtgagcacttgataaatatttgctgaatgttgtttttttgaatgaacataagatagaaacaaaaacttctcatccagttaactagagtgaatgtagggagaattgttttgcttgtaacatggagagtttattttcaagtgaggaaagagaaaaaaattactcagacttgttcctggtgaagtgcattctctgtttgtatactttttgatggagaaattgatctatagaactgcttaattttttgaggcatttagacagcaatgaaaggtagttctccacaggacaccgaatcaaaaggagagaccagactctggcctcatacccagcctatttgaaacaagctatctagtttctcctgcagacaccttgtcaacaacatgcaacagtgtcaggtgccttgcaggaaaataatctgagtcccaagctagcctgtgctcatccacaatcacaatgaacatgtcaaggaagaatttgcagagactcaagggaagcacaatgggataaggtaatcactttcagtgaaaaactgttttcttgaaaacaggcttggacacaattgaaagctggcttcctgcaaacacaccaagagtctgtaatctagcctatccattatatgtcctttattattcatgatatcctattcttctaccttgttgcctggtaactttttctgaggactgagtttctgcagcgatgtggtgcactcttcctgtgatgaggaaacatctgggcccccttctgcaggctttggaagatgatgtgtcttgtcaaggggtaaagggcaaatggatttaatttctgcttaaaactatcatagacgttccaaatagaatatgtaaaatttctctgtattagaaaaagaaacgtgataccaattgtatattttcttttctttatttattctctgtaagtctgtcagatgataaattgtaaataacaatgattaaagagtcatgctactgatggatctccctttctgtataaacagtgccagttctgggctttgtaaccttt

SEQ ID NO: 3090 - protein, 855 aa, Homo sapiens; identical to SEQ ID NO: 180

SEQ ID NO: 3091 - DNA, 10127 bp, Homo sapiens
gggatccctggcgctttcccaggaatcctcagaatgtgaggtttctctcaaaggcatcttgcatcagcctgtggatgtatgcctaccaccgggctccttcaccagcaaagtggaaaaagaagcgtttcacaacaaattcttctttttgggttggggaaacgcagtggattatagctctgttttcttctttccaaaactgtgcacccctggatgaaacctccatcaagggagacctgcaagttgcctggggttcagtgctctagaaagttccaaggtttgtggcttgaattattctaaagaagctgaaataattgaagagaagcagaggccagctgtttttgaggatcctgctccacagagaatgctctgcacccgttgatactccagttccaacaccatcttctgagatgatcctgattcccagaatgctcttggtgctgttcctgctgctgcctatcttgagttctgcaaaagctcaggttaatccagctatatgccgctatcctctgggcatgtcaggaggccagattccagatgaggacatcacagcttccagtcagtggtcagagtccacagctgccaaatatggaaggctggactcagaagaaggggatggagcctggtgccctgagattccagtggaacctgatgacctgaaggagtttctgcagattgacttgcacaccctccattttatcactctggtggggacccaggggcgccatgcaggaggtcatggcatcgagtttgcccccatgtacaagatcaattacagtcgggatggcactcgctggatctcttggcggaaccgtcatgggaaacaggtgctggatggaaatagtaacccctatgacattttcctaaaggacttggagccgcccattgtagccagatttgtccggttcattccagtcaccgaccactccatgaatgtgtgtatgagagtggagctttacggctgtgtctggctagatggcttggtgtcttacaatgctccagctgggcagcagtttgtactccctggaggttccatcatttatctgaatgattctgtctatgatggagctgttggatacagcatgacagaagggctaggccaattgaccgatggtgtgtctggcctggacgatttcacccagacccatgaataccacgtgtggcccggctatgactatgtgggctggcggaacgagagtgccaccaatggctacattgagatcatgtttgaatttgaccgcatcaggaatttcactaccatgaaggtccactgcaacaacatgtttgctaaaggtgtgaagatctttaaggaggtacagtgctacttccgctctgaagccagtgagtgggaacctaatgccatttccttcccccttgtcctggatgacgtcaaccccagtgctcggtttgtcacggtgcctctccaccaccgaatggccagtgccatcaagtgtcaataccattttgcagatacctggatgatgttcagtgagatcaccttccaatcagatgctgcaatgtacaacaactctgaagccctgcccacctctcctatggcacccacaacctatgatccaatgcttaaagttgatgacagcaacactcggatcctgattggctgcttggtggccatcatctttatcctcctggccatcattgtcatcatcctctggaggcagttctggcagaaaatgctggagaaggcttctcggaggatgctggatgatgaaatgacagtcagcctttccctgccaagtgattctagcatgttcaacaataaccgctcctcatcacctagtgaacaagggtccaactcgacttacgatcgcatctttccccttcgccctgactaccaggagccatccaggctgatacgaaaactcccagaatttgctccaggggaggaggagtcaggctgcagcggtgttgtgaagccagtccagcccagtggccctgagggggtgccccactatgcagaggctgacatagtgaacctccaaggagtgacaggaggcaacacatactcagtgcctgccgtcaccatggacctgctctcaggaaaagatgtggctgtggaggagttccccaggaaactcctaactttcaaagagaagctgggagaaggacagtttggggaggttcatctctgtgaagtggagggaatggaaaaattcaaagacaaagattttgccctagatgtcagtgccaaccagcctgtcctggtggctgtgaaaatgctccgagcagatgccaacaagaatgccaggaatgattttcttaaggagataaagatcatgtctcggctcaaggacccaaacatcatccatctattagctgtgtgtatcactgatgaccctctctgtatgatcactgaatacatggagaatggagatctcaatcagtttctttcccgccacgagccccctaattcttcctccagcgatgtacgcactgtcagttacaccaatctgaagtttatggctacccaaattgcctctggcatgaagtacctttcctctcttaattttgttcaccgagatctggccacacgaaactgtttagtgggtaagaactacacaatcaagatagctgactttggaatgagcaggaacctgtacagtggtgactattaccggatccagggccgggcagtgctccctatccgctggatgtcttgggagagtatcttgctgggcaagttcactacagcaagtgatgtgtgggcctttggggttactttgtgggagactttcaccttttgtcaagaacagccctattcccagctgtcagatgaacaggttattgagaatactggagagttcttccgagaccaagggaggcagacttacctccctcaaccagccatttgtcctgactctgtgtataagctgatgctcagctgctggagaagagatacgaagaaccgtccctcattccaagaaatccaccttctgctccttcaacaaggcgacgagtgatgctgtcagtgcctggccatgttcctacggctcaggtcctccctacaagacctaccactcacccatgcctatgccactccatctggacatttaatgaaactgagagacagaggcttgtttgctttgccctcttttcctggtcacccccactccctacccctgactcatatacacttttttttttttttacattaaagaactaaaaaaggaaaaaaaaaagcctagggcagatacaatctagtaaaagaaaatctttgatataccaaagtgttggataacaaaggctagaaaattcagataatttataaaggttaactatacttgtgcttataaatgtgcagattctacaatatttttccatgtcattctaaaagaatcttcagaaagaaaaacttgaagaatactaatgtcttgggaaacatgagattaagtttagggaaaacacttgatagatgtggagaatctgaggactcagaattcagcaactaatcacaggtggttttctaatttggcctctggacatgtctcactgtttgtatttctctctcctgtcaaagtgaatgatatattcttgaaaacccccaatttcttgaaatgggtgttctgttcattcatgggcaggggtcaggattgaagttcatatatgaaacaactggggatgtagataggaaagaatgtctgctgcaagagtgtatgaagggggattgtcatttacaaaaaaaaagtacctcatggatggaaggattcatgaatagataatggacataggaaaggaggtcaatggaggacacataacagacatgctatccaccatttatttgtgattttgtaagagggttctcttctttgtcttgttcagatattttcatgtgtgtgttttagtgagaatctgagtttttaatcagtaaagtctgatgttttgatatcttgatgttttgatggtagactcttgagttcatcttgtccaaatcttctagcattttcaaggatgaagcctctgtgggatctttgggcttggggctgaatttctcaggcataaatacctaatggccttgtctaagagggaatagatctgttctgagtgtccccaaaaaagttgtcctaggaactgatgtggagaagttacagggagactgatttccattccttattggggaaaacgaagcactcagaacatacaaggataaatgggctgccaccagaggtgaggagtctcttgtcactggagaggttaagatagaggctcaagaacaatgcaaggaaaatggaggttttcaaacacaaagtggatggtggtatgagacaatgtttaatgtccttctaactccgagagtccttgattctggagaggcacaggatgaacatctgttgctactgctgagtatacacactcttgcctctgagatggcgtgaccagcagaaaagaaagctcagggctgtggcttcagaattcatggaaacagagccactgtcaagaaggaatctgctcagagcagattctgagttttcacactccacaaatcctcagatttagtgggaagctggaaaaaggaactcttaattccaattgaggagaaacaagaaaacattacaaatcagtttcccaagctgagaaggattagccttgaccccttgggtctgcctctgttgccctcaccagtttaccttctacaacagtttctcaggaacatgtgtatttccccattcagctttcagcattgctccacgccacagcataagcatagatcccaagtccacaggctccattttgcaggtcatcttctgatcctagcaaatgtcctttccccatagttgtcctatgcctttgggctttagtctatcccaggactaactgtggagaaatcattggtttgagagtcaagagagcattggtttgggagctttaatcctctttctgcttcacactaagtgtgtcatcttggctaaatcacttggtctttctgcattttgttttcttatttataggatgaggaaattagattaaatggttttgaggtcctttcttgttctgatatgtccagtactcactggaaaattggatctataactgatgggtttagtaatctggtcatttcttgctctgaaaattgtagtcagcaaaagagatcatggaagaaatcactgtaatggtagtaatagtaacacatgccatttgtattgtgccttaggtttaccaggtgtttccaaatacattagcatatttgatatgtgcaggactagataccttgggacctgccacactccactttcaagatatgtattagcttcattagaattaaagggacttgaactcaggacctgcagcctattcttctttatccacatgtctctggtagggctacatccagatcacaccatgacttcttatagagcaagagaaaataatattattatatcttcctttgcctaaaatctctccacttattcttttttatgattctgcaccagttcactgggttattctatgattccatattttttttaaaaaaaatcatatttaaaatgaacttacaatgtctgaattttcctggccttgagtcacagaagtaatatgtttcagatggctgcccaatatgtattatcatgtaatacatatctgtgtccttttctgggatgaggaaggcttcaacttctggcactgagaactttgtattacagacacaggtttagtttctagcttagtcatgcctttagagtttagtagcacaaatccatgcaacccaacagaatacatggtgagggcctagtatgtagaatttgaaagtagttcaaatttgaattagaagaatgaagctaggacttatttggaaaaggagatagaaaaaaaatgatcagaaactgtggggccttattacctttgcagtaagttatcttcttcatgatatatgtgaattattttatgtgcagattgtgttttgggattgtcagatctaaacttatattcttgctggctaatgtgctgatagccaggtctgaaacttgatgtgctatccagacacatatgatcagaaaagatctagagtgcaaagaggtgcctgaggagcaaaatgtggttttaatgttgtggaaagatcacttgcaagtatataagactgtataaagaagaggactgtgtgcaagtggggtgaaaaaaaaggatacgtgaatgtgcatatgactgaatagggaggaaggtcagggctagaaaggaggctacataaaaaggggcaatggagaatgcacaggaaagacacaggggaaggtcaagtcgagcaaggtagaaacaggagtagctagagccattgggaatccattttgaaacaagaaggagttttgaaagggaataggaaagtaagtgtcttgaagtaaaagataaatatggatggagaaagaagaaattctggatgatagagatgataaaaatatttattaagaaatgaagtcaggttcagtgtatgaaatggaaaggaatttttcagaattttaagaaaggggaagttcctcttggaaaagatatagcaaccatcggggaatgaccttttcatttcagaagtggatgaggaaggtggtgtgagcatcaggtatattctggaccatttcaagtgctggtgagaagaaaggaactctttgcctgaactgggcttggttttccaagtgctgctttggaaatgaagacccagagatgcagagcttatggtagttcataaatcttcatgttctattatctttcatctgccaataaagttcattttcaataatgtccaccattgctgtgcccagaataaccacaggcaaacatcaaaacaatacgcataagttagacaagattaaatcttgtctgatatctgcacaaacagatatgcaccatgttggaaacatgtgttttcctagtcccatccaggcttcccacaagaaagccatgatgtgggtctaaaccatatgttttgagtaaaggagaatagaagaaggggagtgtccgcaaaatggaaagagatgaagatgttccaaggaagtatgctgaaacagaacagtgaatgttttgcccaaaactacaaaaataaaagaaaaaaagaaaattgcaatacatggctactaagtctttgatcataagtcgaatttatagacctggaatttgccatcctagtctttcctttttagtaagacttctgtcctctggcagtgcatatggtaggtctctaatgtttcttcatctccaggaagatgcagatccttatttttgctgggaaatccttctaaatagaaatgtaacatttttataaaaacagattaatgtgtttttcacttagtaaatgttttcaagagctgaattgagaaggaaagagactggagtggttaatggtgatttgatttctggcattctgagttttctgctacaattagctgcattacttggtgccaaagagcagtggggaattgttgagttgctgtatcctttaaaaaaaaacaaaaaacttgttattttgaaagaacttaaggctcacaagatgttacaaaaatagtagagtggccttaccctagatccagttttccccatttataacatttcacttagtccattttcggaaccagaaaattaacattggcataatgctattaactaaactacagaccttttttcaatttcgccagtttttccacacatattcatttagttgctggatacttttaattcttgctgatttgtaaactggccttgcttggatacaacaggaaagatactatctggataaagttctacagttttagagagactattaacacattaatgtgttcctttgtcatgagcaataccctgcctacactgcttctaaattttctgatttgtttggctgtttggcatctgaaacaatccaagacaaacttagaaagattaggcaacacaaaacacagtaagacctgttcatagcttgttgtctagaaaaccaggtagcaggatattctagatgcttcctgctgcttctacgtgagtaggattagcactggggacaaaataaggagtttagagtaaaccagtatttcagtcaagagttagttggcacttagttaatggcactggaaatagcttgtggagagaatagaatacaatggtatagactcctaatgtttgataaaatactattttcagagtggtagagaggttttatttgcctaaatagccgttattaaatggaataacaaccacattagaccaaattaattgcaaacacagcggcaacctggggagaagttgaaactccagttttgtggattacagttttgagttttatgattgacatttttaagtcccctatttaaggggtcaagattataacaatgtgtgtcttactaagtttctaggtcattgtgagcacttgataaatatttgctgaatgttgtttttttgaatgaacataagatagaaacaaaaacttctcatccagttaactagagtgaatgtagggagaattgttttgcttgtaacatggagagtttattttcaagtgaggaaagagaaaaaaattactcagacttgttcctggtgaagtgcattctctgtttgtatactttttgatggagaaattgatctatagaactgcttaattttttgaggcatttagacagcaatgaaaggtagttctccacaggacaccgaatcaaaaggagagaccagactctggcctcatacccagcctatttgaaacaagctatctagtttctcctgcagacaccttgtcaacaacatgcaacagtgtcaggtgccttgcaggaaaataatctgagtcccaagctagcctgtgctcatccacaatcacaatgaacatgtcaaggaagaatttgcagagactcaagggaagcacaatgggataaggtaatcactttcagtgaaaaactgttttcttgaaaacaggcttggacacaattgaaagctggcttcctgcaaacacaccaagagtctgtaatctagcctatccattatatgtcctttattattcatgatatcctattcttctaccttgttgcctggtaactttttctgaggactgagtttctgcagcgatgtggtgcactcttcctgtgatgaggaaacatctgggcccccttctgcaggctttggaagatgatgtgtcttgtcaaggggtaaagggcaaatggatttaatttctgcttaaaactatcatagacgttccaaatagaatatgtaaaatttctctgtattagaaaaagaaacgtgataccaattgtatattttcttttctttatttattctctgtaagtctgtcagatgataaattgtaaataacaatgattaaagagtcatgctactgatggatctccctttctgtataaacagtgccagttctgggctttgtaacctttgctctttatagtctttcattcctggggaagtgatggggcatgggcccagagctggggtgtatgtggtatggacacctgtttgtggggctttccagcaaaggattatttaaatagacctctaacatatgagttgactgtttattgggaagaaagcatcttggtctctgacatatccaaacatacgagacactgggattttacgtcctcacattaattagtccagttctggggaatccagtctagaattaactggtgatcccttatcgttatggttacagacttgtcttgtttgatacacagaaatcctttttaaatccaaatatagtctgtctcagactacctgcacatgcacaaaccaaaaaaaactatgaaaaccagaatttagactcagtcattatactagagattagaatgaaacgaccccaaacaacccatttcttacctggtctctgagaataagtttatacttttagttttctgagaatatttctcagaatatgtgagttttctgagcacatttttcagcatggggtatggtagataaatcacagggccaaggtttggcagggatagatgggatcattgtgtaccctattgttcttctgatttccaggagaacagaatgagcccatgcaaaacataaacttatgatgattaaaaaaaacacacctatccattcactcatcaataaaaacatattatgatggttatcaagctgtgtcctatgagtgataaaatatttgtaaaatataaaattaaatggcatctattttg

SEQ ID NO: 3092 - protein, 855 aa, Homo sapiens; identical to SEQ ID NO: 180

SEQ ID NO: 3093 - DNA, 3244 bp, Homo sapiens
aggaatcctcagaatgtgaggtttctctcaaaggcatcttgcatcagcctgtggatgtatgcctaccaccgggctccttcaccagcaaagtggaaaaagaagcgtttcacaacaaattcttctttttgggttggggaaacgcagtggattatagctctgttttcttctttccaaaactgtgcacccctggatgaaacctccatcaagggagacctgcaagttgcctggggttcagtgctctagaaagttccaaggtttgtggcttgaattattctaaagaagctgaaataattgaagagaagcagaggccagctgtttttgaggatcctgctccacagagaatgctctgcacccgttgatatgcctcccaggacccagagggagactgtagcctcatttctgtggagacctttggctggactctcctggctctcccagagactccagttccaacaccatcttctgagatgatcctgattcccagaatgctcttggtgctgttcctgctgctgcctatcttgagttctgcaaaagctcaggttaatccagctatatgccgctatcctctgggcatgtcaggaggccagattccagatgaggacatcacagcttccagtcagtggtcagagtccacagctgccaaatatggaaggctggactcagaagaaggggatggagcctggtgccctgagattccagtggaacctgatgacctgaaggagtttctgcagattgacttgcacaccctccattttatcactctggtggggacccaggggcgccatgcaggaggtcatggcatcgagtttgcccccatgtacaagatcaattacagtcgggatggcactcgctggatctcttggcggaaccgtcatgggaaacaggtgctggatggaaatagtaacccctatgacattttcctaaaggacttggagccgcccattgtagccagatttgtccggttcattccagtcaccgaccactccatgaatgtgtgtatgagagtggagctttacggctgtgtctggctagatggcttggtgtcttacaatgctccagctgggcagcagtttgtactccctggaggttccatcatttatctgaatgattctgtctatgatggagctgttggatacagcatgacagaagggctaggccaattgaccgatggtgtgtctggcctggacgatttcacccagacccatgaataccacgtgtggcccggctatgactatgtgggctggcggaacgagagtgccaccaatggctacattgagatcatgtttgaatttgaccgcatcaggaatttcactaccatgaaggtccactgcaacaacatgtttgctaaaggtgtgaagatctttaaggaggtacagtgctacttccgctctgaagccagtgagtgggaacctaatgccatttccttcccccttgtcctggatgacgtcaaccccagtgctcggtttgtcacggtgcctctccaccaccgaatggccagtgccatcaagtgtcaataccattttgcagatacctggatgatgttcagtgagatcaccttccaatcagatgctgcaatgtacaacaactctgaagccctgcccacctctcctatggcacccacaacctatgatccaatgcttaaagttgatgacagcaacactcggatcctgattggctgcttggtggccatcatctttatcctcctggccatcattgtcatcatcctctggaggcagttctggcagaaaatgctggagaaggcttctcggaggatgctggatgatgaaatgacagtcagcctttccctgccaagtgattctagcatgttcaacaataaccgctcctcatcacctagtgaacaagggtccaactcgacttacgatcgcatctttccccttcgccctgactaccaggagccatccaggctgatacgaaaactcccagaatttgctccaggggaggaggagtcaggctgcagcggtgttgtgaagccagtccagcccagtggccctgagggggtgccccactatgcagaggctgacatagtgaacctccaaggagtgacaggaggcaacacatactcagtgcctgccgtcaccatggacctgctctcaggaaaagatgtggctgtggaggagttccccaggaaactcctaactttcaaagagaagctgggagaaggacagtttggggaggttcatctctgtgaagtggagggaatggaaaaattcaaagacaaagattttgccctagatgtcagtgccaaccagcctgtcctggtggctgtgaaaatgctccgagcagatgccaacaagaatgccaggaatgattttcttaaggagataaagatcatgtctcggctcaaggacccaaacatcatccatctattagctgtgtgtatcactgatgaccctctctgtatgatcactgaatacatggagaatggagatctcaatcagtttctttcccgccacgagccccctaattcttcctccagcgatgtacgcactgtcagttacaccaatctgaagtttatggctacccaaattgcctctggcatgaagtacctttcctctcttaattttgttcaccgagatctggccacacgaaactgtttagtgggtaagaactacacaatcaagatagctgactttggaatgagcaggaacctgtacagtggtgactattaccggatccagggccgggcagtgctccctatccgctggatgtcttgggagagtatcttgctgggcaagttcactacagcaagtgatgtgtgggcctttggggttactttgtgggagactttcaccttttgtcaagaacagccctattcccagctgtcagatgaacaggttattgagaatactggagagttcttccgagaccaagggaggcagacttacctccctcaaccagccatttgtcctgactctgtgtataagctgatgctcagctgctggagaagagatacgaagaaccgtccctcattccaagaaatccaccttctgctccttcaacaaggcgacgagtgatgctgtcagtgcctggccatgttcctacggctcaggtcctccctacaagacctaccactcacccatgcctatgccactccatctggacatttaatgaaactgagagacagaggcttgtttgctttgccctcttttcctggtcacccccactccctacccctgactcatatacacttttttttttttttacattaaagaactaaaaaagg

SEQ ID NO: 3094 - protein, 855 aa, Homo sapiens; identical to SEQ ID NO: 180

SEQ ID NO: 3095 - DNA, 9379 bp, Homo sapiens
aggaatcctcagaatgtgaggtttctctcaaaggcatcttgcatcagcctgtggatgtatgcctaccaccgggctccttcaccagcaaagtggaaaaagaagcgtttcacaacaaattcttctttttgggttggggaaacgcagtggattatagctctgttttcttctttccaaaactgtgcacccctggatgaaacctccatcaagggagacctgcaagttgcctggggttcagtgctctagaaagttccaaggtttgtggcttgaattattctaaagaagctgaaataattgaagagaagcagaggccagctgtttttgaggatcctgctccacagagaatgctctgcacccgttgatatgcctcccaggacccagagggagactgtagcctcatttctgtggagacctttggctggactctcctggctctcccagagactccagttccaacaccatcttctgagatgatcctgattcccagaatgctcttggtgctgttcctgctgctgcctatcttgagttctgcaaaagctcaggttaatccagctatatgccgctatcctctgggcatgtcaggaggccagattccagatgaggacatcacagcttccagtcagtggtcagagtccacagctgccaaatatggaaggctggactcagaagaaggggatggagcctggtgccctgagattccagtggaacctgatgacctgaaggagtttctgcagattgacttgcacaccctccattttatcactctggtggggacccaggggcgccatgcaggaggtcatggcatcgagtttgcccccatgtacaagatcaattacagtcgggatggcactcgctggatctcttggcggaaccgtcatgggaaacaggtgctggatggaaatagtaacccctatgacattttcctaaaggacttggagccgcccattgtagccagatttgtccggttcattccagtcaccgaccactccatgaatgtgtgtatgagagtggagctttacggctgtgtctggctagatggcttggtgtcttacaatgctccagctgggcagcagtttgtactccctggaggttccatcatttatctgaatgattctgtctatgatggagctgttggatacagcatgacagaagggctaggccaattgaccgatggtgtgtctggcctggacgatttcacccagacccatgaataccacgtgtggcccggctatgactatgtgggctggcggaacgagagtgccaccaatggctacattgagatcatgtttgaatttgaccgcatcaggaatttcactaccatgaaggtccactgcaacaacatgtttgctaaaggtgtgaagatctttaaggaggtacagtgctacttccgctctgaagccagtgagtgggaacctaatgccatttccttcccccttgtcctggatgacgtcaaccccagtgctcggtttgtcacggtgcctctccaccaccgaatggccagtgccatcaagtgtcaataccattttgcagatacctggatgatgttcagtgagatcaccttccaatcagatgctgcaatgtacaacaactctgaagccctgcccacctctcctatggcacccacaacctatgatccaatgcttaaagttgatgacagcaacactcggatcctgattggctgcttggtggccatcatctttatcctcctggccatcattgtcatcatcctctggaggcagttctggcagaaaatgctggagaaggcttctcggaggatgctggatgatgaaatgacagtcagcctttccctgccaagtgattctagcatgttcaacaataaccgctcctcatcacctagtgaacaagggtccaactcgacttacgatcgcatctttccccttcgccctgactaccaggagccatccaggctgatacgaaaactcccagaatttgctccaggggaggaggagtcaggctgcagcggtgttgtgaagccagtccagcccagtggccctgagggggtgccccactatgcagaggctgacatagtgaacctccaaggagtgacaggaggcaacacatactcagtgcctgccgtcaccatggacctgctctcaggaaaagatgtggctgtggaggagttccccaggaaactcctaactttcaaagagaagctgggagaaggacagtttggggaggttcatctctgtgaagtggagggaatggaaaaattcaaagacaaagattttgccctagatgtcagtgccaaccagcctgtcctggtggctgtgaaaatgctccgagcagatgccaacaagaatgccaggaatgattttcttaaggagataaagatcatgtctcggctcaaggacccaaacatcatccatctattagctgtgtgtatcactgatgaccctctctgtatgatcactgaatacatggagaatggagatctcaatcagtttctttcccgccacgagccccctaattcttcctccagcgatgtacgcactgtcagttacaccaatctgaagtttatggctacccaaattgcctctggcatgaagtacctttcctctcttaattttgttcaccgagatctggccacacgaaactgtttagtgggtaagaactacacaatcaagatagctgactttggaatgagcaggaacctgtacagtggtgactattaccggatccagggccgggcagtgctccctatccgctggatgtcttgggagagtatcttgctgggcaagttcactacagcaagtgatgtgtgggcctttggggttactttgtgggagactttcaccttttgtcaagaacagccctattcccagctgtcagatgaacaggttattgagaatactggagagttcttccgagaccaagggaggcagacttacctccctcaaccagccatttgtcctgactctgtgtataagctgatgctcagctgctggagaagagatacgaagaaccgtccctcattccaagaaatccaccttctgctccttcaacaaggcgacgagtgatgctgtcagtgcctggccatgttcctacggctcaggtcctccctacaagacctaccactcacccatgcctatgccactccatctggacatttaatgaaactgagagacagaggcttgtttgctttgccctcttttcctggtcacccccactccctacccctgactcatatacacttttttttttttttacattaaagaactaaaaaaggaaaaaaaaaagcctagggcagatacaatctagtaaaagaaaatctttgatataccaaagtgttggataacaaaggctagaaaattcagataatttataaaggttaactatacttgtgcttataaatgtgcagattctacaatatttttccatgtcattctaaaagaatcttcagaaagaaaaacttgaagaatactaatgtcttgggaaacatgagattaagtttagggaaaacacttgatagatgtggagaatctgaggactcagaattcagcaactaatcacaggtggttttctaatttggcctctggacatgtctcactgtttgtatttctctctcctgtcaaagtgaatgatatattcttgaaaacccccaatttcttgaaatgggtgttctgttcattcatgggcaggggtcaggattgaagttcatatatgaaacaactggggatgtagataggaaagaatgtctgctgcaagagtgtatgaagggggattgtcatttacaaaaaaaaagtacctcatggatggaaggattcatgaatagataatggacataggaaaggaggtcaatggaggacacataacagacatgctatccaccatttatttgtgattttgtaagagggttctcttctttgtcttgttcagatattttcatgtgtgtgttttagtgagaatctgagtttttaatcagtaaagtctgatgttttgatatcttgatgttttgatggtagactcttgagttcatcttgtccaaatcttctagcattttcaaggatgaagcctctgtgggatctttgggcttggggctgaatttctcaggcataaatacctaatggccttgtctaagagggaatagatctgttctgagtgtccccaaaaaagttgtcctaggaactgatgtggagaagttacagggagactgatttccattccttattggggaaaacgaagcactcagaacatacaaggataaatgggctgccaccagaggtgaggagtctcttgtcactggagaggttaagatagaggctcaagaacaatgcaaggaaaatggaggttttcaaacacaaagtggatggtggtatgagacaatgtttaatgtccttctaactccgagagtccttgattctggagaggcacaggatgaacatctgttgctactgctgagtatacacactcttgcctctgagatggcgtgaccagcagaaaagaaagctcagggctgtggcttcagaattcatggaaacagagccactgtcaagaaggaatctgctcagagcagattctgagttttcacactccacaaatcctcagatttagtgggaagctggaaaaaggaactcttaattccaattgaggagaaacaagaaaacattacaaatcagtttcccaagctgagaaggattagccttgaccccttgggtctgcctctgttgccctcaccagtttaccttctacaacagtttctcaggaacatgtgtatttccccattcagctttcagcattgctccacgccacagcataagcatagatcccaagtccacaggctccattttgcaggtcatcttctgatcctagcaaatgtcctttccccatagttgtcctatgcctttgggctttagtctatcccaggactaactgtggagaaatcattggtttgagagtcaagagagcattggtttgggagctttaatcctctttctgcttcacactaagtgtgtcatcttggctaaatcacttggtctttctgcattttgttttcttatttataggatgaggaaattagattaaatggttttgaggtcctttcttgttctgatatgtccagtactcactggaaaattggatctataactgatgggtttagtaatctggtcatttcttgctctgaaaattgtagtcagcaaaagagatcatggaagaaatcactgtaatggtagtaatagtaacacatgccatttgtattgtgccttaggtttaccaggtgtttccaaatacattagcatatttgatatgtgcaggactagataccttgggacctgccacactccactttcaagatatgtattagcttcattagaattaaagggacttgaactcaggacctgcagcctattcttctttatccacatgtctctggtagggctacatccagatcacaccatgacttcttatagagcaagagaaaataatattattatatcttcctttgcctaaaatctctccacttattcttttttatgattctgcaccagttcactgggttattctatgattccatattttttttaaaaaaaatcatatttaaaatgaacttacaatgtctgaattttcctggccttgagtcacagaagtaatatgtttcagatggctgcccaatatgtattatcatgtaatacatatctgtgtccttttctgggatgaggaaggcttcaacttctggcactgagaactttgtattacagacacaggtttagtttctagcttagtcatgcctttagagtttagtagcacaaatccatgcaacccaacagaatacatggtgagggcctagtatgtagaatttgaaagtagttcaaatttgaattagaagaatgaagctaggacttatttggaaaaggagatagaaaaaaaatgatcagaaactgtggggccttattacctttgcagtaagttatcttcttcatgatatatgtgaattattttatgtgcagattgtgttttgggattgtcagatctaaacttatattcttgctggctaatgtgctgatagccaggtctgaaacttgatgtgctatccagacacatatgatcagaaaagatctagagtgcaaagaggtgcctgaggagcaaaatgtggttttaatgttgtggaaagatcacttgcaagtatataagactgtataaagaagaggactgtgtgcaagtggggtgaaaaaaaaggatacgtgaatgtgcatatgactgaatagggaggaaggtcagggctagaaaggaggctacataaaaaggggcaatggagaatgcacaggaaagacacaggggaaggtcaagtcgagcaaggtagaaacaggagtagctagagccattgggaatccattttgaaacaagaaggagttttgaaagggaataggaaagtaagtgtcttgaagtaaaagataaatatggatggagaaagaagaaattctggatgatagagatgataaaaatatttattaagaaatgaagtcaggttcagtgtatgaaatggaaaggaatttttcagaattttaagaaaggggaagttcctcttggaaaagatatagcaaccatcggggaatgaccttttcatttcagaagtggatgaggaaggtggtgtgagcatcaggtatattctggaccatttcaagtgctggtgagaagaaaggaactctttgcctgaactgggcttggttttccaagtgctgctttggaaatgaagacccagagatgcagagcttatggtagttcataaatcttcatgttctattatctttcatctgccaataaagttcattttcaataatgtccaccattgctgtgcccagaataaccacaggcaaacatcaaaacaatacgcataagttagacaagattaaatcttgtctgatatctgcacaaacagatatgcaccatgttggaaacatgtgttttcctagtcccatccaggcttcccacaagaaagccatgatgtgggtctaaaccatatgttttgagtaaaggagaatagaagaaggggagtgtccgcaaaatggaaagagatgaagatgttccaaggaagtatgctgaaacagaacagtgaatgttttgcccaaaactacaaaaataaaagaaaaaaagaaaattgcaatacatggctactaagtctttgatcataagtcgaatttatagacctggaatttgccatcctagtctttcctttttagtaagacttctgtcctctggcagtgcatatggtaggtctctaatgtttcttcatctccaggaagatgcagatccttatttttgctgggaaatccttctaaatagaaatgtaacatttttataaaaacagattaatgtgtttttcacttagtaaatgttttcaagagctgaattgagaaggaaagagactggagtggttaatggtgatttgatttctggcattctgagttttctgctacaattagctgcattacttggtgccaaagagcagtggggaattgttgagttgctgtatcctttaaaaaaaaacaaaaaacttgttattttgaaagaacttaaggctcacaagatgttacaaaaatagtagagtggccttaccctagatccagttttccccatttataacatttcacttagtccattttcggaaccagaaaattaacattggcataatgctattaactaaactacagaccttttttcaatttcgccagtttttccacacatattcatttagttgctggatacttttaattcttgctgatttgtaaactggccttgcttggatacaacaggaaagatactatctggataaagttctacagttttagagagactattaacacattaatgtgttcctttgtcatgagcaataccctgcctacactgcttctaaattttctgatttgtttggctgtttggcatctgaaacaatccaagacaaacttagaaagattaggcaacacaaaacacagtaagacctgttcatagcttgttgtctagaaaaccaggtagcaggatattctagatgcttcctgctgcttctacgtgagtaggattagcactggggacaaaataaggagtttagagtaaaccagtatttcagtcaagagttagttggcacttagttaatggcactggaaatagcttgtggagagaatagaatacaatggtatagactcctaatgtttgataaaatactattttcagagtggtagagaggttttatttgcctaaatagccgttattaaatggaataacaaccacattagaccaaattaattgcaaacacagcggcaacctggggagaagttgaaactccagttttgtggattacagttttgagttttatgattgacatttttaagtcccctatttaaggggtcaagattataacaatgtgtgtcttactaagtttctaggtcattgtgagcacttgataaatatttgctgaatgttgtttttttgaatgaacataagatagaaacaaaaacttctcatccagttaactagagtgaatgtagggagaattgttttgcttgtaacatggagagtttattttcaagtgaggaaagagaaaaaaattactcagacttgttcctggtgaagtgcattctctgtttgtatactttttgatggagaaattgatctatagaactgcttaattttttgaggcatttagacagcaatgaaaggtagttctccacaggacaccgaatcaaaaggagagaccagactctggcctcatacccagcctatttgaaacaagctatctagtttctcctgcagacaccttgtcaacaacatgcaacagtgtcaggtgccttgcaggaaaataatctgagtcccaagctagcctgtgctcatccacaatcacaatgaacatgtcaaggaagaatttgcagagactcaagggaagcacaatgggataaggtaatcactttcagtgaaaaactgttttcttgaaaacaggcttggacacaattgaaagctggcttcctgcaaacacaccaagagtctgtaatctagcctatccattatatgtcctttattattcatgatatcctattcttctaccttgttgcctggtaactttttctgaggactgagtttctgcagcgatgtggtgcactcttcctgtgatgaggaaacatctgggcccccttctgcaggctttggaagatgatgtgtcttgtcaaggggtaaagggcaaatggatttaatttctgcttaaaactatcatagacgttccaaatagaatatgtaaaatttctctgtattagaaaaagaaacgtgataccaattgtatattttcttttctttatttattctctgtaagtctgtcagatgataaattgtaaataacaatgattaaagagtcatgctactgatggatctccctttctgt

SEQ ID NO: 3096 - protein, 855 aa, Homo sapiens; identical to SEQ ID NO: 180

SEQ ID NO: 3097 - DNA, 9413 bp, Homo sapiens
aggaatcctcagaatgtgaggtttctctcaaaggcatcttgcatcagcctgtggatgtatgcctaccaccgggctccttcaccagcaaagtggaaaaagaagcgtttcacaacaaattcttctttttgggttggggaaacgcagtggattatagctctgttttcttctttccaaaactgtgcacccctggatgaaacctccatcaagggagacctgcaagttgcctggggttcagtgctctagaaagttccaaggtttgtggcttgaattattctaaagaagctgaaataattgaagagaagcagaggccagctgtttttgaggatcctgctccacagagaatgctctgcacccgttgatatgcctcccaggacccagagggagactgtagcctcatttctgtggagacctttggctggactctcctggctctcccagagactccagttccaacaccatcttctgagatgatcctgattcccagaatgctcttggtgctgttcctgctgctgcctatcttgagttctgcaaaagctcaggttaatccagctatatgccgctatcctctgggcatgtcaggaggccagattccagatgaggacatcacagcttccagtcagtggtcagagtccacagctgccaaatatggaaggctggactcagaagaaggggatggagcctggtgccctgagattccagtggaacctgatgacctgaaggagtttctgcagattgacttgcacaccctccattttatcactctggtggggacccaggggcgccatgcaggaggtcatggcatcgagtttgcccccatgtacaagatcaattacagtcgggatggcactcgctggatctcttggcggaaccgtcatgggaaacaggtgctggatggaaatagtaacccctatgacattttcctaaaggacttggagccgcccattgtagccagatttgtccggttcattccagtcaccgaccactccatgaatgtgtgtatgagagtggagctttacggctgtgtctggctagatggcttggtgtcttacaatgctccagctgggcagcagtttgtactccctggaggttccatcatttatctgaatgattctgtctatgatggagctgttggatacagcatgacagaagggctaggccaattgaccgatggtgtgtctggcctggacgatttcacccagacccatgaataccacgtgtggcccggctatgactatgtgggctggcggaacgagagtgccaccaatggctacattgagatcatgtttgaatttgaccgcatcaggaatttcactaccatgaaggtccactgcaacaacatgtttgctaaaggtgtgaagatctttaaggaggtacagtgctacttccgctctgaagccagtgagtgggaacctaatgccatttccttcccccttgtcctggatgacgtcaaccccagtgctcggtttgtcacggtgcctctccaccaccgaatggccagtgccatcaagtgtcaataccattttgcagatacctggatgatgttcagtgagatcaccttccaatcagatgctgcaatgtacaacaactctgaagccctgcccacctctcctatggcacccacaacctatgatccaatgcttaaagttgatgacagcaacactcggatcctgattggctgcttggtggccatcatctttatcctcctggccatcattgtcatcatcctctggaggcagttctggcagaaaatgctggagaaggcttctcggaggatgctggatgatgaaatgacagtcagcctttccctgccaagtgattctagcatgttcaacaataaccgctcctcatcacctagtgaacaagggtccaactcgacttacgatcgcatctttccccttcgccctgactaccaggagccatccaggctgatacgaaaactcccagaatttgctccaggggaggaggagtcaggctgcagcggtgttgtgaagccagtccagcccagtggccctgagggggtgccccactatgcagaggctgacatagtgaacctccaaggagtgacaggaggcaacacatactcagtgcctgccgtcaccatggacctgctctcaggaaaagatgtggctgtggaggagttccccaggaaactcctaactttcaaagagaagctgggagaaggacagtttggggaggttcatctctgtgaagtggagggaatggaaaaattcaaagacaaagattttgccctagatgtcagtgccaaccagcctgtcctggtggctgtgaaaatgctccgagcagatgccaacaagaatgccaggaatgattttcttaaggagataaagatcatgtctcggctcaaggacccaaacatcatccatctattagctgtgtgtatcactgatgaccctctctgtatgatcactgaatacatggagaatggagatctcaatcagtttctttcccgccacgagccccctaattcttcctccagcgatgtacgcactgtcagttacaccaatctgaagtttatggctacccaaattgcctctggcatgaagtacctttcctctcttaattttgttcaccgagatctggccacacgaaactgtttagtgggtaagaactacacaatcaagatagctgactttggaatgagcaggaacctgtacagtggtgactattaccggatccagggccgggcagtgctccctatccgctggatgtcttgggagagtatcttgctgggcaagttcactacagcaagtgatgtgtgggcctttggggttactttgtgggagactttcaccttttgtcaagaacagccctattcccagctgtcagatgaacaggttattgagaatactggagagttcttccgagaccaagggaggcagacttacctccctcaaccagccatttgtcctgactctgtgtataagctgatgctcagctgctggagaagagatacgaagaaccgtccctcattccaagaaatccaccttctgctccttcaacaaggcgacgagtgatgctgtcagtgcctggccatgttcctacggctcaggtcctccctacaagacctaccactcacccatgcctatgccactccatctggacatttaatgaaactgagagacagaggcttgtttgctttgccctcttttcctggtcacccccactccctacccctgactcatatacacttttttttttttttacattaaagaactaaaaaaggaaaaaaaaaagcctagggcagatacaatctagtaaaagaaaatctttgatataccaaagtgttggataacaaaggctagaaaattcagataatttataaaggttaactatacttgtgcttataaatgtgcagattctacaatatttttccatgtcattctaaaagaatcttcagaaagaaaaacttgaagaatactaatgtcttgggaaacatgagattaagtttagggaaaacacttgatagatgtggagaatctgaggactcagaattcagcaactaatcacaggtggttttctaatttggcctctggacatgtctcactgtttgtatttctctctcctgtcaaagtgaatgatatattcttgaaaacccccaatttcttgaaatgggtgttctgttcattcatgggcaggggtcaggattgaagttcatatatgaaacaactggggatgtagataggaaagaatgtctgctgcaagagtgtatgaagggggattgtcatttacaaaaaaaaagtacctcatggatggaaggattcatgaatagataatggacataggaaaggaggtcaatggaggacacataacagacatgctatccaccatttatttgtgattttgtaagagggttctcttctttgtcttgttcagatattttcatgtgtgtgttttagtgagaatctgagtttttaatcagtaaagtctgatgttttgatatcttgatgttttgatggtagactcttgagttcatcttgtccaaatcttctagcattttcaaggatgaagcctctgtgggatctttgggcttggggctgaatttctcaggcataaatacctaatggccttgtctaagagggaatagatctgttctgagtgtccccaaaaaagttgtcctaggaactgatgtggagaagttacagggagactgatttccattccttattggggaaaacgaagcactcagaacatacaaggataaatgggctgccaccagaggtgaggagtctcttgtcactggagaggttaagatagaggctcaagaacaatgcaaggaaaatggaggttttcaaacacaaagtggatggtggtatgagacaatgtttaatgtccttctaactccgagagtccttgattctggagaggcacaggatgaacatctgttgctactgctgagtatacacactcttgcctctgagatggcgtgaccagcagaaaagaaagctcagggctgtggcttcagaattcatggaaacagagccactgtcaagaaggaatctgctcagagcagattctgagttttcacactccacaaatcctcagatttagtgggaagctggaaaaaggaactcttaattccaattgaggagaaacaagaaaacattacaaatcagtttcccaagctgagaaggattagccttgaccccttgggtctgcctctgttgccctcaccagtttaccttctacaacagtttctcaggaacatgtgtatttccccattcagctttcagcattgctccacgccacagcataagcatagatcccaagtccacaggctccattttgcaggtcatcttctgatcctagcaaatgtcctttccccatagttgtcctatgcctttgggctttagtctatcccaggactaactgtggagaaatcattggtttgagagtcaagagagcattggtttgggagctttaatcctctttctgcttcacactaagtgtgtcatcttggctaaatcacttggtctttctgcattttgttttcttatttataggatgaggaaattagattaaatggttttgaggtcctttcttgttctgatatgtccagtactcactggaaaattggatctataactgatgggtttagtaatctggtcatttcttgctctgaaaattgtagtcagcaaaagagatcatggaagaaatcactgtaatggtagtaatagtaacacatgccatttgtattgtgccttaggtttaccaggtgtttccaaatacattagcatatttgatatgtgcaggactagataccttgggacctgccacactccactttcaagatatgtattagcttcattagaattaaagggacttgaactcaggacctgcagcctattcttctttatccacatgtctctggtagggctacatccagatcacaccatgacttcttatagagcaagagaaaataatattattatatcttcctttgcctaaaatctctccacttattcttttttatgattctgcaccagttcactgggttattctatgattccatattttttttaaaaaaaatcatatttaaaatgaacttacaatgtctgaattttcctggccttgagtcacagaagtaatatgtttcagatggctgcccaatatgtattatcatgtaatacatatctgtgtccttttctgggatgaggaaggcttcaacttctggcactgagaactttgtattacagacacaggtttagtttctagcttagtcatgcctttagagtttagtagcacaaatccatgcaacccaacagaatacatggtgagggcctagtatgtagaatttgaaagtagttcaaatttgaattagaagaatgaagctaggacttatttggaaaaggagatagaaaaaaaatgatcagaaactgtggggccttattacctttgcagtaagttatcttcttcatgatatatgtgaattattttatgtgcagattgtgttttgggattgtcagatctaaacttatattcttgctggctaatgtgctgatagccaggtctgaaacttgatgtgctatccagacacatatgatcagaaaagatctagagtgcaaagaggtgcctgaggagcaaaatgtggttttaatgttgtggaaagatcacttgcaagtatataagactgtataaagaagaggactgtgtgcaagtggggtgaaaaaaaaggatacgtgaatgtgcatatgactgaatagggaggaaggtcagggctagaaaggaggctacataaaaaggggcaatggagaatgcacaggaaagacacaggggaaggtcaagtcgagcaaggtagaaacaggagtagctagagccattgggaatccattttgaaacaagaaggagttttgaaagggaataggaaagtaagtgtcttgaagtaaaagataaatatggatggagaaagaagaaattctggatgatagagatgataaaaatatttattaagaaatgaagtcaggttcagtgtatgaaatggaaaggaatttttcagaattttaagaaaggggaagttcctcttggaaaagatatagcaaccatcggggaatgaccttttcatttcagaagtggatgaggaaggtggtgtgagcatcaggtatattctggaccatttcaagtgctggtgagaagaaaggaactctttgcctgaactgggcttggttttccaagtgctgctttggaaatgaagacccagagatgcagagcttatggtagttcataaatcttcatgttctattatctttcatctgccaataaagttcattttcaataatgtccaccattgctgtgcccagaataaccacaggcaaacatcaaaacaatacgcataagttagacaagattaaatcttgtctgatatctgcacaaacagatatgcaccatgttggaaacatgtgttttcctagtcccatccaggcttcccacaagaaagccatgatgtgggtctaaaccatatgttttgagtaaaggagaatagaagaaggggagtgtccgcaaaatggaaagagatgaagatgttccaaggaagtatgctgaaacagaacagtgaatgttttgcccaaaactacaaaaataaaagaaaaaaagaaaattgcaatacatggctactaagtctttgatcataagtcgaatttatagacctggaatttgccatcctagtctttcctttttagtaagacttctgtcctctggcagtgcatatggtaggtctctaatgtttcttcatctccaggaagatgcagatccttatttttgctgggaaatccttctaaatagaaatgtaacatttttataaaaacagattaatgtgtttttcacttagtaaatgttttcaagagctgaattgagaaggaaagagactggagtggttaatggtgatttgatttctggcattctgagttttctgctacaattagctgcattacttggtgccaaagagcagtggggaattgttgagttgctgtatcctttaaaaaaaaacaaaaaacttgttattttgaaagaacttaaggctcacaagatgttacaaaaatagtagagtggccttaccctagatccagttttccccatttataacatttcacttagtccattttcggaaccagaaaattaacattggcataatgctattaactaaactacagaccttttttcaatttcgccagtttttccacacatattcatttagttgctggatacttttaattcttgctgatttgtaaactggccttgcttggatacaacaggaaagatactatctggataaagttctacagttttagagagactattaacacattaatgtgttcctttgtcatgagcaataccctgcctacactgcttctaaattttctgatttgtttggctgtttggcatctgaaacaatccaagacaaacttagaaagattaggcaacacaaaacacagtaagacctgttcatagcttgttgtctagaaaaccaggtagcaggatattctagatgcttcctgctgcttctacgtgagtaggattagcactggggacaaaataaggagtttagagtaaaccagtatttcagtcaagagttagttggcacttagttaatggcactggaaatagcttgtggagagaatagaatacaatggtatagactcctaatgtttgataaaatactattttcagagtggtagagaggttttatttgcctaaatagccgttattaaatggaataacaaccacattagaccaaattaattgcaaacacagcggcaacctggggagaagttgaaactccagttttgtggattacagttttgagttttatgattgacatttttaagtcccctatttaaggggtcaagattataacaatgtgtgtcttactaagtttctaggtcattgtgagcacttgataaatatttgctgaatgttgtttttttgaatgaacataagatagaaacaaaaacttctcatccagttaactagagtgaatgtagggagaattgttttgcttgtaacatggagagtttattttcaagtgaggaaagagaaaaaaattactcagacttgttcctggtgaagtgcattctctgtttgtatactttttgatggagaaattgatctatagaactgcttaattttttgaggcatttagacagcaatgaaaggtagttctccacaggacaccgaatcaaaaggagagaccagactctggcctcatacccagcctatttgaaacaagctatctagtttctcctgcagacaccttgtcaacaacatgcaacagtgtcaggtgccttgcaggaaaataatctgagtcccaagctagcctgtgctcatccacaatcacaatgaacatgtcaaggaagaatttgcagagactcaagggaagcacaatgggataaggtaatcactttcagtgaaaaactgttttcttgaaaacaggcttggacacaattgaaagctggcttcctgcaaacacaccaagagtctgtaatctagcctatccattatatgtcctttattattcatgatatcctattcttctaccttgttgcctggtaactttttctgaggactgagtttctgcagcgatgtggtgcactcttcctgtgatgaggaaacatctgggcccccttctgcaggctttggaagatgatgtgtcttgtcaaggggtaaagggcaaatggatttaatttctgcttaaaactatcatagacgttccaaatagaatatgtaaaatttctctgtattagaaaaagaaacgtgataccaattgtatattttcttttctttatttattctctgtaagtctgtcagatgataaattgtaaataacaatgattaaagagtcatgctactgatggatctccctttctgtataaacagtgccagttctgggctttgtaaccttt

SEQ ID NO: 3098 - protein, 855 aa, Homo sapiens; identical to SEQ ID NO: 180

SEQ ID NO: 3099 - DNA, 10187 bp, Homo sapiens
aggaatcctcagaatgtgaggtttctctcaaaggcatcttgcatcagcctgtggatgtatgcctaccaccgggctccttcaccagcaaagtggaaaaagaagcgtttcacaacaaattcttctttttgggttggggaaacgcagtggattatagctctgttttcttctttccaaaactgtgcacccctggatgaaacctccatcaagggagacctgcaagttgcctggggttcagtgctctagaaagttccaaggtttgtggcttgaattattctaaagaagctgaaataattgaagagaagcagaggccagctgtttttgaggatcctgctccacagagaatgctctgcacccgttgatatgcctcccaggacccagagggagactgtagcctcatttctgtggagacctttggctggactctcctggctctcccagagactccagttccaacaccatcttctgagatgatcctgattcccagaatgctcttggtgctgttcctgctgctgcctatcttgagttctgcaaaagctcaggttaatccagctatatgccgctatcctctgggcatgtcaggaggccagattccagatgaggacatcacagcttccagtcagtggtcagagtccacagctgccaaatatggaaggctggactcagaagaaggggatggagcctggtgccctgagattccagtggaacctgatgacctgaaggagtttctgcagattgacttgcacaccctccattttatcactctggtggggacccaggggcgccatgcaggaggtcatggcatcgagtttgcccccatgtacaagatcaattacagtcgggatggcactcgctggatctcttggcggaaccgtcatgggaaacaggtgctggatggaaatagtaacccctatgacattttcctaaaggacttggagccgcccattgtagccagatttgtccggttcattccagtcaccgaccactccatgaatgtgtgtatgagagtggagctttacggctgtgtctggctagatggcttggtgtcttacaatgctccagctgggcagcagtttgtactccctggaggttccatcatttatctgaatgattctgtctatgatggagctgttggatacagcatgacagaagggctaggccaattgaccgatggtgtgtctggcctggacgatttcacccagacccatgaataccacgtgtggcccggctatgactatgtgggctggcggaacgagagtgccaccaatggctacattgagatcatgtttgaatttgaccgcatcaggaatttcactaccatgaaggtccactgcaacaacatgtttgctaaaggtgtgaagatctttaaggaggtacagtgctacttccgctctgaagccagtgagtgggaacctaatgccatttccttcccccttgtcctggatgacgtcaaccccagtgctcggtttgtcacggtgcctctccaccaccgaatggccagtgccatcaagtgtcaataccattttgcagatacctggatgatgttcagtgagatcaccttccaatcagatgctgcaatgtacaacaactctgaagccctgcccacctctcctatggcacccacaacctatgatccaatgcttaaagttgatgacagcaacactcggatcctgattggctgcttggtggccatcatctttatcctcctggccatcattgtcatcatcctctggaggcagttctggcagaaaatgctggagaaggcttctcggaggatgctggatgatgaaatgacagtcagcctttccctgccaagtgattctagcatgttcaacaataaccgctcctcatcacctagtgaacaagggtccaactcgacttacgatcgcatctttccccttcgccctgactaccaggagccatccaggctgatacgaaaactcccagaatttgctccaggggaggaggagtcaggctgcagcggtgttgtgaagccagtccagcccagtggccctgagggggtgccccactatgcagaggctgacatagtgaacctccaaggagtgacaggaggcaacacatactcagtgcctgccgtcaccatggacctgctctcaggaaaagatgtggctgtggaggagttccccaggaaactcctaactttcaaagagaagctgggagaaggacagtttggggaggttcatctctgtgaagtggagggaatggaaaaattcaaagacaaagattttgccctagatgtcagtgccaaccagcctgtcctggtggctgtgaaaatgctccgagcagatgccaacaagaatgccaggaatgattttcttaaggagataaagatcatgtctcggctcaaggacccaaacatcatccatctattagctgtgtgtatcactgatgaccctctctgtatgatcactgaatacatggagaatggagatctcaatcagtttctttcccgccacgagccccctaattcttcctccagcgatgtacgcactgtcagttacaccaatctgaagtttatggctacccaaattgcctctggcatgaagtacctttcctctcttaattttgttcaccgagatctggccacacgaaactgtttagtgggtaagaactacacaatcaagatagctgactttggaatgagcaggaacctgtacagtggtgactattaccggatccagggccgggcagtgctccctatccgctggatgtcttgggagagtatcttgctgggcaagttcactacagcaagtgatgtgtgggcctttggggttactttgtgggagactttcaccttttgtcaagaacagccctattcccagctgtcagatgaacaggttattgagaatactggagagttcttccgagaccaagggaggcagacttacctccctcaaccagccatttgtcctgactctgtgtataagctgatgctcagctgctggagaagagatacgaagaaccgtccctcattccaagaaatccaccttctgctccttcaacaaggcgacgagtgatgctgtcagtgcctggccatgttcctacggctcaggtcctccctacaagacctaccactcacccatgcctatgccactccatctggacatttaatgaaactgagagacagaggcttgtttgctttgccctcttttcctggtcacccccactccctacccctgactcatatacacttttttttttttttacattaaagaactaaaaaaggaaaaaaaaaagcctagggcagatacaatctagtaaaagaaaatctttgatataccaaagtgttggataacaaaggctagaaaattcagataatttataaaggttaactatacttgtgcttataaatgtgcagattctacaatatttttccatgtcattctaaaagaatcttcagaaagaaaaacttgaagaatactaatgtcttgggaaacatgagattaagtttagggaaaacacttgatagatgtggagaatctgaggactcagaattcagcaactaatcacaggtggttttctaatttggcctctggacatgtctcactgtttgtatttctctctcctgtcaaagtgaatgatatattcttgaaaacccccaatttcttgaaatgggtgttctgttcattcatgggcaggggtcaggattgaagttcatatatgaaacaactggggatgtagataggaaagaatgtctgctgcaagagtgtatgaagggggattgtcatttacaaaaaaaaagtacctcatggatggaaggattcatgaatagataatggacataggaaaggaggtcaatggaggacacataacagacatgctatccaccatttatttgtgattttgtaagagggttctcttctttgtcttgttcagatattttcatgtgtgtgttttagtgagaatctgagtttttaatcagtaaagtctgatgttttgatatcttgatgttttgatggtagactcttgagttcatcttgtccaaatcttctagcattttcaaggatgaagcctctgtgggatctttgggcttggggctgaatttctcaggcataaatacctaatggccttgtctaagagggaatagatctgttctgagtgtccccaaaaaagttgtcctaggaactgatgtggagaagttacagggagactgatttccattccttattggggaaaacgaagcactcagaacatacaaggataaatgggctgccaccagaggtgaggagtctcttgtcactggagaggttaagatagaggctcaagaacaatgcaaggaaaatggaggttttcaaacacaaagtggatggtggtatgagacaatgtttaatgtccttctaactccgagagtccttgattctggagaggcacaggatgaacatctgttgctactgctgagtatacacactcttgcctctgagatggcgtgaccagcagaaaagaaagctcagggctgtggcttcagaattcatggaaacagagccactgtcaagaaggaatctgctcagagcagattctgagttttcacactccacaaatcctcagatttagtgggaagctggaaaaaggaactcttaattccaattgaggagaaacaagaaaacattacaaatcagtttcccaagctgagaaggattagccttgaccccttgggtctgcctctgttgccctcaccagtttaccttctacaacagtttctcaggaacatgtgtatttccccattcagctttcagcattgctccacgccacagcataagcatagatcccaagtccacaggctccattttgcaggtcatcttctgatcctagcaaatgtcctttccccatagttgtcctatgcctttgggctttagtctatcccaggactaactgtggagaaatcattggtttgagagtcaagagagcattggtttgggagctttaatcctctttctgcttcacactaagtgtgtcatcttggctaaatcacttggtctttctgcattttgttttcttatttataggatgaggaaattagattaaatggttttgaggtcctttcttgttctgatatgtccagtactcactggaaaattggatctataactgatgggtttagtaatctggtcatttcttgctctgaaaattgtagtcagcaaaagagatcatggaagaaatcactgtaatggtagtaatagtaacacatgccatttgtattgtgccttaggtttaccaggtgtttccaaatacattagcatatttgatatgtgcaggactagataccttgggacctgccacactccactttcaagatatgtattagcttcattagaattaaagggacttgaactcaggacctgcagcctattcttctttatccacatgtctctggtagggctacatccagatcacaccatgacttcttatagagcaagagaaaataatattattatatcttcctttgcctaaaatctctccacttattcttttttatgattctgcaccagttcactgggttattctatgattccatattttttttaaaaaaaatcatatttaaaatgaacttacaatgtctgaattttcctggccttgagtcacagaagtaatatgtttcagatggctgcccaatatgtattatcatgtaatacatatctgtgtccttttctgggatgaggaaggcttcaacttctggcactgagaactttgtattacagacacaggtttagtttctagcttagtcatgcctttagagtttagtagcacaaatccatgcaacccaacagaatacatggtgagggcctagtatgtagaatttgaaagtagttcaaatttgaattagaagaatgaagctaggacttatttggaaaaggagatagaaaaaaaatgatcagaaactgtggggccttattacctttgcagtaagttatcttcttcatgatatatgtgaattattttatgtgcagattgtgttttgggattgtcagatctaaacttatattcttgctggctaatgtgctgatagccaggtctgaaacttgatgtgctatccagacacatatgatcagaaaagatctagagtgcaaagaggtgcctgaggagcaaaatgtggttttaatgttgtggaaagatcacttgcaagtatataagactgtataaagaagaggactgtgtgcaagtggggtgaaaaaaaaggatacgtgaatgtgcatatgactgaatagggaggaaggtcagggctagaaaggaggctacataaaaaggggcaatggagaatgcacaggaaagacacaggggaaggtcaagtcgagcaaggtagaaacaggagtagctagagccattgggaatccattttgaaacaagaaggagttttgaaagggaataggaaagtaagtgtcttgaagtaaaagataaatatggatggagaaagaagaaattctggatgatagagatgataaaaatatttattaagaaatgaagtcaggttcagtgtatgaaatggaaaggaatttttcagaattttaagaaaggggaagttcctcttggaaaagatatagcaaccatcggggaatgaccttttcatttcagaagtggatgaggaaggtggtgtgagcatcaggtatattctggaccatttcaagtgctggtgagaagaaaggaactctttgcctgaactgggcttggttttccaagtgctgctttggaaatgaagacccagagatgcagagcttatggtagttcataaatcttcatgttctattatctttcatctgccaataaagttcattttcaataatgtccaccattgctgtgcccagaataaccacaggcaaacatcaaaacaatacgcataagttagacaagattaaatcttgtctgatatctgcacaaacagatatgcaccatgttggaaacatgtgttttcctagtcccatccaggcttcccacaagaaagccatgatgtgggtctaaaccatatgttttgagtaaaggagaatagaagaaggggagtgtccgcaaaatggaaagagatgaagatgttccaaggaagtatgctgaaacagaacagtgaatgttttgcccaaaactacaaaaataaaagaaaaaaagaaaattgcaatacatggctactaagtctttgatcataagtcgaatttatagacctggaatttgccatcctagtctttcctttttagtaagacttctgtcctctggcagtgcatatggtaggtctctaatgtttcttcatctccaggaagatgcagatccttatttttgctgggaaatccttctaaatagaaatgtaacatttttataaaaacagattaatgtgtttttcacttagtaaatgttttcaagagctgaattgagaaggaaagagactggagtggttaatggtgatttgatttctggcattctgagttttctgctacaattagctgcattacttggtgccaaagagcagtggggaattgttgagttgctgtatcctttaaaaaaaaacaaaaaacttgttattttgaaagaacttaaggctcacaagatgttacaaaaatagtagagtggccttaccctagatccagttttccccatttataacatttcacttagtccattttcggaaccagaaaattaacattggcataatgctattaactaaactacagaccttttttcaatttcgccagtttttccacacatattcatttagttgctggatacttttaattcttgctgatttgtaaactggccttgcttggatacaacaggaaagatactatctggataaagttctacagttttagagagactattaacacattaatgtgttcctttgtcatgagcaataccctgcctacactgcttctaaattttctgatttgtttggctgtttggcatctgaaacaatccaagacaaacttagaaagattaggcaacacaaaacacagtaagacctgttcatagcttgttgtctagaaaaccaggtagcaggatattctagatgcttcctgctgcttctacgtgagtaggattagcactggggacaaaataaggagtttagagtaaaccagtatttcagtcaagagttagttggcacttagttaatggcactggaaatagcttgtggagagaatagaatacaatggtatagactcctaatgtttgataaaatactattttcagagtggtagagaggttttatttgcctaaatagccgttattaaatggaataacaaccacattagaccaaattaattgcaaacacagcggcaacctggggagaagttgaaactccagttttgtggattacagttttgagttttatgattgacatttttaagtcccctatttaaggggtcaagattataacaatgtgtgtcttactaagtttctaggtcattgtgagcacttgataaatatttgctgaatgttgtttttttgaatgaacataagatagaaacaaaaacttctcatccagttaactagagtgaatgtagggagaattgttttgcttgtaacatggagagtttattttcaagtgaggaaagagaaaaaaattactcagacttgttcctggtgaagtgcattctctgtttgtatactttttgatggagaaattgatctatagaactgcttaattttttgaggcatttagacagcaatgaaaggtagttctccacaggacaccgaatcaaaaggagagaccagactctggcctcatacccagcctatttgaaacaagctatctagtttctcctgcagacaccttgtcaacaacatgcaacagtgtcaggtgccttgcaggaaaataatctgagtcccaagctagcctgtgctcatccacaatcacaatgaacatgtcaaggaagaatttgcagagactcaagggaagcacaatgggataaggtaatcactttcagtgaaaaactgttttcttgaaaacaggcttggacacaattgaaagctggcttcctgcaaacacaccaagagtctgtaatctagcctatccattatatgtcctttattattcatgatatcctattcttctaccttgttgcctggtaactttttctgaggactgagtttctgcagcgatgtggtgcactcttcctgtgatgaggaaacatctgggcccccttctgcaggctttggaagatgatgtgtcttgtcaaggggtaaagggcaaatggatttaatttctgcttaaaactatcatagacgttccaaatagaatatgtaaaatttctctgtattagaaaaagaaacgtgataccaattgtatattttcttttctttatttattctctgtaagtctgtcagatgataaattgtaaataacaatgattaaagagtcatgctactgatggatctccctttctgtataaacagtgccagttctgggctttgtaacctttgctctttatagtctttcattcctggggaagtgatggggcatgggcccagagctggggtgtatgtggtatggacacctgtttgtggggctttccagcaaaggattatttaaatagacctctaacatatgagttgactgtttattgggaagaaagcatcttggtctctgacatatccaaacatacgagacactgggattttacgtcctcacattaattagtccagttctggggaatccagtctagaattaactggtgatcccttatcgttatggttacagacttgtcttgtttgatacacagaaatcctttttaaatccaaatatagtctgtctcagactacctgcacatgcacaaaccaaaaaaaactatgaaaaccagaatttagactcagtcattatactagagattagaatgaaacgaccccaaacaacccatttcttacctggtctctgagaataagtttatacttttagttttctgagaatatttctcagaatatgtgagttttctgagcacatttttcagcatggggtatggtagataaatcacagggccaaggtttggcagggatagatgggatcattgtgtaccctattgttcttctgatttccaggagaacagaatgagcccatgcaaaacataaacttatgatgattaaaaaaaacacacctatccattcactcatcaataaaaacatattatgatggttatcaagctgtgtcctatgagtgataaaatatttgtaaaatataaaattaaatggcatctattttg

SEQ ID NO: 3100 - protein, 855 aa, Homo sapiens; identical to SEQ ID NO: 180

SEQ ID NO: 3101 - DNA, 432 bp, Homo sapiens
gctacttccgctctgaagccagtgagtgggaacctaatgccatttccttcccccttgtcctggatgacgtcaaccccagtgctcggtttgtcacggtgcctctccaccaccgaatggccagtgccatcaagtgtcaataccattttgcagatacctggatgatgttcagtgagatcaccttccaatcagatgctgcaatgtacaacaactctgaagccctgcccacctctcctatggcacccacaacctatgatccaatgcttaaagttgatgacagcaacactcggatcctgattggctgcttggtggccatcatctttatcctcctggccatcattgtcatcatcctctggaggcagttctgtcagcctttccctgccaagtgattctagcatgttcaacaataaccgctcctcatcacctagtgaacaa

SEQ ID NO: 3102 - protein, 90 aa, Homo sapiens
MASAIKCQYHFADTWMMFSEITFQSDAAMYNNSEALPTSPMAPTTYDPMLKVDDSNTRILIGCLVAIIFILLAIIVIILWRQFCQPFPAK

SEQ ID NO: 3103 - DNA, 2542 bp, Homo sapiens
gtactctgattggtgacgggtgaggcggcccgaaatcgtaggacttccgaaagcagcggcggtgtttgcttcactgcttggaagtgtgagtgcgcgaagatgcgaaaggtggttttgatcaccggggctagcagtggcattggcctggccctctgcaagcggctgctggcggaagatgatgagcttcatctgtgtttggcgtgcaggaacatgagcaaggcagaagctgtctgtgctgctctgctggcctctcaccccactgctgaggtcaccattgtccaggtggatgtcagcaacctgcagtcggtcttccgggcctccaaggaacttaagcaaaggtttcagagattagactgtatatatctaaatgctgggatcatgcctaatccacaactaaatatcaaagcacttttctttggcctcttttcaagaaaagtgattcatatgttctccacagctgaaggcctgctgacccagggtgataagatcactgctgatggacttcaggaggtgtttgagaccaatgtctttggccattttatcctggtaaagaagctgtgggcttaataagctaatatttcgtgtgatagtttctgtaaagctctgggcacagggcattattatagttgagcagccagttaactgatttaatctcatgtttgagttttcttgattgcatttgccttgtttattgtgagcatggaatacttctggaagctttcctagtagatttttctttaataaatgtactaatagtttttgatttacagaattactgcaaagatagtacagagactttctgtatgccctacacccagtttccccattattaacatttcgcattggtatgatgcatttgtcaaaatagatgaatcaattctgctacattattattaactaaagtacacactttattcaggttctgtttttgcctaatgtcttttttcagttctaggatcccattcaagatactacattacatttagcagtcatgtctccttaggctcttcttggttgtgacagcttctcagactttccttgtttttgatgaccttgacagttttgaggagtactgcttaggtgttttgtagactctctcaatcgggatttgtctgatgtttttctcatggtgagactgaagaatgtggtttttgggaggaaggccacagaggtaaagtgacattctcatgacatcatatcaagggtgtatgctatcagtatgacttctcagtgttgatattaaccttgatcacctggcttgaggtcatgtttgtcaggtttttccattgttaagttactttttctttctcccttttcatactctactttttgaaagaaagttgggccgggcacggtggctcctgcctctaatcccagcactttgggaggccaaggcgggcagattacctgaggtcgggagtttgagatcagcctgaccaacatggagaaaccccatctctatcaaaaaacaaaattagccgagtgtggtgacgcatgcctgtaatcccagctgcttgggaggctgaggcagaagaatcgcttgaacccgggaagcggaagttgtgattcgggaactggagcctctcctctgtcacagtgacaatccatctcagctcatctggacatcatctcgcagtgcaaggaaatctaatttcagcctcgaggacttccagcacagcaaaggcaaggaaccctacagctcttccaaatatgccactgaccttttgagtgtggctttgaacaggaacttcaaccagcagggtctctattccaatgtggcctgtccaggtacagcattgaccaatttgacatatggaattctgcctccgtttatatggacgctgttgatgccggcaatattgctacttcgcttttttgcaaatgcattcactttgacaccatataatggaacagaagctctggtatggcttttccaccaaaagcctgaatctctcaatcctctgatcaaatatctgagtgccaccactggctttggaagaaattacattatgacccagaagatggacctagatgaagacactgctgaaaaattttatcaaaagttactggaactggaaaagcacattagggtcactattcaaaaaacagataatcaggccaggctcagtggctcatgcctataattccagcactttgggaggccaaggcagaaggatcacttgagaccaggagttcaagaccagcctgagaaacatagtgagcccttgtctctacaaaaagaaataaaaataatagctgggtgtggtggcatgcgcatgtagtcccagctactcagaaggatgaggtgggaggatctcttgaggctgggaggcagaggttgcagtgagctgagattgtgccactgcactccagcctgggtgacagcgagaccctgtctcaaaatatgtatatatttaatatatatataaaaccagagctgacaatgacactctggaacattgcataccttctgtacattctggggtacatggatttctactgagttggataatatgcatttgtaataaactatgaactatga

SEQ ID NO: 3104 - protein, 155 aa, Homo sapiens
MRKVVLITGASSGIGLALCKRLLAEDDELHLCLACRNMSKAEAVCAALLASHPTAEVTIVQVDVSNLQSVFRASKELKQRFQRLDCIYLNAGIMPNPQLNIKALFFGLFSRKVIHMFSTAEGLLTQGDKITADGLQEVFETNVFGHFILVKKLWA

SEQ ID NO: 3105 - DNA, 1519 bp, Homo sapiens
tctgattggtgacgggtgaggcggcccgaaatcgtaggacttccgaaagcagcggcggtgtttgcttcactgcttggaagtgtgagtgcgcgaagatgcgaaaggtggttttgatcaccggggctagcagtggcattggcctggccctctgcaagcggctgctggcggaagatgatgagcttcatctgtgtttggcgtgcaggaacatgagcaaggcagaagctgtctgtgctgctctgctggcctctcaccccactgctgaggtcaccattgtccaggtggatgtcagcaacctgcagtcggtcttccgggcctccaaggaacttaagcaaaggtttcagagattagactgtatatatctaaatgctgggatcatgcctaatccacaactaaatatcaaagcacttttctttggcctcttttcaagaaaagtgattcatatgttctccacagctgaaggcctgctgacccagggtgataagatcactgctgatggacttcaggaggtgtttgagaccaatgtctttggccattttatcctgattcgggaactggagcctctcctctgtcacagtgacaatccatctcagctcatctggacatcatctcgcagtgcaaggaaatctaatttcagcctcgaggacttccagcacagcaaaggcaaggaaccctacagctcttccaaatatgccactgaccttttgagtgtggctttgaacaggaacttcaaccagcagggtctctattccaatgtggcctgtccaggtacagcattgaccaatttgacatatggaattctgcctccgtttatatggacgctgttgatgccggcaatattgctacttcgcttttttgcaaatgcattcactttgacaccatataatggaacagaagctctggtatggcttttccaccaaaagcctgaatctctcaatcctctgatcaaatatctgagtgccaccactggctttggaagaaattacattatgacccagaagatggacctagatgaagacactgctgaaaaattttatcaaaagttactggaactggaaaagcacattagggtcactattcaaaaaacagataatcaggccaggctcagtggctcatgcctataattccagcactttgggaggccaaggcagaaggatcacttgagaccaggagttcaagaccagcctgagaaacatagtgagcccttgtctctacaaaaagaaataaaaataatagctgggtgtggtggcatgcgcatgtagtcccagctactcagaaggatgaggtgggaggatctcttgaggctgggaggcagaggttgcagtgagctgagattgtgccactgcactccagcctgggtgacagcgagaccctgtctcaaaatatgtatatatttaatatatatataaaaccagagctgacaatgacactctggaacattgcataccttctgtacattctggggtacatggatttctactgagttggataatatgcatttgtaataaactatgaactatga

SEQ ID NO: 3106 - protein, 341 aa, Homo sapiens; identical to SEQ ID NO: 184

SEQ ID NO: 3107 - DNA, 1201 bp, Homo sapiens
ccgaaagcagcggcggtgtttgcttcactgcttggaagtgtgagtgcgcgaagatgcgaaaggtggttttgatcaccggggctagcagtggcattggcctggccctctgcaagcggctgctggcggaagatgatgagcttcatctgtgtttggcgtgcaggaacatgagcaaggcagaagctgtctgtgctgctctgctggcctctcaccccactgctgaggtcaccattgtccaggtggatgtcagcaacctgcagtcggtcttccgggcctccaaggaacttaagcaaaggtatatctcttgctgatggattttttttctcatgtgattgtgcagcataacacttaataaaataagagaggaaagaaaaacctgaaaagaaacaggtgcggtgtaagcagttatgttgaggaagtctgtatagggtgacccattgtgtctcagtaccacgttttctttctttttttttttttttttaaagagatggagtcttgctctgttgcccaggctggagtgcaatggcgtgatctcggctcacttcaacctccacctcctgggttccaagtgattctcctgcctccacctcctgagtagctgggattacagacatgcgccaccatgcctggttaatttttgtatttttagtagagacggggttttaccatgttggtcaggctggtttcgaacccctgacctcgtgatccacccgcctcggcctcccaaagtgctgggattacaggcgtgagccattgcgcctggccagtaccacattttcagtctcaatcatgatcataattatttcatggagactaatttatgagtacatcctgatgtgtgatcagttggtactgggattacaggcgtgagccattgcgcccagccagtaccacattttcagtctcagtcatgatcataattatttcatggagactaagttatgagtacatcctgatatgtgatcgatcagttggtgctgggattacaggtgtgaaccattgcacttggccagtaccacattttcaatctcaatcatgatcataattatttcatggagactaatttgtaagtacatcctgatgtgtgatcagttgcactgccttacgttaaggtaactcctttgacatttgaattcattttttacatctttcttcacataatgaattcattaagtagataaggcaagtagtgagtgacatttaa

SEQ ID NO: 3108 - protein, 84 aa, Homo sapiens
MRKVVLITGASSGIGLALCKRLLAEDDELHLCLACRNMSKAEAVCAALLASHPTAEVTIVQVDVSNLQSVFRASKELKQRYISC

SEQ ID NO: 3109 - DNA, 728 bp, Homo sapiens
cagtggcattggcctggccctctgcaagcggctgctggcggaagatgatgagcttcatctgtgtttggcgtgcaggaacatgagcaaggcagaagctgtctgtgctgctctgctggcctctcaccccactgctgaggtcaccattgtccaggtggatgtcagcaacctgcagtcggtcttccgggcctccaaggaacttaagcaaaggtttcagagattagactgtatatatctaaatgctgggatcatgcctaatccacaactaaatatcaaagcacttttctttggcctcttttcaagaaaagtgattcatatgttctccacagctgaaggcctgctgacccagggtgataagatcactgctgatggacttcaggaggtgtttgagaccaatgtctttggccattttatcctggtaaagaagctgtgggcttaataagctaatatttcgtgtgatagtttctgtaaagctctgggcacagggcattattatagttgagcagccagttaactgatttaatctcatgtttgagttttcttgattgcatttgccttgtttattgtgagcatggaatacttctggaagctttcctagtagatttttctttaataaatgtactaatagtttttgatttacagaattactgcaaagatagtacagagactttctgtatgccctacacccagtttccccattattaacatttcgcattggtatgatgcatttg

SEQ ID NO: 3110 - protein, 118 aa, Homo sapiens
MSKAEAVCAALLASHPTAEVTIVQVDVSNLQSVFRASKELKQRFQRLDCIYLNAGIMPNPQLNIKALFFGLFSRKVIHMFSTAEGLLTQGDKITADGLQEVFETNVFGHFILVKKLWA

SEQ ID NO: 3111 - DNA, 664 bp, Homo sapiens
cgggagcacccccctcaagctagaggtatgggtcttatgtacttgcagggaaacagacacatactttaggtttagctgtctatttattaggccagaaacttcttgaaggcaaggactgtactccatacatcttttaatcttaaatgctcattatgattaaaaagctgatcttcagttaagccaataataggaaaaactcagataaccaggccctgcttttctcccccagcgttaagattggttattttttatactgcaaggttcatgagaatagagactttgtcccactaatttttgcatcctgggtgcctctcacagtgggttctcttaatacatgattcttcaacataaacgttctacccaacttcagagacaactcagaacataaattctttattacctgacttctggctcatgtacatacctcttttattaactagcatgtagctggactgagtcaatatacactgagttaaagtctcattgctacacctctctgttcctagggtctctattccaatgtggcctgtccaggtacagcattgaccaatttgacatatggaattctgcctccgtttatatggacgctgttgatgccggcaatattgctacttcgcttttttgcaaatgcattcactttgacaccatataatggaacagaagc

SEQ ID NO: 3112 - protein, 52 aa, Homo sapiens
ANNRKNSDNQALLFSPSVKIGYFLYCKVHENRDFVPLIFASWVPLTVGSLNT

SEQ ID NO: 3113 - DNA, 933 bp, Homo sapiens
tccaggcatacttttgcttgagttccttagaggcctggagcactgactgcaggttgccatccacctgcatcgtggtgaccttgaccgtatggtgagaggccagcagagttgcatggacagcttctgtattgctcatgttcctgcatggcaaacacaggtgaagctcatcatcttccaccagcagctgctgcagaaggataggtcaatgccaccgggagggcagttcagacacagaatgtgcattatctggatggcatcaggtaaatgattcttccctccaatgcttagtcattggagggaagctgtaaggggtgcaacatccaatgaagctctgccagtccttgttctacttgttaattaaacctaattgagagaagctctacatcatgaaacaactggaaaccgatacatgaccacgtgagttaggaccccaggctctgagccgagttggggatggtcggctgctctctcccgccgcacctggaggattactaggatccatctgaaggcagagctcaggtccctggagccacgcctgattcaactgcaaattccctgagctccccgagctgggcgctgttgggaggtggctggtggcgagccaaatgcgtctctgcccagctaggggatgcagtcacggggcgtcagagttgtgagttccccacccagtccggtggggtccacggggaggcgttcacctgctcactccgtaaccaaaaccaccttcctcatcatcagcgtgataagcacgaaaaccgagcacgcaagcaacagagaccacagcagtttcccagtttatttctatccgagactgacccagcggctccacccacggctcagccgtcgccccctagtaccgcaccggagcacccagggatgccagcctcccgggcccagcccagcgccgcccgcgccagtcccgcccggcggccg

SEQ ID NO: 3114 - protein, 59 aa, Homo sapiens
MVRGQQSCMDSFCIAHVPAWQTQVKLIIFHQQLLQKDRSMPPGGQFRHRMCIIWMASGK

SEQ ID NO: 3115 - DNA, 1494 bp, Homo sapiens
ttctgcggctcactcccctcggatggtctttccacccgagtttttcccgggaagaggctctcaagactagccagtgcaggaggaggagtcgaactctggatagcctgtttataaagccctaactgtgccgatgttgaccgttttctgaaactcctcctccaaaacccacgccaaaccacaagatgaaggaaattcacacatcaggatgccaaaaaccatggaagacttctgatgttctgggagggttgacaaagatggaccttaaattctagaatttaggtattcatggttgagatcctgaagaaaacattttctgctgagcagaagcaatttaataattgcctcccttcatttcagaatccagaagtgtctgcagccaaccaaagagggaatgtttgatggacagaagttggaatggaaggagaaaatggcttattttagttaaaatgttttacttttggaaatttttttaaaaacttattttcacatatcacataaatacattgttaggacccctcccagggccatagaagtggcctgcacagacatctggttttaaagtggcagtacagaagcaagctggtttcactgtccccacagaaaaccaaaaatatacagagctgtgattttccccagcaacagtccagaactcatatatgaggatgagacagatcctagggccataaagaaaaaaacttctttggaaaaaaactccaagcagatgttaaggtcgatcacaagacttctaatcacatactgagaaaacaaaagcatcactgcaggaaatccctttaaacttttgccttatggcaaatggacatatgctcaaaggtgctgaacacatgaaataaggctgtaaaaatctactaaacaaatgaaaataattacattgcaaatgcttttttccttagagcacttgttttaagaaatgtatttctggaatacaagctagaagtggttttgtcctgctgctgagggttaaaggcaaacttaaggtctccagcctttggtgtgacacatgagagcgaataacaaaaagaaggtcttgagttttttgatagttaggcatattttcattataatggtatccagatatgtgatatatctgatatataatacacatatagacacatatatgtctctctatatatttgtatataggtagattttattatatgtgaaatctgcatataactataatgaaagtctcaactgttacctcaataacctttaacctgactacaatatttaaaagttcaatctcactaccagaacacaccctgacacttctgattctattttgctttatgttttgcatattgtttgtcaacttctatcatatgacttagtatgtttattatttattgtcctctctctccattgaagagaatttttgattccttaaagaaaatatttctcacatgatcagttttttaatttacaaaatatctcaatgtcaatgtacccatttcaaatatatgtgtgttaaacatt

SEQ ID NO: 3116 - protein, 37 aa, Homo sapiens
MVEILKKTFSAEQKQFNNCLPSFQNPEVSAANQRGNV

SEQ ID NO: 3117 - DNA, 429 bp, Homo sapiens
ccgagtttttcccgggaagaggctctcaagactagccagtgcaggaggaggagtcgaactctggatagcctgtttataaagccctaactgtgccgatgttgaccgttttctgaaactcctcctccaaaacccacgccaaaccacaagatgaaggaaattcacacatcaggatgccaaaaaccatggaagacttctgatgttctgggagggttgacaaagatggaccttaaattctagaatttaggtattcatggttgagatcctgaagaaaacattttctgctgagcagaagcaatttaataattgcctcccttcattgtaagttttttatttcttccttatgtctgattaatcccccaatataaacttcaattaattgagcagctctgcaaaatatatgaataaaacaccacatattaagatattata

SEQ ID NO: 3118 - protein, 32 aa, Homo sapiens
RKHFLLSRSNLIIASLHCKFFISSLCLINPPI

SEQ ID NO: 3119 - DNA, 4318 bp, Homo sapiens
actgggcgatcaggcagcgaccctagaggcgtctgtagggtaaagctgggggttctgtagccggaggcggcggcgagtccagaacgtcctggccttacagggagaaggcgtcactcgcggttacaagtgcctgaccctcactccagttggcggaggaggagaaggaaggggccgggccgggtcccctcccctcgcgccccggatggatgtgcccggcccggtgtctcggcgggcggcggcggcggcggccactgtgctcctgcggaccgctcgggtccgtcgcgaatgctggttcttgccgaccgcgctgctctgcgcctacggcttcttcgccagcctcaggccgtccgagcccttcctgaccccgtacctgctggggccggacaagaacctgaccgagagggaggtcttcaatgaaatttatccagtatggacttactcttacctggtgctactgtttcctgtgttccttgccacagactacctccgttataaacctgttgttctactgcaggggctcagccttattgttacatggtttatgctgctctatgcccagggactgctggccattcaatttctagaatttttttatggcatcgccacagccactgaaattgcctattactcttatatctacagtgtggtggacctgggcatgtaccagaaagtcacaagttactgtcgaagtgccactttggtgggctttacagtgggctctgtcctagggcaaatccttgtctcagtggcaggctggtcgctgttcagcctgaatgtcatctctcttacctgtgtttcagtggcttttgctgtggcctggtttttacctatgccacagaagagcctcttctttcaccacattccttctacctgccagagagtgaatggcatcaaggtacaaaatggtggcattgttactgacaccccagcttctaaccaccttcctggctgggaggacattgagtcaaaaatccctctaaatatggaggagcctcccgtggaggaaccggaacccaagccagaccgtctccttgtattgaaagtactatggaatgatttcctgatgtgctactcctctcgccctcttctctgctggtctgtgtggtgggccctctctacctgtggctattttcaagttgtgaactacacacagggcctgtgggagaaagtgatgccttctcgctatgctgctatctataatggtggcgtggaggccgtttcaaccttactgggtgctgttgctgtgtttgcagttggttatataaaaatatcctggtcaacttggggagaaatgacattatctctcttttctctcctgattgctgctgcagtgtatatcatggacactgtgggtaacatttgggtgtgctatgcatcctatgttgtcttcagaatcatctacatgttactcatcacgatagcaacttttcaaattgctgcaaacctcagcatggaacgctatgccctagtatttggtgtaaataccttcattgccctggcactgcagacgctgctcactctaattgtggtagatgccagtggccttggattagaaattaccactcagtttttgatctatgccagttattttgcactcatcgctgtggttttcctggccagtggtgcagtcagtgttatgaagaaatgtagaaagctggaagatccacaatcaagttctcaagtaaccacttcataatatactgctgaagggcttcttcttatagcaagaactctgcacagcaactgcctggatgtgtttgattttttaaagcgtagacatatatttatgaatgtgcatttcttgacttcacagcagccacttgactaataccttgtgttccgggaataacatgatactattcagaggagccagaagtaaagtttatttcatggattatttatgagagctaatttaaggatgactttttttctgattcaaaagtgaacttgattttaaaaaccagtcaagagcaatcaaagcagcacatggtgttgtatacttcattagcaagtgagtttggtgttttataggtcacatatgtctgtatctacttagccagatgcttggcctggtgggaccagggctccacagaggccacaaaatgttgcaagtcatgatggatggaaatatgttctaacagcatctgcctctattcaatttaattcttatttctgtgttactcatgtacattggtctttctacatagttattctatcactggcaatatttgttctggtttagtgttctgtattttaaggtgtacgtatcatttctaattttaagttattttaaaaaaattcatcatatgaatgttcttggttcccattgtgacgattatttatttctgtaaaatttgtttagaagtacgtttttgcattattcatatgcttcccagagaagctcatttagttagaaaataaggcaagttttgaagcctgctaaatgaagagacttaagaaagcttaaggtacgcttgcttgtctttaaatcttcaatatgaaggactattaattccaagattaaaagttcatatataggctaaagatgtaactaggccatttgtatttgtattcccttttatttccaaaataaaatgaaaaatctttttttaataatttcatccctatttatagtttttatattaatttgtttttcttatccaagtaaagatgtcaataggaattgcattagtccaaggcctttttcataaactgagcctcttttcaattatttcaatgggacaggaactaggatagatgtgattcctgcatttttttaccttaaatctgcctttgtttctaaaggtagatcatcttgaatatttgcttaaaattgctagtgatttcattaccaagttacttgaaaaaatgttctatatgcatttaattctgaaatcagtctaccaaggggctgctagtatatgtcagacatgaaaactattttaaagctgactttgttgccttatcttgaaaagaatctagataggtgcttttaactggggtattaacttttttagaatgacacagctgaacagtgttaataatagtgtgtcaagattgcaaagtcgacatactcatttggtttaagcaggaatcctagaagcaaatggatggggataagaataggtcattttctattcaccatcctttactattaagggaaaggaaaagaacactagctaaggaagggaaagggaagtgatatcataaaagtagcaaccttcattttacattctgtctgtttttctttttttgctttgttttgtttgtgctaatttgggaattgtgtactccgaaacaagtagaaaagtgctgtttgagggattttattaaatctttttttaatggaatgtggtacaaattgttcatgttaccaaagcaatatttccctggaatttaattcaaagtttgtggcatacaacctgagccttttcttatataagacaagaatatgttcacatcttggtatgtggccatatttatagaatgctgaactcaatgtgcaagttgtactgtatgcagttttgtaaataagtgaaaataatttgttgtactttttattcaattctgtatagattataaaattatttttattaaataaatattttacagtatattttctctttttaatcaaaattgttttaaatttatcttctatttcagtaggagctttagattatatctttaaatattttaataatttatcctaggacaaatttcatattaagtcttcccctggtctaacttgcctagttaaccttttgttatctttttaattattccattgctttgtgatttttacctttgactcttcccccttatttcagatgttttcccccttttttttggcaccccgttgcactgtttttttttttttttttggttttcatgttggcactgctcttatctctttttaaagcattcttccttaaaaaaaaaaaaagacactctctttgatgttaactgaatttttacaataaaggaaattaaagcaagagcagaaaataccaccttgttctgaaacttcatagcctctttgttccacctcaaattattctgatacccagggaggaatcttcttgccatgagttgagaatcatttgtccattatatcccagaaacctaatcagtattttcttacagtatccaaatgagtaccattttttaatataccatttcaaaatctacttaaggcattgatttcgctgcttatcaccaaagtcctggaaatttttcatgcaaaaataaattttttttttttgagacagtcttgcactgttgcccaggctgcagtgcagtggcaatctcggctcactgc

SEQ ID NO: 3120 - protein, 497 aa, Homo sapiens; identical to SEQ ID NO: 186

SEQ ID NO: 3121 - DNA, 3019 bp, Homo sapiens
gcagcgaccctagaggcgtctgtagggtaaagctgggggttctgtagccggaggcggcggcgagtccagaacgtcctggccttacagggagaaggcgtcactcgcggttacaagtgcctgaccctcactccagttggcggaggaggagaaggaaggggccgggccgggtcccctcccctcgcgccccggatggatgtgcccggcccggtgtctcggcgggcggcggcggcggcggccactgtgctcctgcggaccgctcgggtccgtcgcgaatgctggttcttgccgaccgcgctgctctgcgcctacggcttcttcgccagcctcaggccgtccgagcccttcctgaccccgtacctgctggggccggacaagaacctgaccgagagggaggaacccaagccagaccgtctccttgtattgaaagtactatggaatgatttcctgatgtgctactcctctcgccctcttctctgctggtctgtgtggtgggccctctctacctgtggctattttcaagttgtgaactacacacagggcctgtgggagaaagtgatgccttctcgctatgctgctatctataatggtggcgtggaggccgtttcaaccttactgggtgctgttgctgtgtttgcagttggttatataaaaatatcctggtcaacttggggagaaatgacattatctctcttttctctcctgattgctgctgcagtgtatatcatggacactgtgggtaacatttgggtgtgctatgcatcctatgttgtcttcagaatcatctacatgttactcatcacgatagcaacttttcaaattgctgcaaacctcagcatggaacgctatgccctagtatttggtgtaaataccttcattgccctggcactgcagacgctgctcactctaattgtggtagatgccagtggccttggattagaaattaccactcagtttttgatctatgccagttattttgcactcatcgctgtggttttcctggccagtggtgcagtcagtgttatgaagaaatgtagaaagctggaagatccacaatcaagttctcaagtaaccacttcataatatactgctgaagggcttcttcttatagcaagaactctgcacagcaactgcctggatgtgtttgattttttaaagcgtagacatatatttatgaatgtgcatttcttgacttcacagcagccacttgactaataccttgtgttccgggaataacatgatactattcagaggagccagaagtaaagtttatttcatggattatttatgagagctaatttaaggatgactttttttctgattcaaaagtgaacttgattttaaaaaccagtcaagagcaatcaaagcagcacatggtgttgtatacttcattagcaagtgagtttggtgttttataggtcacatatgtctgtatctacttagccagatgcttggcctggtgggaccagggctccacagaggccacaaaatgttgcaagtcatgatggatggaaatatgttctaacagcatctgcctctattcaatttaattcttatttctgtgttactcatgtacattggtctttctacatagttattctatcactggcaatatttgttctggtttagtgttctgtattttaaggtgtacgtatcatttctaattttaagttattttaaaaaaattcatcatatgaatgttcttggttcccattgtgacgattatttatttctgtaaaatttgtttagaagtacgtttttgcattattcatatgcttcccagagaagctcatttagttagaaaataaggcaagttttgaagcctgctaaatgaagagacttaagaaagcttaaggtacgcttgcttgtctttaaatcttcaatatgaaggactattaattccaagattaaaagttcatatataggctaaagatgtaactaggccatttgtatttgtattcccttttatttccaaaataaaatgaaaaatctttttttaataatttcatccctatttatagtttttatattaatttgtttttcttatccaagtaaagatgtcaataggaattgcattagtccaaggcctttttcataaactgagcctcttttcaattatttcaatgggacaggaactaggatagatgtgattcctgcatttttttaccttaaatctgcctttgtttctaaaggtagatcatcttgaatatttgcttaaaattgctagtgatttcattaccaagttacttgaaaaaatgttctatatgcatttaattctgaaatcagtctaccaaggggctgctagtatatgtcagacatgaaaactattttaaagctgactttgttgccttatcttgaaaagaatctagataggtgcttttaactggggtattaacttttttagaatgacacagctgaacagtgttaataatagtgtgtcaagattgcaaagtcgacatactcatttggtttaagcaggaatcctagaagcaaatggatggggataagaataggtcattttctattcaccatcctttactattaagggaaaggaaaagaacactagctaaggaagggaaagggaagtgatatcataaaagtagcaaccttcattttacattctgtctgtttttctttttttgctttgttttgtttgtgctaatttgggaattgtgtactccgaaacaagtagaaaagtgctgtttgagggattttattaaatctttttttaatggaatgtggtacaaattgttcatgttaccaaagcaatatttccctggaatttaattcaaagtttgtggcatacaacctgagccttttcttatataagacaagaatatgttcacatcttggtatgtggccatatttatagaatgctgaactcaatgtgcaagttgtactgtatgcagttttgtaaataagtgaaaataatttgttgtactttttattcaattctgtatagattataaaattatttttattaaataaatattttacagtatattttctctttttaatcaaa

SEQ ID NO: 3122 - protein, 296 aa, Homo sapiens
MDVPGPVSRRAAAAAATVLLRTARVRRECWFLPTALLCAYGFFASLRPSEPFLTPYLLGPDKNLTEREEPKPDRLLVLKVLWNDFLMCYSSRPLLCWSVWWALSTCGYFQVVNYTQGLWEKVMPSRYAAIYNGGVEAVSTLLGAVAVFAVGYIKISWSTWGEMTLSLFSLLIAAAVYIMDTVGNIWVCYASYVVFRIIYMLLITIATFQIAANLSMERYALVFGVNTFIALALQTLLTLIVVDASGLGLEITTQFLIYASYFALIAVVFLASGAVSVMKKCRKLEDPQSSSQVTTS

SEQ ID NO: 3123 - DNA, 3667 bp, Homo sapiens
ggcagagggtgggccttaggacgggtctcccttaaactgggcgatcaggcagcgaccctagaggcgtctgtagggtaaagctgggggttctgtagccggaggcggcggcgagtccagaacgtcctggccttacagggagaaggcgtcactcgcggttacaagtgcctgaccctcactccagttggcggaggaggagaaggaaggggccgggccgggtcccctcccctcgcgccccggatggatgtgcccggcccggtgtctcggcgggcggcggcggcggcggccactgtgctcctgcggaccgctcgggtccgtcgcgaatgctggttcttgccgaccgcgctgctctgcgcctacggcttcttcgccagcctcaggccgtccgagcccttcctgaccccgtacctgctggggccggacaagaacctgaccgagagggaggtcttcaatgaaatttatccagtatggacttactcttacctggtgctactgtttcctgtgttccttgccacagactacctccgttataaacctgttgttctactgcaggggctcagccttattgttacatggtttatgctgctctatgcccagggactgctggccattcaatttctagaatttttttatggcatcgccacagccactgaaattgcctattactcttatatctacagtgtggtggacctgggcatgtaccagaaagtcacaagttactgtcgaagtgccactttggtgggctttacagtgggctctgtcctagggcaaatccttgtctcagtggcaggctggtcgctgttcagcctgaatgtcatctctcttacctgtgtttcagtggcttttgctgtggcctggtttttacctatgccacagaagagcctcttctttcaccacattccttctacctgccagagagtgaatggcatcaaggtacaaaatggtggcattgttactgacaccccagcttctaaccaccttcctggctgggaggacattgagtcaaaaatccctctaaatatggaggagcctcccgtggaggaaccggaacccaagccagaccgtctccttgtattgaaagtactatggaatgatttcctgatgtgctactcctctcgccctcttctctgctggtctgtgtggtgggccctctctacctgtggctattttcaagttgtgaactacacacagggcctgtgggagaaagtgatgccttctcgctatgctgctatctataatggtggcgtggaggccgtttcaaccttactgggtgctgttgctgtgtttgcagttggttatataaaaatatcctggtcaacttggggagaaatgacattatctctcttttctctcctgattgctgctgcagtgtatatcatggacactgtgggtaacatttgggtgtgctatgcatcctatgttgtcttcagaatcatctacatgttactcatcacgatagcaacttttcaaattgctgcaaacctcagcatggaacgctatgccctagtatttggtgtaaataccttcattgccctggcactgcagacgctgctcactctaattgtggtagatgccagtggccttggattagaaattaccactcagtttttgatctatgccagttattttgcactcatcgctgtggttttcctggccagtggtgcagtcagtgttatgaagaaatgtagaaagctggaagatccacaatcaagttctcaagtaaccacttcataatatactgctgaagggcttcttcttatagcaagaactctgcacagcaactgcctggatgtgtttgattttttaaagcgtagacatatatttatgaatgtgcatttcttgacttcacagcagccacttgactaataccttgtgttccgggaataacatgatactattcagaggagccagaagtaaagtttatttcatggattatttatgagagctaatttaaggatgactttttttctgattcaaaagtgaacttgattttaaaaaccagtcaagagcaatcaaagcagcacatggtgttgtatacttcattagcaagtgagtttggtgttttataggtcacatatgtctgtatctacttagccagatgcttggcctggtgggaccagggctccacagaggccacaaaatgttgcaagtcatgatggatggaaatatgttctaacagcatctgcctctattcaatttaattcttatttctgtgttactcatgtacattggtctttctacatagttattctatcactggcaatatttgttctggtttagtgttctgtattttaaggtgtacgtatcatttctaattttaagttattttaaaaaaattcatcatatgaatgttcttggttcccattgtgacgattatttatttctgtaaaatttgtttagaagtacgtttttgcattattcatatgcttcccagagaagctcatttagttagaaaataaggcaagttttgaagcctgctaaatgaagagacttaagaaagcttaaggtacgcttgcttgtctttaaatcttcaatatgaaggactattaattccaagattaaaagttcatatataggctaaagatgtaactaggccatttgtatttgtattcccttttatttccaaaataaaatgaaaaatctttttttaataatttcatccctatttatagtttttatattaatttgtttttcttatccaagtaaagatgtcaataggaattgcattagtccaaggcctttttcataaactgagcctcttttcaattatttcaatgggacaggaactaggatagatgtgattcctgcatttttttaccttaaatctgcctttgtttctaaaggtagatcatcttgaatatttgcttaaaattgctagtgatttcattaccaagttacttgaaaaaatgttctatatgcatttaattctgaaatcagtctaccaaggggctgctagtatatgtcagacatgaaaactattttaaagctgactttgttgccttatcttgaaaagaatctagataggtgcttttaactggggtattaacttttttagaatgacacagctgaacagtgttaataatagtgtgtcaagattgcaaagtcgacatactcatttggtttaagcaggaatcctagaagcaaatggatggggataagaataggtcattttctattcaccatcctttactattaagggaaaggaaaagaacactagctaaggaagggaaagggaagtgatatcataaaagtagcaaccttcattttacattctgtctgtttttctttttttgctttgttttgtttgtgctaatttgggaattgtgtactccgaaacaagtagaaaagtgctgtttgagggattttattaaatctttttttaatggaatgtggtacaaattgttcatgttaccaaagcaatatttccctggaatttaattcaaagtttgtggcatacaacctgagccttttcttatataagacaagaatatgttcacatcttggtatgtggccatatttatagaatgctgaactcaatgtgcaagttgtactgtatgcagttttgtaaataagtgaaaataatttgttgtactttttattcaattctgtatagattataaaattatttttattaaataaatattttacagtatattttctctttttaatc

SEQ ID NO: 3124 - protein, 497 aa, Homo sapiens; identical to SEQ ID NO: 186

SEQ ID NO: 3125 - DNA, 1396 bp, Homo sapiens
ggattatgttttacttttatagctatgctctgcactggcaagagattttgcaacaattttttattgtttgcctaaaaccttagaaccttagctcatattagacttgagtgaactgagatgtacaggaaagataaaaagaaagttactattggtctcagaatgtaaaagtctgggattaggttgcttcatcacaaagtattcagccttttaccaaaactacctttcaaaaagcacttaaaagttgaggccactgacaaaaggaaggaaaaatctcctacagtgattgttgttggaagaatgggaatgatagctcaattaatttagttaattcatactgccccagatgtccttgtcagcttgtcctctagtcttcagactttgtgaataaatcaggtggagtaagtaatttacatgttgtgtctcatttactttttgcaacaaacaaccgccctttactgataatggagattaaggctaaggggaactaaaagaatgttgtctacaatcacacagcaagtgatggaactgaaattcctgttggggtctttctggtttaaagtttattttaaagatcatttctactatatcccaattttaaaatatgcattagaaagaaaacagcaaaaacttcttttttctatttaaaaacaagcaaaaagaaggacataaaagttgcctatattcctgccatctagagagacttaattctgtcaagactgtaggacacattgaccatctttatttgttcctctgccccaaaagaaacaaaacttaaagtcagagaagcttaatgaaacagtaggataaaggctccctatcttgtgtctagaagtaagaattgacagtgattccgttttcaaagcatttattgaatagtatcttccaaacagtatgctggcttttagacaggttatacaggtgaatgtaggggtctatccttaaaaagcctataaggcagttgttctcaactctggctcatttaaaactctattgggaagtttttagaaaatatctgtggctgggcattttttttttttaaagagacagagtcttgctctgtcatacagactggagtgtagtggtgtgatcataagtcactgcagccccaaactcctgggctcaagcaattctcccacctcagcctcctgagtagcagccataggcatgtgccacaacgcttggctaacacatttttttaaagcttcttaggagatgcagccatggtgaagagccagtattatgaattaattggggaaactgatgcatatagatcagtattaggagagtttgaggtgaggtggaaggatcacctgagcctcacctgaggcggaggttgcagtgaaccatgattctgccactgcattccagcctaggtgacagagggagaccctgtctc

SEQ ID NO: 3126 - protein, 34 aa, Homo sapiens
MVKSQYYELIGETDAYRSVLGEFEVRWKDHLSLT

SEQ ID NO: 3127 - DNA, 1416 bp, Homo sapiens
tgcttttttgcataacttggtctaaaaaaaaagcaaaggttttaacatcttccttatctatgtgtttttgtcattttcataggcaaacaacaataagcagtggctagaaattgatctactcaagatcaagaagataacggcaattataacacagggctgcaagtctctgtcctctgaaatgtatgtaaagagctataccatccactacagtgagcagggagtggaatggaaaccatacaggctgaaatcctccatggtggacaagatttttgaaggaaatactaataccaaaggacatgtgaagaactttttcaaccccccaatcatttccaggtttatccgtgtcattcctaaaacatggaatcaaagtattgcacttcgcctggaactctttggctgtgatatttactagaattgaacattcaaaaacccctggaagagactctttaagacctcaaaccatttagaatgggcaatgtattttacgctgtgttaaatgttaacagttttccactatttctctttcttttctattagtgaataaaattttatacaagaagcttttataatgtaactccttgctaccagtaagtaagataatggctattacttctgcattaatttgaatacaggtaggaaaatatcaagaaccaacaagaaaagggcttatctttcttaatgattgaaaatgctatgaagtaatatttatgtagttaaaatgcttcattataactcttttaaatcctttacacactagtaaaacagatattactttaaataataattgatagacctggataactttcacaaacacatgattttttaatggtttttcttgagtgaagagaaaaacaatattatcaaatgaaataagtacttaaaatatcctgtctttcccatataacaatgatttttctgactttccatgagtaaaaaaacagccaagcatctttccagtagccccattgaaattgtgaatccgtcctggtctccctaaggactgcacacattgatattcaaggttggtggtcattagatatggaacagaactgaaataaccatggtagaactgaatgtgtaatgttggctttattctagctggtactacatggcacacagtttcaaaacataatttcacctactggaaagctcagacctgtaaaacagagcatgggaactgctggtctaaatgcagttgttcctgctcaaagagacctctggccaaactggcaagcagttaaagttttctttcagggccttcctctctatggcctcaacttcctcctctctcttcttccagcaacttcccctttcatcattcctttccctggggacttggcattcagtgatcctgtagatattgcacaactggggaacctttagacatccttaaaatcacatgagatagacagtcat

SEQ ID NO: 3128 - protein, 77 aa, Homo sapiens
MYVKSYTIHYSEQGVEWKPYRLKSSMVDKIFEGNTNTKGHVKNFFNPPIISRFIRVIPKTWNQSIALRLELFGCDIY

SEQ ID NO: 3129 - DNA, 7862 bp, Homo sapiens
gcggagggagtgagagccagaggctgctgctgccgtttgcaagaactgcaggggaggaggacgctgccacccacagcctctagagctcattgcagctgggacagcccggagtgtggttagcagctcggcaagcgctgcccaggtcctggggtggtggcagccagcgggagcaggaaaggaagcatgttcccaggctgcccacgcctctgggtcctggtggtcttgggcaccagctgggtaggctgggggagccaagggacagaagcggcacagctaaggcagttctacgtggctgctcagggcatcagttggagctaccgacctgagcccacaaactcaagtttgaatctttctgtaacttcctttaagaaaattgtctacagagagtatgaaccatattttaagaaagaaaaaccacaatctaccatttcaggacttcttgggcctactttatatgctgaagtcggagacatcataaaagttcactttaaaaataaggcagataagcccttgagcatccatcctcaaggaattaggtacagtaaattatcagaaggtgcttcttaccttgaccacacattccctgcggagaagatggacgacgctgtggctccaggccgagaatacacctatgaatggagtatcagtgaggacagtggacccacccatgatgaccctccatgcctcacacacatctattactcccatgaaaatctgatcgaggatttcaactcggggctgattgggcccctgcttatctgtaaaaaagggaccctaactgagggtgggacacagaagacgtttgacaagcaaatcgtgctactatttgctgtgtttgatgaaagcaagagctggagccagtcatcatccctaatgtacacagtcaatggatatgtgaatgggacaatgccagatataacagtttgtgcccatgaccacatcagctggcatctgctgggaatgagctcggggccagaattattctccattcatttcaacggccaggtcctggagcagaaccatcataaggtctcagccatcacccttgtcagtgctacatccactaccgcaaatatgactgtgggcccagagggaaagtggatcatatcttctctcaccccaaaacatttgcaagctgggatgcaggcttacattgacattaaaaactgcccaaagaaaaccaggaatcttaagaaaataactcgtgagcagaggcggcacatgaagaggtgggaatacttcattgctgcagaggaagtcatttgggactatgcacctgtaataccagcgaatatggacaaaaaatacaggtctcagcatttggataatttctcaaaccaaattggaaaacattataagaaagttatgtacacacagtacgaagatgagtccttcaccaaacatacagtgaatcccaatatgaaagaagatgggattttgggtcctattatcagagcccaggtcagagacacactcaaaatcgtgttcaaaaatatggccagccgcccctatagcatttaccctcatggagtgaccttctcgccttatgaagatgaagtcaactcttctttcacctcaggcaggaacaacaccatgatcagagcagttcaaccaggggaaacctatacttataagtggaacatcttagagtttgatgaacccacagaaaatgatgcccagtgcttaacaagaccatactacagtgacgtggacatcatgagagacatcgcctctgggctaataggactacttctaatctgtaagagcagatccctggacaggcaaggaatacagagggcagcagacatcgaacagcaggctgtgtttgctgtgtttgatgagaacaaaagctggtaccttgaggacaacatcaacaagttttgtgaaaatcctgatgaggtgaaacgtgatgaccccaagttttatgaatcaaacatcatgagcactatcaatggctatgtgcctgagagcataactactcttggattctgctttgatgacactgtccagtggcacttctgtagtgtggggacccagaatgaaattttgaccatccacttcactgggcactcattcatctatggaaagaggcatgaggacaccttgaccctcttccccatgcgtggagaatctgtgacggtcacaatggataatgttggaacttggatgttaacttccatgaattctagtccaagaagcaaaaagctgaggctgaaattcagggatgttaaatgtatcccagatgatgatgaagactcatatgagatttttgaacctccagaatctacagtcatggctacacggaaaatgcatgatcgtttagaacctgaagatgaagagagtgatgctgactatgattaccagaacagactggctgcagcattaggaatcaggtcattccgaaactcatcattgaatcaggaagaagaagagttcaatcttactgccctagctctggagaatggcactgaattcgtttcttcaaacacagatataattgttggttcaaattattcttccccaagtaatattagtaagttcactgtcaataaccttgcagaacctcagaaagccccttctcaccaacaagccaccacagctggttccccactgagacacctcattggcaagaactcagttctcaattcttccacagcagagcattccagcccatattctgaagaccctatagaggatcctctacagccagatgtcacagggatacgtctactttcacttggtgctggagaattcaaaagtcaagaacatgctaagcataagggacccaaggtagaaagagatcaagcagcaaagcacaggttctcctggatgaaattactagcacataaagttgggagacacctaagccaagacactggttctccttccggaatgaggccctgggaggaccttcctagccaagacactggttctccttccagaatgaggccctggaaggaccctcctagtgatctgttactcttaaaacaaagtaactcatctaagattttggttgggagatggcatttggcttctgagaaaggtagctatgaaataatccaagatactgatgaagacacagctgttaacaattggctgatcagcccccagaatgcctcacgtgcttggggagaaagcacccctcttgccaacaagcctggaaagcagagtggccacccaaagtttcctagagttagacataaatctctacaagtaagacaggatggaggaaagagtagactgaagaaaagccagtttctcattaagacacgaaaaaagaaaaaagagaagcacacacaccatgctcctttatctccgaggacctttcaccctctaagaagtgaagcctacaacacattttcagaaagaagacttaagcattcgttggtgcttcataaatccaatgaaacatctcttcccacagacctcaatcagacattgccctctatggattttggctggatagcctcacttcctgaccataatcagaattcctcaaatgacactggtcaggcaagctgtcctccaggtctttatcagacagtgcccccagaggaacactatcaaacattccccattcaagaccctgatcaaatgcactctacttcagaccccagtcacagatcctcttctccagagctcagtgaaatgcttgagtatgaccgaagtcacaagtccttccccacagatataagtcaaatgtccccttcctcagaacatgaagtctggcagacagtcatctctccagacctcagccaggtgaccctctctccagaactcagccagacaaacctctctccagacctcagccacacgactctctctccagaactcattcagagaaacctttccccagccctcggtcagatgcccatttctccagacctcagccatacaaccctttctccagacctcagccatacaaccctttctttagacctcagccagacaaacctctctccagaactcagtcagacaaacctttctccagccctcggtcagatgcccctttctccagacctcagccatacaaccctttctctagacttcagccagacaaacctctctccagaactcagccatatgactctctctccagaactcagtcagacaaacctttccccagccctcggtcagatgcccatttctccagacctcagccatacaaccctttctctagacttcagccagacaaacctctctccagaactcagtcaaacaaacctttccccagccctcggtcagatgcccctttctccagaccccagccatacaaccctttctctagacctcagccagacaaacctctctccagaactcagtcagacaaacctttccccagacctcagtgagatgcccctctttgcagatctcagtcaaattccccttaccccagacctcgaccagatgacactttctccagaccttggtgagacagatctttccccaaactttggtcagatgtccctttccccagacctcagccaggtgactctctctccagacatcagtgacaccacccttctcccggatctcagccagatatcacctcctccagaccttgatcagatattctacccttctgaatctagtcagtcattgcttcttcaagaatttaatgagtcttttccttatccagaccttggtcagatgccatctccttcatctcctactctcaatgatacttttctatcaaaggaatttaatccactggttatagtgggcctcagtaaagatggtacagattacattgagatcattccaaaggaagaggtccagagcagtgaagatgactatgctgaaattgattatgtgccctatgatgacccctacaaaactgatgttaggacaaacatcaactcctccagagatcctgacaacattgcagcatggtacctccgcagcaacaatggaaacagaagaaattattacattgctgctgaagaaatatcctgggattattcagaatttgtacaaagggaaacagatattgaagactctgatgatattccagaagataccacatataagaaagtagtttttcgaaagtacctcgacagcacttttaccaaacgtgatcctcgaggggagtatgaagagcatctcggaattcttggtcctattatcagagctgaagtggatgatgttatccaagttcgttttaaaaatttagcatccagaccgtattctctacatgcccatggactttcctatgaaaaatcatcagagggaaagacttatgaagatgactctcctgaatggtttaaggaagataatgctgttcagccaaatagcagttatacctacgtatggcatgccactgagcgatcagggccagaaagtcctggctctgcctgtcgggcttgggcctactactcagctgtgaacccagaaaaagatattcactcaggcttgataggtcccctcctaatctgccaaaaaggaatactacataaggacagcaacatgcctatggacatgagagaatttgtcttactatttatgacctttgatgaaaagaagagctggtactatgaaaagaagtcccgaagttcttggagactcacatcctcagaaatgaaaaaatcccatgagtttcacgccattaatgggatgatctacagcttgcctggcctgaaaatgtatgagcaagagtgggtgaggttacacctgctgaacataggcggctcccaagacattcacgtggttcactttcacggccagaccttgctggaaaatggcaataaacagcaccagttaggggtctggccccttctgcctggttcatttaaaactcttgaaatgaaggcatcaaaacctggctggtggctcctaaacacagaggttggagaaaaccagagagcagggatgcaaacgccatttcttatcatggacagagactgtaggatgccaatgggactaagcactggtatcatatctgattcacagatcaaggcttcagagtttctgggttactgggagcccagattagcaagattaaacaatggtggatcttataatgcttggagtgtagaaaaacttgcagcagaatttgcctctaaaccttggatccaggtggacatgcaaaaggaagtcataatcacagggatccagacccaaggtgccaaacactacctgaagtcctgctataccacagagttctatgtagcttacagttccaaccagatcaactggcagatcttcaaagggaacagcacaaggaatgtgatgtattttaatggcaattcagatgcctctacaataaaagagaatcagtttgacccacctattgtggctagatatattaggatctctccaactcgagcctataacagacctacccttcgattggaactgcaaggttgtgaggtaaatggatgttccacacccctgggtatggaaaatggaaagatagaaaacaagcaaatcacagcttcttcgtttaagaaatcttggtggggagattactgggaacccttccgtgcccgtctgaatgcccagggacgtgtgaatgcctggcaagccaaggcaaacaacaataagcagtggctagaaattgatctactcaagatcaagaagataacggcaattataacacagggctgcaagtctctgtcctctgaaatgtatgtaaagagctataccatccactacagtgagcagggagtggaatggaaaccatacaggctgaaatcctccatggtggacaagatttttgaaggaaatactaataccaaaggacatgtgaagaactttttcaaccccccaatcatttccaggtttatccgtgtcattcctaaaacatggaatcaaagtattgcacttcgcctggaactctttggctgtgatatttactagaattgaacattcaaaaacccctggaagagactctttaagacctcaaaccatttagaatgggcaatgtattttacgctgtgttaaatgttaacagttttccactatttctctttcttttctattagtgaataaaattttatacaagaagcttttataatgtaactccttgctaccagtaagtaagataatggctattacttctgcattaatttgaatacaggtaggaaaatatcaagaaccaacaagaaaagggcttatctttcttaatgattgaaaatgctatgaagtaatatttatgtagttaaaatgcttcattataactcttttaaatcctttacacactagtaaaacagatattactttaaataataattgatagacctggataactttcacaaacacatgattttttaatggtttttcttgagtgaagagaaaaacaatattatcaaatgaaataagtacttaaaatatcctgtctttcccatataacaatgatttttctgactttccatgagtaaaaaaacagccaagcatctttccagtagccccattgaaattgtgaatccgtcctggtctccctaaggactgcacacattgatattcaaggttggtggtcattagatatggaacagaactgaaataaccatggtagaactgaatgtgtaatgttggctttattctagctggtactacatggcacacagtttcaaaacataatttcacctactggaaagctcagacctgtaaaacagagcatgggaactgctggtctaaatgcagttgttcctgctcaaagagacctctggccaaactggcaagcagttaaagttttctttcagggccttcctctctatggcctcaacttcctcctctctcttcttccagcaacttcccctttcatcattcctttccctggggacttggcattcagtgatcctgtagatattgcacaactggggaacctttagacatccttaaaatcacatgagatagacagtcat

SEQ ID NO: 3130 - protein, 2224 aa, Homo sapiens
MFPGCPRLWVLVVLGTSWVGWGSQGTEAAQLRQFYVAAQGISWSYRPEPTNSSLNLSVTSFKKIVYREYEPYFKKEKPQSTISGLLGPTLYAEVGDIIKVHFKNKADKPLSIHPQGIRYSKLSEGASYLDHTFPAEKMDDAVAPGREYTYEWSISEDSGPTHDDPPCLTHIYYSHENLIEDFNSGLIGPLLICKKGTLTEGGTQKTFDKQIVLLFAVFDESKSWSQSSSLMYTVNGYVNGTMPDITVCAHDHISWHLLGMSSGPELFSIHFNGQVLEQNHHKVSAITLVSATSTTANMTVGPEGKWIISSLTPKHLQAGMQAYIDIKNCPKKTRNLKKITREQRRHMKRWEYFIAAEEVIWDYAPVIPANMDKKYRSQHLDNFSNQIGKHYKKVMYTQYEDESFTKHTVNPNMKEDGILGPIIRAQVRDTLKIVFKNMASRPYSIYPHGVTFSPYEDEVNSSFTSGRNNTMIRAVQPGETYTYKWNILEFDEPTENDAQCLTRPYYSDVDIMRDIASGLIGLLLICKSRSLDRQGIQRAADIEQQAVFAVFDENKSWYLEDNINKFCENPDEVKRDDPKFYESNIMSTINGYVPESITTLGFCFDDTVQWHFCSVGTQNEILTIHFTGHSFIYGKRHEDTLTLFPMRGESVTVTMDNVGTWMLTSMNSSPRSKKLRLKFRDVKCIPDDDEDSYEIFEPPESTVMATRKMHDRLEPEDEESDADYDYQNRLAAALGIRSFRNSSLNQEEEEFNLTALALENGTEFVSSNTDIIVGSNYSSPSNISKFTVNNLAEPQKAPSHQQATTAGSPLRHLIGKNSVLNSSTAEHSSPYSEDPIEDPLQPDVTGIRLLSLGAGEFKSQEHAKHKGPKVERDQAAKHRFSWMKLLAHKVGRHLSQDTGSPSGMRPWEDLPSQDTGSPSRMRPWKDPPSDLLLLKQSNSSKILVGRWHLASEKGSYEIIQDTDEDTAVNNWLISPQNASRAWGESTPLANKPGKQSGHPKFPRVRHKSLQVRQDGGKSRLKKSQFLIKTRKKKKEKHTHHAPLSPRTFHPLRSEAYNTFSERRLKHSLVLHKSNETSLPTDLNQTLPSMDFGWIASLPDHNQNSSNDTGQASCPPGLYQTVPPEEHYQTFPIQDPDQMHSTSDPSHRSSSPELSEMLEYDRSHKSFPTDISQMSPSSEHEVWQTVISPDLSQVTLSPELSQTNLSPDLSHTTLSPELIQRNLSPALGQMPISPDLSHTTLSPDLSHTTLSLDLSQTNLSPELSQTNLSPALGQMPLSPDLSHTTLSLDFSQTNLSPELSHMTLSPELSQTNLSPALGQMPISPDLSHTTLSLDFSQTNLSPELSQTNLSPALGQMPLSPDPSHTTLSLDLSQTNLSPELSQTNLSPDLSEMPLFADLSQIPLTPDLDQMTLSPDLGETDLSPNFGQMSLSPDLSQVTLSPDISDTTLLPDLSQISPPPDLDQIFYPSESSQSLLLQEFNESFPYPDLGQMPSPSSPTLNDTFLSKEFNPLVIVGLSKDGTDYIEIIPKEEVQSSEDDYAEIDYVPYDDPYKTDVRTNINSSRDPDNIAAWYLRSNNGNRRNYYIAAEEISWDYSEFVQRETDIEDSDDIPEDTTYKKVVFRKYLDSTFTKRDPRGEYEEHLGILGPIIRAEVDDVIQVRFKNLASRPYSLHAHGLSYEKSSEGKTYEDDSPEWFKEDNAVQPNSSYTYVWHATERSGPESPGSACRAWAYYSAVNPEKDIHSGLIGPLLICQKGILHKDSNMPMDMREFVLLFMTFDEKKSWYYEKKSRSSWRLTSSEMKKSHEFHAINGMIYSLPGLKMYEQEWVRLHLLNIGGSQDIHVVHFHGQTLLENGNKQHQLGVWPLLPGSFKTLEMKASKPGWWLLNTEVGENQRAGMQTPFLIMDRDCRMPMGLSTGIISDSQIKASEFLGYWEPRLARLNNGGSYNAWSVEKLAAEFASKPWIQVDMQKEVIITGIQTQGAKHYLKSCYTTEFYVAYSSNQINWQIFKGNSTRNVMYFNGNSDASTIKENQFDPPIVARYIRISPTRAYNRPTLRLELQGCEVNGCSTPLGMENGKIENKQITASSFKKSWWGDYWEPFRARLNAQGRVNAWQAKANNNKQWLEIDLLKIKKITAIITQGCKSLSSEMYVKSYTIHYSEQGVEWKPYRLKSSMVDKIFEGNTNTKGHVKNFFNPPIISRFIRVIPKTWNQSIALRLELFGCDIY

SEQ ID NO: 3131 - DNA, 7010 bp, Homo sapiens
gcggagggagtgagagccagaggctgctgctgccgtttgcaagaactgcaggggaggaggacgctgccacccacagcctctagagctcattgcagctgggacagcccggagtgtggttagcagctcggcaagcgctgcccaggtcctggggtggtggcagccagcgggagcaggaaaggaagcatgttcccaggctgcccacgcctctgggtcctggtggtcttgggcaccagctgggtaggctgggggagccaagggacagaagcggcacagctaaggcagttctacgtggctgctcagggcatcagttggagctaccgacctgagcccacaaactcaagtttgaatctttctgtaacttcctttaagaaaattgtctacagagagtatgaaccatattttaagaaagaaaaaccacaatctaccatttcaggacttcttgggcctactttatatgctgaagtcggagacatcataaaagttcactttaaaaataaggcagataagcccttgagcatccatcctcaaggaattaggtacagtaaattatcagaaggtgcttcttaccttgaccacacattccctgcggagaagatggacgacgctgtggctccaggccgagaatacacctatgaatggagtatcagtgaggacagtggacccacccatgatgaccctccatgcctcacacacatctattactcccatgaaaatctgatcgaggatttcaactcggggctgattgggcccctgcttatctgtaaaaaagggaccctaactgagggtgggacacagaagacgtttgacaagcaaatcgtgctactatttgctgtgtttgatgaaagcaagagctggagccagtcatcatccctaatgtacacagtcaatggatatgtgaatgggacaatgccagatataacagtttgtgcccatgaccacatcagctggcatctgctgggaatgagctcggggccagaattattctccattcatttcaacggccaggtcctggagcagaaccatcataaggtctcagccatcacccttgtcagtgctacatccactaccgcaaatatgactgtgggcccagagggaaagtggatcatatcttctctcaccccaaaacatttgcaagctgggatgcaggcttacattgacattaaaaactgcccaaagaaaaccaggaatcttaagaaaataactcgtgagcagaggcggcacatgaagaggtgggaatacttcattgctgcagaggaagtcatttgggactatgcacctgtaataccagcgaatatggacaaaaaatacaggtctcagcatttggataatttctcaaaccaaattggaaaacattataagaaagttatgtacacacagtacgaagatgagtccttcaccaaacatacagtgaatcccaatatgaaagaagatgggattttgggtcctattatcagagcccaggtcagagacacactcaaaatcgtgttcaaaaatatggccagccgcccctatagcatttaccctcatggagtgaccttctcgccttatgaagatgaagtcaactcttctttcacctcaggcaggaacaacaccatgatcagagcagttcaaccaggggaaacctatacttataagtggaacatcttagagtttgatgaacccacagaaaatgatgcccagtgcttaacaagaccatactacagtgacgtggacatcatgagagacatcgcctctgggctaataggactacttctaatctgtaagagcagatccctggacaggcaaggaatacagagggcagcagacatcgaacagcaggctgtgtttgctgtgtttgatgagaacaaaagctggtaccttgaggacaacatcaacaagttttgtgaaaatcctgatgaggtgaaacgtgatgaccccaagttttatgaatcaaacatcatgagcactatcaatggctatgtgcctgagagcataactactcttggattctgctttgatgacactgtccagtggcacttctgtagtgtggggacccagaatgaaattttgaccatccacttcactgggcactcattcatctatggaaagaggcatgaggacaccttgaccctcttccccatgcgtggagaatctgtgacggtcacaatggataatgttggaacttggatgttaacttccatgaattctagtccaagaagcaaaaagctgaggctgaaattcagggatgttaaatgtatcccagatgatgatgaagactcatatgagatttttgaacctccagaatctacagtcatggctacacggaaaatgcatgatcgtttagaacctgaagatgaagagagtgatgctgactatgattaccagaacagactggctgcagcattaggaatcaggtcattccgaaactcatcattgaatcaggaagaagaagagttcaatcttactgccctagctctggagaatggcactgaattcgtttcttcaaacacagatataattgttggttcaaattattcttccccaagtaatattagtaagttcactgtcaataaccttgcagaacctcagaaagccccttctcaccaacaagccaccacagctggttccccactgagacacctcattggcaagaactcagttctcaattcttccacagcagagcattccagcccatattctgaagaccctatagaggatcctctacagccagatgtcacagggatacgtctactttcacttggtgctggagaattcaaaagtcaagaacatgctaagcataagggacccaaggtagaaagagatcaagcagcaaagcacaggttctcctggatgaaattactagcacataaagttgggagacacctaagccaagacactggttctccttccggaatgaggccctgggaggaccttcctagccaagacactggttctccttccagaatgaggccctggaaggaccctcctagtgatctgttactcttaaaacaaagtaactcatctaagattttggttgggagatggcatttggcttctgagaaaggtagctatgaaataatccaagatactgatgaagacacagctgttaacaattggctgatcagcccccagaatgcctcacgtgcttggggagaaagcacccctcttgccaacaagcctggaaagcagagtggccacccaaagtttcctagagttagacataaatctctacaagtaagacaggatggaggaaagagtagactgaagaaaagccagtttctcattaagacacgaaaaaagaaaaaagagaagcacacacaccatgctcctttatctccgaggacctttcaccctctaagaagtgaagcctacaacacattttcagaaagaagacttaagcattcgttggtgcttcataaatccaatgaaacatctcttcccacagacctcaatcagacattgccctctatggattttggctggatagcctcacttcctgaccataatcagaattcctcaaatgacactggtcaggcaagctgtcctccaggtctttatcagacagtgcccccagaggaacactatcaaacattccccattcaagaccctgatcaaatgcactctacttcagaccccagtcacagatcctcttctccagagctcagtgaaatgcttgagtatgaccgaagtcacaagtccttccccacagatataagtcaaatgtccccttcctcagaacatgaagtctggcagacagtcatctctccagacctcagccaggtgaccctctctccagaactcagccagacaaacctctctccagacctcagccacacgactctctctccagaactcattcagagaaacctttccccagccctcggtcagatgcccatttctccagacctcagccatacaaccctttctccagacctcagccatacaaccctttctttagacctcagccagacaaacctctctccagaactcagtcagacaaacctttctccagccctcggtcagatgcccctttctccagacctcagccatacaaccctttctctagacttcagccagacaaacctctctccagaactcagccatatgactctctctccagaactcagtcagacaaacctttccccagccctcggtcagatgcccatttctccagacctcagccatacaaccctttctctagacttcagccagacaaacctctctccagaactcagtcaaacaaacctttccccagccctcggtcagatgcccctttctccagaccccagccatacaaccctttctctagacctcagccagacaaacctctctccagaactcagtcagacaaacctttccccagacctcagtgagatgcccctctttgcagatctcagtcaaattccccttaccccagacctcgaccagatgacactttctccagaccttggtgagacagatctttccccaaactttggtcagatgtccctttccccagacctcagccaggtgactctctctccagacatcagtgacaccacccttctcccggatctcagccagatatcacctcctccagaccttgatcagatattctacccttctgaatctagtcagtcattgcttcttcaagaatttaatgagtcttttccttatccagaccttggtcagatgccatctccttcatctcctactctcaatgatacttttctatcaaaggaatttaatccactggttatagtgggcctcagtaaagatggtacagattacattgagatcattccaaaggaagaggtccagagcagtgaagatgactatgctgaaattgattatgtgccctatgatgacccctacaaaactgatgttaggacaaacatcaactcctccagagatcctgacaacattgcagcatggtacctccgcagcaacaatggaaacagaagaaattattacattgctgctgaagaaatatcctgggattattcagaatttgtacaaagggaaacagatattgaagactctgatgatattccagaagataccacatataagaaagtagtttttcgaaagtacctcgacagcacttttaccaaacgtgatcctcgaggggagtatgaagagcatctcggaattcttggtcctattatcagagctgaagtggatgatgttatccaagttcgttttaaaaatttagcatccagaccgtattctctacatgcccatggactttcctatgaaaaatcatcagagggaaagacttatgaagatgactctcctgaatggtttaaggaagataatgctgttcagccaaatagcagttatacctacgtatggcatgccactgagcgatcagggccagaaagtcctggctctgcctgtcgggcttgggcctactactcagctgtgaacccagaaaaagatattcactcaggcttgataggtcccctcctaatctgccaaaaaggaatactacataaggacagcaacatgcctatggacatgagagaatttgtcttactatttatgacctttgatgaaaagaagagctggtactatgaaaagaagtcccgaagttcttggagactcacatcctcagaaatgaaaaaatcccatgagtttcacgccattaatgggatgatctacagcttgcctggcctgaaaatgtatgagcaagagtgggtgaggttacacctgctgaacataggcggctcccaagacattcacgtggttcactttcacggccagaccttgctggaaaatggcaataaacagcaccagttaggggtctggccccttctgcctggttcatttaaaactcttgaaatgaaggcatcaaaacctggctggtggctcctaaacacagaggttggagaaaaccagagagcagggatgcaaacgccatttcttatcatggacagagactgtaggatgccaatgggactaagcactggtatcatatctgattcacagatcaaggcttcagagtttctgggttactgggagcccagattagcaagattaaacaatggtggatcttataatgcttggagtgtagaaaaacttgcagcagaatttgcctctaaaccttggatccaggtggacatgcaaaaggaagtcataatcacagggatccagacccaaggtgccaaacactacctgaagtcctgctataccacagagttctatgtagcttacagttccaaccagatcaactggcagatcttcaaagggaacagcacaaggaatgtgatgtattttaatggcaattcagatgcctctacaataaaagagaatcagtttgacccacctattgtggctagatatattaggatctctccaactcgagcctataacagacctacccttcgattggaactgcaaggttgtgaggtaaatggatgttccacacccctgggtatggaaaatggaaagatagaaaacaagcaaatcacagcttcttcgtttaagaaatcttggtggggagattactgggaacccttccgtgcccgtctgaatgcccagggacgtgtgaatgcctggcaagccaaggcaaacaacaataagcagtggctagaaattgatctactcaagatcaagaagataacggcaattataacacagggctgcaagtctctgtcctctgaaatgtatgtaaagagctataccatccactacagtgagcagggagtggaatggaaaccatacaggctgaaatcctccatggtggacaagatttttgaaggaaatactaataccaaaggacatgtgaagaactttttcaaccccccaatcatttccaggtttatccgtgtcattcctaaaacatggaatcaaagtattgcacttcgcctggaactctttggctgtgatatttactagaattgaacattcaaaaacccctggaagagactctttaagacctcaaaccatttagaatgggcaatgtattttacgctgtgttaaatgttaacagttttccactatttctctttcttttctattagtgaataaaattttatacaagaagcttt

SEQ ID NO: 3132 - protein, 2224 aa, Homo sapiens; identical to SEQ ID NO: 3130

SEQ ID NO: 3133 - DNA, 595 bp, Homo sapiens
taagggataagatagaacaaaatccttttgagctctgtgcttttttgcataacttggtctaaaaaaaaagcaaaggttttaacatcttccttatctatgtgtttttgtcattttcataggcaaacaacaataagcagtggctagaaattgatctactcaagatcaagaagataacggcaattataacacagggctgcaagtctctgtcctctgaaatgtatgtaaagagctataccatccactacagtgagcagggagtggaatggaaaccatacaggctgaaatcctccatggtggacaagatttttgaaggaaatactaataccaaaggacatgtgaagaactttttcaaccccccaatcatttccaggtttatccgtgtcattcctaaaacatggaatcaaagtattgcacttcgcctggaactctttggctgtgatatttactagaattgaacattcaaaaacccctggaagagactctttaagacctcaaaccatttagaatgggcaatgtattttacgctgtgttaaatgttaacagttttccactatttctctttcttttctattagtgaataaaattttatacaaga

SEQ ID NO: 3134 - protein, 77 aa, Homo sapiens; identical to SEQ ID NO: 3128

SEQ ID NO: 3135 - DNA, 330 bp, Homo sapiens
cttgtataaaattttattcactaatagaaaagaaagagaaatagtggaaaactgttaacatttaacacagcgtaaaatacattgcccattctaaatggtttgaggtcttaaagagtctcttccaggggtttttgaatgttcaattctagtaaatatcacagccaaagagttccaggcgaagtgcaatactttgattccatgttttaggaatgacacggataaacctggaaatgattggggggttgaaaaagttcttcacatgtcctttggtattagtatttctccctgctcactgtagtggatggtatagctctttacatacatttcaga

SEQ ID NO: 3136 - protein, 39 aa, Homo sapiens
MTRINLEMIGGLKKFFTCPLVLVFLPAHCSGWYSSLHTF

SEQ ID NO: 3137 - DNA, 1502 bp, Homo sapiens
gcggagggagtgagagccagaggctgctgctgccgtttgcaagaactgcaggggaggaggacgctgccacccacagcctctagagctcattgcagctgggacagcccggagtgtggttagcagctcggcaagcgctgcccaggtcctggggtggtggcagccagcgggagcaggaaaggaagcatgttcccaggctgcccacgcctctgggtcctggtggtcttgggcaccagctgggtaggctgggggagccaagggacagaagcggcacagctaaggcagttctacgtggctgctcagggcatcagttggagctaccgacctgagcccacaaactcaagtttgaatctttctgtaacttcctttaagaaaattgtctacagagagtatgaaccatattttaagaaagaaaaaccacaatctaccatttcaggacttcttgggcctactttatatgctgaagtcggagacatcataaaagttcactttaaaaataaggcagataagcccttgagcatccatcctcaaggaattaggtacagtaaattatcagaaggtgcttcttaccttgaccacacattccctgcggagaagatggacgacgctgtggctccaggccgagaatacacctatgaatggagtatcagtgaggacagtggacccacccatgatgaccctccatgcctcacacacatctattactcccatgaaaatctgatcgaggatttcaactcggtcaaacaaacctttccccagccctcggtcagatgcccctttctccagaccccagccatacaaccctttctctagacctcagccagacaaacctctctccagaactcagtcagacaaacctttccccagacctcagtgagatgcccctctttgcagatctcagtcaaattccccttaccccagacctcgaccagatgacactttctccagaccttggtgagacagatctttccccaaactttggtcagatgtccctttccccagacctcagccaggtgactctctctccagacatcagtgacaccacccttctcccggatctcagccagatatcacctcctccagaccttgatcagatattctacccttctgaatctagtcagtcattgcttcttcaagaatttaatgagtcttttccttatccagaccttggtcagatgccatctccttcatctcctactctcaatgatacttttctatcaaaggaatttaatccactggttatagtgggcctcagtaaagatggtacagattacattgagatcattccaaaggaagaggtccagagcagtgaagatgactatgctgaaattgattatgtgccctatgatgacccctacaaaactgatgttaggacaaacatcaactcctccagagatcctgacaacattgcagcatggtacctccgcagcaacaatggaaacagaagaaattattacattgctgctgaagaaatatcctgggattattcagaatttgtacaaagg

SEQ ID NO: 3138 - protein, 208 aa, Homo sapiens
MFPGCPRLWVLVVLGTSWVGWGSQGTEAAQLRQFYVAAQGISWSYRPEPTNSSLNLSVTSFKKIVYREYEPYFKKEKPQSTISGLLGPTLYAEVGDIIKVHFKNKADKPLSIHPQGIRYSKLSEGASYLDHTFPAEKMDDAVAPGREYTYEWSISEDSGPTHDDPPCLTHIYYSHENLIEDFNSVKQTFPQPSVRCPFLQTPAIQPFL

SEQ ID NO: 3139 - DNA, 816 bp, Homo sapiens
gggcatgactctctctcttgagtaggcacacactcccttttctcgggtgtgtactttttgctttgtgatacatctctgcactttcagtattttccaactcatccttaaattccttctcacaacagtgtcaagagcctggacgccagccaggattgaggtcctacgggtgtttggggacctccccaagcccacgagtatcaatggcagtatcaattgtctgtgacagtgattaaggagcaaaacacttggaacccacaagactcccagaaggtgaagttaagagctcccagactcataaggttattagaacagcaaactggcaccccaaagaactttacggagacttgcaacctatcaacaagttggatgagggattaaaagccttcaacaaccaacaaccccaagcatcaaactgaaggaaacattctaaccttcacagacagactggaggctggatggggacctggctgaagacatctggagaatgaaagttaagtaccagcttgcatttttgtgcccctagattatttttgcattttaaaataagaagcatcaaattgcgtgtctctgtgtaaaagttctagcaatttgttttaaggtgaacttattttggcttagggactacaaaaagagaaggtaattcctagggaaggaagaagagaaagaaatgaaaattagagaataagattattttgaatgacttcaggtagcgaggagtgtgtgtttgtgagtgtgtatttgagagacttggctcatgcctgtgggtcttctcttctagtatcagtgaggggagggattactgaagaagaagggggg

SEQ ID NO: 3140 - protein, 39 aa, Homo sapiens
MTSGSEECVFVSVYLRDLAHACGSSLLVSVRGGITEEEG

SEQ ID NO: 3141 - DNA, 4370 bp, Homo sapiens; identical to SEQ ID NO: 191

SEQ ID NO: 3142 - protein, 827 aa, Homo sapiens; identical to SEQ ID NO: 192

SEQ ID NO: 3143 - DNA, 6918 bp, Homo sapiens
gggcatgactctctctcttgagtaggcacacactcccttttctcgggtgtgtactttttgctttgtgatacatctctgcactttcagtattttccaactcatccttaaattccttctcacaacagtgtcaagagcctggacgccagccaggattgaggtcctacgggtgtttggggacctccccaagcccacgagtatcaatggcagtatcaattgtctgtgacagtgattaaggagcaaaacacttggaacccacaagactcccagaaggtgaagttaagagctcccagactcataaggttattagaacagcaaactggcaccccaaagaactttacggagacttgcaacctatcaacaagttggatgagggattaaaagccttcaacaaccaacaaccccaagcatcaaactgaaggaaacattctaaccttcacagacagactggaggctggatggggacctggctgaagacatctggagaatgaaagttaagtaccagcttgcatttttgtgcccctagattatttttgcattttaaaataagaagcatcaaattgcgtgtctctgtgtaaaagttctagcaatttgttttaaggtgaacttattttggcttagggactacaaaaagagaaggtaattcctagggaaggaagaagagaaagaaatgaaaattagagaataagattattttgaatgacttcaggtagcgaggagtgtgtgtttgtgagtgtgtatttgagagacttggctcatgcctgtgggtcttctcttctagtatcagtgaggggagggattactgaagaagaaggggggaaaaaaaaagaaagaaatctgagctttctgggaggaaattcaaaggaaccaagagaaattaacttcgttctgcaaggactaaagtacagcaagaggagagaggtcaagcgagaagcgtgcgggaagcacatgccctggggaggcatagaagccacactggcagagcggccagcacaggtagccagcagaggcattcttggggctatttgaaaaagtttggtctgtgaacaaaacagtttccctggtgactgcaaatccattgctagctgcctctttctcgtctgcccatcactctggtgtggtacccagaagttgacttctggttctgtagaaagagctaggggaggtatgatgtgcttaaagatcctaagaataagcctggcgattttggctgggtgggcactctgttctgccaactctgagctgggctggacacgcaagaaatccttggttgagagggaacacctgaatcaggtgctgttggaaggagaacgttgttggctgggggccaaggttcgaagacccagagcttctccacagcatcacctctttggagtctaccccagcagggctgggaactacctaaggccctaccccgtgggggagcaagaaatccatcatacaggacgcagcaaaccagacactgaaggaaatgctgtgagccttgttcccccagacctgactgaaaatccagcaggactgaggggtgcagttgaagagccggctgccccatgggtaggggatagtcctattgggcaatctgagctgctgggagatgatgacgcttatctcggcaatcaaagatccaaggagtctctaggtgaggccgggattcagaaaggctcagccatggctgccactactaccaccgccattttcacaaccctgaacgaacccaaaccagagacccaaaggaggggctgggccaagtccaggcagcgtcgccaagtgtggaagaggcgggcggaagatgggcagggagactccggtatctcttcacatttccaaccttggcccaagcattcccttaaacacagggtcaaaaagagtccaccggaggaaagcaaccaaaatggtggagagggctcctaccgagaagcagagacctttaactcccaagtaggactgcccatcttatacttctctgggaggcgggagcggctgctgctgcgtccagaagtgctggctgagattccccgggaggcgttcacagtggaagcctgggttaaaccggagggaggacagaacaacccagccatcatcgcaggtgtgtttgataactgctcccacactgtcagtgacaaaggctgggccctggggatccgctcagggaaggacaagggaaagcgggatgctcgcttcttcttctccctctgcaccgaccgcgtgaagaaagccaccatcttgattagccacagtcgctaccaaccaggcacatggacccatgtggcagccacttacgatggacggcacatggccctgtatgtggatggcactcaggtggctagcagtctagaccagtctggtcccctgaacagccccttcatggcatcttgccgctctttgctcctggggggagacagctctgaggatgggcactatttccgtggacacctgggcacactggttttctggtcgaccgccctgccacaaagccattttcagcacagttctcagcattcaagtggggaggaggaagcgactgacttggtcctgacagcgagctttgagcctgtgaacacagagtgggttccctttagagatgagaagtacccacgacttgaggttctccagggctttgagccagagcctgagattctgtcgcctttgcagcccccactctgtgggcaaacagtctgtgacaatgtggaattgatctcccagtacaatggatactggccccttcggggagagaaggtgatacgctaccaggtggtgaacatctgtgatgatgagggcctaaaccccattgtgagtgaggagcagattcgtctgcagcacgaggcactgaatgaggccttcagccgctacaacatcagctggcagctgagcgtccaccaggtccacaattccaccctgcgacaccgggttgtgcttgtgaactgtgagcccagcaagattggcaatgaccattgtgaccccgagtgtgagcacccactcacaggctatgatgggggtgactgccgcctgcagggccgctgctactcctggaaccgcagggatgggctctgtcacgtggagtgtaacaacatgctgaacgactttgacgacggagactgctgcgacccccaggtggctgatgtgcgcaagacctgctttgaccctgactcacccaagagggcatacatgagtgtgaaggagctgaaggaggccctgcagctgaacagtactcacttcctcaacatctactttgccagctcagtgcgggaagaccttgcaggtgctgccacctggccttgggacaaggacgctgtcactcacctgggtggcattgtcctcagcccagcatattatgggatgcctggccacaccgacaccatgatccatgaagtgggacatgttctgggactctaccatgtctttaaaggagtcagtgaaagagaatcctgcaatgacccctgcaaggagacagtgccatccatggaaacgggagacctctgtgccgacaccgcccccactcccaagagtgagctgtgccgggaaccagagcccactagtgacacctgtggcttcactcgcttcccaggggctccgttcaccaactacatgagctacacggatgataactgcactgacaacttcactcctaaccaagtggcccgaatgcattgctatttggacctagtctatcagcagtggactgaaagcagaaagcccacccccatccccattccacctatggtcatcggacagaccaacaagtccctcactatccactggctgcctcctattagtggagttgtatatgacagggcctcaggcagcttgtgtggcgcttgcactgaagatgggacctttcgtcagtatgtgcacacagcttcctcccggcgggtgtgtgactcctcaggttattggaccccagaggaggctgtggggcctcctgatgtggatcagccctgcgagccaagcttacaggcctggagccctgaggtccacctgtaccacatgaacatgacggtcccctgccccacagaaggctgtagcttggagctgctcttccaacacccggtccaagccgacaccctcaccctgtgggtcacttccttcttcatggagtcctcgcaggtcctctttgacacagagatcttgctggaaaacaaggagtcagtgcacctgggccccttagacactttctgtgacatcccactcaccatcaaactgcacgtggatgggaaggtgtcgggggtgaaagtctacacctttgatgagaggatagagattgatgcagcactcctgacttctcagccccacagtcccttgtgctctggctgcaggcctgtgaggtaccaggttctccgcgatcccccatttgccagtggtttgcccgtggtggtgacacattctcacaggaagttcacggacgtggaggtcacacctggacagatgtatcagtaccaagttctagctgaagctggaggagaactgggagaagcttcgcctcctctgaaccacattcatggagctccttattgtggagatgggaaggtgtcagagagactgggagaagagtgtgatgatggagaccttgtgagcggagatggctgctccaaggtgtgtgagctggaggaaggtttcaactgtgtaggagagccaagcctttgctacatgtatgagggagatggcatatgtgaaccttttgagagaaaaaccagcattgtagactgtggcatctacactcccaaaggatacttggatcaatgggctacccgggcttactcctctcatgaagacaagaagaagtgtcctgtttccttggtaactggagaacctcattccctaatttgcacatcataccatccagatttacccaaccaccgtcccctaactggctggtttccctgtgttgccagtgaaaatgaaactcaggatgacaggagtgaacagccagaaggtagcctgaagaaagaggatgaggtttggctcaaagtgtgtttcaatagaccaggagaggccagagcaatttttatttttttgacaactgatggcctagttcccggagagcatcagcagccgacagtgactctctacctgaccgatgtccgtggaagcaaccactctcttggaacctatggactgtcatgccagcataatccactgattatcaatgtgacccatcaccagaatgtccttttccaccataccacctcagtgctgctgaatttctcatccccacgggtcggcatctcagctgtggctctaaggacatcctcccgcattggtctttcggctcccagtaactgcatctcagaggacgaggggcagaatcatcagggacagagctgtatccatcggccctgtgggaagcaggacagctgtccgtcattgctgcttgatcatgctgatgtggtgaactgtacctctataggcccaggtctcatgaagtgtgctatcacttgtcaaaggggatttgcccttcaggccagcagtgggcagtacatcaggcccatgcagaaggaaattctgctcacatgttcttctgggcactgggaccagaatgtgagctgccttcccgtggactgcggtgttcccgacccgtctttggtgaactatgcaaacttctcctgctcagagggaaccaaatttctgaaacgctgctcaatctcttgtgtcccaccagccaagctgcaaggactgagcccatggctgacatgtcttgaagatggtctctggtctctccctgaagtctactgcaagttggagtgtgatgctccccctattattctgaatgccaacttgctcctgcctcactgcctccaggacaaccacgacgtgggcaccatctgcaaatatgaatgcaaaccagggtactatgtggcagaaagtgcagagggtaaagtcaggaacaagctcctgaagatacaatgcctggaaggtggaatctgggagcaaggcagctgcattcctgtggtgtgtgagccaccccctcctgtgtttgaaggcatgtatgaatgtaccaatggcttcagcctggacagccagtgtgtgctcaactgtaaccaggaacgtgaaaagcttcccatcctctgcactaaagagggcctgtggacccaggagtttaagttgtgtgagaatctgcaaggagaatgcccaccacccccctcagagctgaattctgtggagtacaaatgtgaacaaggatatgggattggtgcagtgtgttccccattgtgtgtaatcccccccagtgaccccgtgatgctacctgagaatatcactgctgacactctggagcactggatggaacctgtcaaagtccagagcattgtgtgcactggccggcgtcaatggcacccagaccccgtcttagtccactgcatccagtcatgtgagcccttccaagcagatggttggtgtgacactatcaacaaccgagcctactgccactatgacgggggagactgctgctcttccacactctcctccaagaaggtcattccatttgctgctgactgtgacctggatgagtgcacctgccgggaccccaaggcagaagaaaatcagtaactgtgggaacaagcccctccctccactgcctcagaggcagtaagaaagagaggccgacccaggaggaaacaaagggtgaatgaagaagaacaatcatgaaatggaagaaggaggaagagcatgaaggatcttataagaaatgcaagaggatattgataggtgtgaactagttcatcaagtagcccaagtaggagagaatcataggcaaaagtttctttaaagtggcagttgattaacatggaaggggaaatatgatagatatataaggaccctcctccctcacttatattctattaaatcctatcctcaactcttgccctgctctccgctccaccccctgccaactactcagtcccacccaacttgtaaaccaatacc

SEQ ID NO: 3144 - protein, 1791 aa, Homo sapiens; identical to SEQ ID NO: 190

SEQ ID NO: 3145 - DNA, 4207 bp, Homo sapiens
gctccgggaaacaaagaatccggggctctccagacatcagagcttaaacccaggactctgcaagcggcatctcattccggggtccagggctctcccggctctccatcccctccctaacctcccccgcctcccgcgctcgctccctcgctccctccccgctcgcttcctcccccaccatcgcagcgctaggaggaaggcggccggggctcaagatggctttagccgggctctgcgccctgctcgcctgctgctgggggccggcggcggtgctggccacggccgccggcgacgtggatccatccaaggagctggagtgcaagctcaaaagcatcacggtgtcggcactgcccttcctgcgcgagaacgacctgagcatcatgcacagcccctcggcctcggagcccaagctcctcttctcggtgcgcaacgacttcccgggagaaatggtcgtggtggacgacctggagaacacggagctgccctacttcgtgctggagatctcagggaacacagaggatatccctttggtgcgctggaggcagcagtggctggagaatggcactttgctttttcacattcatcaccaagatggtgccccaagccttcctggacaagaccccactgaagaaccccaacatgagtcggcagaagaggagctgaggatcctccacatctcagtcatgggtggcatgatcgctctgctgctgtccatcttgtgcctggtgatgatcctgtatactcgccggcgctggtgcaaacgccgccgggtcccgcagccccagaagagtgccagtgctgaggcagccaatgagattcactacattccttctgtgctgatcggcgggcacggacgggagagcctgcgcaatgcccgcgtgcagggccacaactccagtggcaccctgagcatccgggagacacctatcctggacggctatgagtatgacatcactgatctgcgccaccatctgcagagggagtgcatgaacggaggggaggactttgccagccaggtcacgcgcaccctcgactccctgcagggctgcaatgaaaagtcggggatggacctcacaccaggaagtgacaatgccaagctgtcactgatgaacaagtataaagataatattatagccactagccctgtggactccaaccaccagcaagccacccttctctctcacacctccagcagccagagaaagcggatcaacaacaaagcaagagctggttccgccttcttgaaccctgaaggggattctggcacagaggcagaaaacgacccccagctgaccttttacacggatccttcaaggagcaggaggcgtagtagagtgggttctccccgaagtcctgtgaataagaccaccttgaccctgatcagcatcaccagctgtgtgattggcctcgtgtgctcctctcacgtcaactgccctctcgttgtcaagatcaccctgcatgtccctgagcacctgattgctgatgggagccgcttcatcttgctggaggggagccagctggatgccagtgactggctgaaccctgcccaagtggttctcttctctcagcagaactccagcggaccctgggccatggacctctgtgcccggcggctcctggacccctgtgaacaccaatgtgaccccgaaactggggaatgcctctgctatgaaggctacatgaaggatccagtacataagcacctttgcattcggaacgaatgggggacaaaccaggggccatggccttacacaatatttcagcgaggctttgacctggttttgggagagcagccctctgataaaatatttagattcacctacactcttggggagggcatgtggttgcccctcagcaagagctttgtgattccaccagccgaactggccatcaatccatcagcaaagtgcaagacggacatgactgtgatggaggatgctgtggaggtcagagaggagctgatgacttcatcctccttcgacagcctggaggttctcttagattcctttgggccggtgcgcgactgcagcaaagataacgggggctgcagtaagaatttccgctgtatttcagatcgcaagctggactccactggttgcgtgtgcccatctggactcagtcccatgaaggacagctctggctgctatgaccgccacatcggggtggactgttccgacggcttcaacggcggctgtgagcagctgtgcctccagcagatggcgcccttcccggacgaccccaccttgtataacatcctcatgttctgtgggtgcatcgaggactacaagcttggtgtggatggacgctcttgccaactcatcacggagacctgtccagagggaagtgactgtggggaaagcagggagcttcccatgaaccagaccctctttggggagatgttctttggttacaacaaccattccaaggaagtggctgccggacaggtgctgaaaggaacattcaggcaaaacaactttgctcgtggtttagaccagcaactgccagatggtcttgtggtggccactgtgcccctggagaatcaatgcctagaggagatctcggagcccacccctgaccctgacttcctgactgggatggtgaacttcagtgaagtgtctgggtaccctgtgctgcagcactggaaggtccggtctgtgatgtaccacatcaaactcaaccaagtggccatctctcaggccctcagcaatgctctccactcgctggatggggctacatctcgtgcagattttgtggcgctgttggaccagttcggcaaccattacatccaggaagctatctacggctttgaggagtcctgttctatctggtacccaaacaagcaggtccagcggcgactctggctggagtatgaagacatcagtaaaggcaactccccatcagatgagtctgaggagcgggaaagagaccccaaggtgctgacattcccagaatacatcaccagcttgtcagactccggcaccaagcacatggcggctggagtccgcatggagtgccacagcaagggacgatgcccctcgtcctgccccctgtgtcatgtgacatccagccctgacacccctgctgagccggttctgctggaggtgaccaaagcagcccccatctatgaactagtgaccaacaaccagacccagaggctcttgcaggaggctaccatgagctctctctggtgctcagggactggagatgtcatcgaggactggtgtcgatgtgactccactgcttttggagctgatggactccccacctgtgcgcctctcccacagcctgtgctgagactctccacggttcacgagcccagcagcactcttgtggtcctggagtgggaacactcagagccaccaatcggggtgcagattgtagattacctcctccgtcaagagaaagtcactgacaggatggaccactccaaagtggagacagaaacagtgctgagctttgtggacgacatcatctctggagcaaagtctccttgtgcaatgccatctcaggtgccggacaagcagctcaccaccatctctctgatcatacgatgcctggaacctgacaccatttacatgttcacgctgtggggagtggacaacacaggacggcgctccaggccaagcgacgtgatcgtgaagaccccatgccccgtggtggatgatgtcaaggctcaagaaatagcagacaagatctacaatctcttcaatggctacactagtgggaaggagcagcagaccgcctacaacaccctcctggatctgggttcccccaccttacaccgggtcctctaccactataaccagcactatgagagttttggggaattcacctggcgatgtgaggatgagttaggtcccaggcttccagcgtgttgggacagtcagaggagttgtagatgattggaggaaaggaagaagacggcagccagggtatttccccttctccctgcctcagatggcatctccagcatctccttcatgacctctgtctcctccgtgtgaccttccatcccctcaaagcaggagctgcgccctgatgttgctaatctgataggttgctcctatttgtccttctataatcccaaagtcttcctaattggtttctcatcttgaacttcctctgtggaattacctaaaatgtattttgctttcctgactaggtcttgattaatatatacttcaaactaaaagttagtacatatcgtctg

SEQ ID NO: 3146 - protein, 1228 aa, Homo sapiens
MALAGLCALLACCWGPAAVLATAAGDVDPSKELECKLKSITVSALPFLRENDLSIMHSPSASEPKLLFSVRNDFPGEMVVVDDLENTELPYFVLEISGNTEDIPLVRWRQQWLENGTLLFHIHHQDGAPSLPGQDPTEEPQHESAEEELRILHISVMGGMIALLLSILCLVMILYTRRRWCKRRRVPQPQKSASAEAANEIHYIPSVLIGGHGRESLRNARVQGHNSSGTLSIRETPILDGYEYDITDLRHHLQRECMNGGEDFASQVTRTLDSLQGCNEKSGMDLTPGSDNAKLSLMNKYKDNIIATSPVDSNHQQATLLSHTSSSQRKRINNKARAGSAFLNPEGDSGTEAENDPQLTFYTDPSRSRRRSRVGSPRSPVNKTTLTLISITSCVIGLVCSSHVNCPLVVKITLHVPEHLIADGSRFILLEGSQLDASDWLNPAQVVLFSQQNSSGPWAMDLCARRLLDPCEHQCDPETGECLCYEGYMKDPVHKHLCIRNEWGTNQGPWPYTIFQRGFDLVLGEQPSDKIFRFTYTLGEGMWLPLSKSFVIPPAELAINPSAKCKTDMTVMEDAVEVREELMTSSSFDSLEVLLDSFGPVRDCSKDNGGCSKNFRCISDRKLDSTGCVCPSGLSPMKDSSGCYDRHIGVDCSDGFNGGCEQLCLQQMAPFPDDPTLYNILMFCGCIEDYKLGVDGRSCQLITETCPEGSDCGESRELPMNQTLFGEMFFGYNNHSKEVAAGQVLKGTFRQNNFARGLDQQLPDGLVVATVPLENQCLEEISEPTPDPDFLTGMVNFSEVSGYPVLQHWKVRSVMYHIKLNQVAISQALSNALHSLDGATSRADFVALLDQFGNHYIQEAIYGFEESCSIWYPNKQVQRRLWLEYEDISKGNSPSDESEERERDPKVLTFPEYITSLSDSGTKHMAAGVRMECHSKGRCPSSCPLCHVTSSPDTPAEPVLLEVTKAAPIYELVTNNQTQRLLQEATMSSLWCSGTGDVIEDWCRCDSTAFGADGLPTCAPLPQPVLRLSTVHEPSSTLVVLEWEHSEPPIGVQIVDYLLRQEKVTDRMDHSKVETETVLSFVDDIISGAKSPCAMPSQVPDKQLTTISLIIRCLEPDTIYMFTLWGVDNTGRRSRPSDVIVKTPCPVVDDVKAQEIADKIYNLFNGYTSGKEQQTAYNTLLDLGSPTLHRVLYHYNQHYESFGEFTWRCEDELGPRLPACWDSQRSCR
